United States Patent Application Publication US 2024/0327476 A1 - sequence listing, part 101

SEQ ID NO: 194301 - DNA, 1500 bp, synthetic construct
  misc_feature 1..1500: note = Description of Artificial Sequence: Synthetic coding sequence
  source 1..1500: mol_type = other DNA
atgcggggcctgctgtgctggcccgtgctgctgctgctgctgcagccgtgggaaacccagctgcaactgaccggcccccggtgtcacacaggacccctggatctggtatttgtaatagacagctcacgctccgtgaggccatttgagtttgagaccatgaggcagttcttgatggggctcctgcgtggcctcaatgtggggcctaatgctacacgggtgggtgtcattcagtactcgtcacaagtccagtccgtttttccgttgcgggcctttagtaggagagaggacatggagcgggccattagggacctcgtccccctggcacagggaaccatgactggactggccatacagtatgccatgaacgtggccttttctgtcgcagagggagctcgaccacccgaagaaagagtgcctagagtcgctgtgattgtaaccgacggacggcctcaggaccgcgttgcagaagtggcggcacaggccagggctagggggattgaaatctatgctgttggagttcagagggccgatgtgggcagtctgcgagcaatggcttcgcccccgctcgacgaacacgtgtttctagttgagtcgtttgaccttattcaggaatttgggctacagtttcagagcagactgtgtgtgagggacctgtgcaatggggtggaccatggatgtgaattccagtgtgtgtcagagggcctgtcctatcgttgcctgtgccccgagggaaggcaattgcaggctgatggtaagtcttgcaatcgatgccgagagggacatgttgacctagttcttctcgtggatggctctaagtccgtgaggccccagaactttgagctagtgaaacgctttgtgaatcagatagtcgactttctggatgtgagccctgaggggacgcgagtgggactggtccaatttagttctcgggtacgaacagagtttccactcggacgctatggcactgctgccgaggtaaaacaagccgtgctggccgtggaatacatggagcgggggactatgaccggactggctttgcgccatatggtggagcactccttctcagaagcccagggtgcaagaccccgcgcactgaatgtccctagagtgggcctggtctttactgacggacgctcacaggacgatatttcagtctgggcggccagggctaaggaggaggggatcgtgatgtacgccgtgggagttggcaaggctgtggaagcagaactgagagagatcgcctccgaaccagccgaactgcatgttagttacgcgcccgacttcggcactatgacacatttgctcgagaacctgaggggatccatctgtccggaggaaggaatctcagcaggtaccgagctgcgaagcccgtgcgaatgcgaatccctggttgagtttcaggggaggactctcggtgctctagaaagtctgactctgaatcttgcccaactgaccgcacgcctggaagatttggaaaaccagctggctaaccagaagtag

SEQ ID NO: 194302 - DNA, 1623 bp, synthetic construct
  misc_feature 1..1623: note = Description of Artificial Sequence: Synthetic coding sequence
  source 1..1623: mol_type = other DNA
atgcggggcctgctgtgctggcccgtgctgctgctgctgctgcagccctgggaaacccagctgcaattgacaggtccccgttgccataccggacctctggatctagtgtttgtcattgattcctcacgatccgtgcgtccgtttgagttcgaaactatgcggcagttcctaatgggcttactacgagggctaaacgtagggcccaatgcaactcgggtgggagtgattcaatactccagtcaggtgcagagcgtattccccctgagggccttctctaggcgcgaggacatggaacgcgcgattcgagacctagttccgttagcacagggtacgatgaccggactcgccatacaatacgctatgaatgttgccttttctgtggcagaaggggcgcggccacccgaggagagagtgcctcgagtggctgtgatagttacggacggccggccccaggaccgtgtcgctgaggtggcagcacaagcccgggcccggggcattgagatttacgctgttggggtccagcgtgcggacgtcggatcattaagggctatggccagtcccccactggatgagcacgtgttcctagtggaaagctttgacctgatccaggaattcggactccagttccagagtagattgtgcgcaatcgattattgttctttcggcaaccactcctgtcagcacgaatgtgtgagcactccaggagggcctcgttgtcactgtcgtgaagggcacgacctgcagccggatggccggtcgtgccaggtgagggacctttgcaatggcgtggaccacggttgcgaatttcagtgcgtctcagaaggcctctcttaccggtgtctctgcccagaaggcagacagttgcaggccgatggaaagtcttgcaaccggtgtcgcgaaggacacgtcgacctagtcctgctggtcgatgggagtaagagtgttcggccccagaatttcgagctggtcaaacgttttgtcaatcagatcgtggactttctggacgtgtccccggaaggaacgagggtgggtctggtccagtttagttcccgggtgagaactgaattccctctgggaagatacggcaccgcagccgaagttaagcaggcggtcttagccgtggaatacatggaacgaggcacaatgacaggcctggctctgcggcacatggttgaacattctttctcagaggcacagggtgctaggccacgggcattgaatgttcctagagttgggttggtctttactgatggcaggtctcaggacgacattagtgtttgggccgctcgagctaaggaagaaggtatcgtgatgtacgctgttggcgtggggaaggccgtagaggcggagctccgagaaattgcctcggagcctgcggagcttcatgtatcatacgcgcctgactttggcaccatgacccacctgttggagaacctgaggggcagtatttgcccagaggaagggatctccgccgggactgaactccgctccccttgtgagtgtgagagtcttgtggagtttcagggtcggactctgggcgctcttgaaagcctcacactgaatctggcccagctcacagctcgcttagaggatctcgaaaatcagcttgccaaccagaagtag

SEQ ID NO: 194303 - DNA, 1299 bp, synthetic construct
  misc_feature 1..1299: note = Description of Artificial Sequence: Synthetic coding sequence
  source 1..1299: mol_type = other DNA
atgcggggcctgctgtgctggcccgtgctgctgctgctgctgcagccatgggaaacccagctccagcttaccgggaaggaccagtgcgctgaggggggccacggctgccaacaccagtgtgttaatgcctgggccatgttccactgtacttgtaacccaggctacaagctggctgccgataataagtcttgtctcgcaattgacttgtgcgccgagggcacacatggctgcgagcatcactgcgtgaactcgccagggagctacttttgccactgccaagtcggcttcgtgctacagcaggatcagcgtagctgtcgggctatcgattattgttcatttggaaaccattcgtgccagcacgaatgtgtaagcaccccgggagggccacgttgccattgtcgcgaaggccacgacctacaacctgatggaagatcatgtcaggttcgtgatttgtgcaacggcgtcgatcacggatgcgaattccagtgcgtatctgaagggttatcttacaggtgcctgtgtccagaaggcagacagcttcaggctgatgggaagagctgcaatcgttgcagggagggccacgtcgatcttgtgcttctagtcgacggcagcaaatccgtccgcccacagaactttgagctggtcaaacgcttcgtgaaccagatcgtggatttcctggatgtgagccccgaggggacaagggtggggctggttcaattctcatcaagggttcggaccgagtttccgctgggccgctacgggacagctgctgaggtcaaacaagccgtcctggccgtggagtatatggaacgaggaacaatgacagggctcgccctgcgccacatggtagagcacagctttagtgaagctcaaggcgcgaggcctcgggcgcttaatgtgccacgagtcggcttggtttttacagacggccgcagccaggacgatatttctgtgtgggccgcgagagcaaaggaggagggcatcgtcatgtatgccgtgggagtgggaaaagccgtcgaagcggagttacgagagatcgcctctgaacccgccgagttgcacgtgagttacgcaccggacttcggtacaatgacccatctgcttgaaaatctccgaggcagcatttgtcccgaagaaggaatttccgcaggaactgaactgaggagtccatgcgaatgtgagagtctcgtggagttccaagggaggactctcggcgccctcgaaagtctcacgctgaatctggctcagttgacggccagacttgaagacctcgagaaccagctagcaaaccagaagtag

SEQ ID NO: 194304 - DNA, 1299 bp, synthetic construct
  misc_feature 1..1299: note = Description of Artificial Sequence: Synthetic coding sequence
  source 1..1299: mol_type = other DNA
atgcggggcctgctgtgctggcccgtgctgctgctgctgctgcagccttgggagactcaactccagctgaccggaaaagatcagtgtgccgaaggcggacacggctgtcaacatcagtgcgttaacgcttgggctatgtttcactgcacgtgcaacccaggctacaagttggccgcagacaataaatcatgtttggctatagatctctgcgcagaaggcacccacgggtgcgagcatcactgtgttaacagccctggaagctacttttgccattgtcaggttgggtttgtgctgcagcaagatcagcgttcatgccgtgcaattgactattgtagtttcgggaaccattcatgccagcacgagtgtgtctctactcccggcggtccacgatgtcactgcagagagggacacgaccttcagccagacggccgctcatgccaagtgagggatttgtgcaatggtgttgaccatggatgtgaattccagtgcgtctccgaaggtctgtcataccgatgcttatgtccagaaggaagacagctccaagcagacggtaagtcatgcaatcggtgtagggagggacacgtagatttagtgctgctggtggacgggtccaaatcagtgaggccccagaatttcgagttagtgaaaagattcgtaaatcaaattgtggacttcctcgacgtgtcccccgagggcacgcgtgttggcctggtgcagttttcgagcagagtgcggacagaattcccactcggacggtacgggactgccgccgaagtgaaacaggctgtgttggcagttgaatacatggagagagggaccatgacgggtttagccctgcggcatatggtcgaacatagcttctcagaggcccagggtgcaaggccgcgtgcactaaatgtgcctagggtgggtctagtatttaccgatgggcgttcccaggacgacatatccgtctgggccgcaagagctaaggaggaaggaattgtgatgtacgcagtgggagtgggtaaagctgtggaagcagagttgagggagatcgcaagtgaaccagctgagctgcatgtgtcctatgctcccgattttggtactatgactcacctgctggagaacttgagagggagcatctgccccgaggagggaatttcggcggggactgaactccgatccccatgtgaatgtgaaagcctggtcgaatttcagggtcggacgctcggggcgctggagtcccttacactgaacttggcacagctgaccgcccgactggaagatctggagaaccagctggccaatcagaaatag

SEQ ID NO: 194305 - DNA, 1869 bp, synthetic construct
  misc_feature 1..1869: note = Description of Artificial Sequence: Synthetic coding sequence
  source 1..1869: mol_type = other DNA
atgcggggcctgctgtgctggcccgtgctgctgctgctgctgcagccctgggagacacagctgcagctgaccggcccgaggtgccatactgggccactcgatctggtcttcgtgattgattcttcccgcagtgttcgaccttttgaatttgagacgatgagacagttcttaatgggactcttgcggggattaaatgtaggcccaaatgccacacgcgtgggagtaatccaatattcctcccaggttcaaagtgtcttccccctgcgcgcgttcagtagacgcgaagatatggaacgcgccataagggacctggttccgttagcccagggtacaatgaccgggcttgccattcaatacgctatgaatgtcgccttttctgtggcggaaggggcccggccaccggaggagcgcgtgccccgcgtggcagtgattgtgaccgacgggagaccccaggaccgcgtcgcggaggtcgcagctcaggctcgggctcggggcattgagatctacgctgtcggtgtgcagagagccgatgtcggctccctcagagccatggctagtcctcctctggacgaacacgtgttcttagtcgagagctttgaccttatccaggaatttggcctgcagttccagtcccgcctttgcggaaaggatcagtgcgccgaggggggacacgggtgccagcatcagtgtgtgaatgcttgggccatgttccactgcacttgtaacccagggtataagctcgctgccgataataagagctgtctcgccatcgacctgtgtgcagagggcacccatggttgtgagcaccactgcgtcaacagtcccggtagctatttctgccactgccaggtgggcttcgtgttgcagcaagatcagaggtcctgcagagcgatcgactactgttccttcggtaaccacagttgtcagcatgagtgcgtttctacacctggcggccccagatgtcattgccgggagggccacgatctgcagcccgacggcagatcctgccaggtcagggacctgtgtaacggcgtggaccatggttgtgagtttcagtgcgtgagcgagggactgagctatagatgtctctgccccgagggccgccaactgcaggccgacgggaaatcatgtaaccgatgccgcgaaggtcatgtcgacctggtgttactagtagacggttccaagtctgtacggccacagaactttgagctagtaaaaaggtttgtgaatcagatcgtggacttccttgatgtgtcaccagaaggaacgagagtcggattggtccagttcagttccagggtcaggaccgagttccccttaggtcggtatgggactgctgcagaggtcaaacaagcagtactggctgtggaatacatggagcggggcacaatgacaggcttagcattgaggcatatggtggagcactctttctccgaagcccagggagccaggcccagagcactgaacgtgccgagagttggtcttgtctttactgacggccgcagtcaggatgatatttcggtttgggctgcccgtgctaaggaggagggaatcgtaatgtacgccgtgggggtggggaaggcagtggaagcagaacttcgcgaaatcgcttcggaacctgctgagctacatgtgtcctatgcgcccgactttggaacaatgacccacttgcttgagaatctcagaggcagcatatgccccgaagaaggcatttcagccggaaccgagctaaggagcccatgcgagtgtgaaagcctggttgagtttcagggcagaaccctgggcgctctagaatccttgacactgaacctcgcccaactcaccgccagactagaagacctagagaaccagctggccaaccagaagtag

SEQ ID NO: 194306 - DNA, 1746 bp, synthetic construct
  misc_feature 1..1746: note = Description of Artificial Sequence: Synthetic coding sequence
  source 1..1746: mol_type = other DNA
atgcggggcctgctgtgctggcccgtgctgctgctgctgctgcagccttgggaaactcagctgcagctgacaggaccacgatgtcataccggcccacttgaccttgtgtttgtgattgactcatctagaagcgtgagacccttcgagtttgaaaccatgaggcagttcctcatgggcctcctgcgaggattgaacgtcggccccaacgcgaccagagtcggcgtgatccaatattcttcacaggtccagtcggtcttccccctgcgagccttctcccgcagagaggatatggaaagagcgatcagagatctggtccctctggcacagggcacaatgactgggttggcgatccagtacgccatgaacgtagcttttagcgtggcagaaggcgctaggccaccggaagagagagtgcccagagtggccgtgatagtcacagatggccgtccccaggaccgagtggcagaagtcgccgctcaggctagagcccgaggcattgagatctatgccgtgggtgttcagcgggctgacgtaggctccctgcgggctatggcttcaccgcccctggatgagcacgtcttccttgtggaaagttttgacctcatccaggagttcggactgcagttccagagtcggctgtgcgccattgatctgtgtgcagaggggacacatgggtgcgaacaccactgtgtaaattctccaggctcttatttctgccactgtcaggttggattcgtcctccaacaggaccagcgcagctgccgtgccatcgattattgttcctttgggaatcatagttgtcagcacgagtgcgttagcactccgggaggccctcgatgccactgtagggaaggtcacgacctgcagccagacggcagatcctgccaggtcagggatctgtgtaacggcgtggaccacggatgcgaattccaatgcgtgagcgagggcttgtcatatagatgcttgtgcccagaggggcgacagctacaggccgatgggaaatcttgtaacaggtgcagagagggccatgtcgacctggtactgcttgttgatggatcgaagtccgtgcgacctcagaactttgagttggttaaacggttcgtgaatcaaatcgtggactttctggacgtgtcccccgagggcactcgggtgggcctcgtgcagttctcttccagggttagaacagagttcccgcttggccgttatggaactgcggctgaggttaaacaagcggtgctggctgtggagtacatggagcgcggcacaatgacaggcctggccctgcgacatatggtagagcacagctttagtgaagcccagggagcccgccctcgcgccctcaacgtgcctcgtgttggcttggtgttcacggacggccgctcacaagacgacatcagcgtgtgggctgctagagcaaaagaggagggcatcgtgatgtatgctgtgggggtcggcaaagcggtggaggccgaactaagagaaattgcatccgagccagccgagcttcacgtcagctacgcacccgattttggtaccatgactcacctgctggaaaatcttcgcggcagcatctgtcccgaagaaggtattagcgccggtaccgaactccgatcaccatgcgagtgcgagagcttggtcgaatttcaaggcaggacattgggggccctggaatcacttactcttaacttggctcaactaaccgcccgcctcgaggacctcgaaaaccagcttgccaaccaaaagtag

SEQ ID NO: 194307 - DNA, 852 bp, synthetic construct
  misc_feature 1..852: note = Description of Artificial Sequence: Synthetic coding sequence
  source 1..852: mol_type = other DNA
atgagcaagagcttccagcagagcagcctgagccgggacagccaggggcatgggcgggacctgagtgctgccggtattgggctcctcgccgcagccacacagtcactctcaatgttgttagagtctgaagatgaactcttagtagacgaggaggaggcggctgctctgctggagtccggatcctctgtcggtgatgagactgacctggcgaacctcggggacgttgccagcgatggcaaaaaggagccgtccgacaaagcagtaaaaaaagacggatcagcctctgccgcggccaaaaaaaaactgaagaaacgaaggtttccgggtagcatggagggcttcgtgaccctggacgaggtgggagacgaggaggacagcgaattgcaaaaactgaggaagtccgggatggcgttcaagtccggggataaaaacgacgacgggctggtggaaattaaggttgataaaatagaggagctggatcaagagaatgaggccgctctggagaacggcatcaagaatgaggagaacacggaaccaggcgctgaatcctccgagaatgctgatgacccaaacaaagacacttcagaaaatgcagatgggcagtctgatgaaaacaaagacgattacactattccagatgagtatagaataggtccttaccagccaaacgtgcccgtcggcatcgactatgtgataccaaagaccggattttactgcaaactgtgttctctgttctataccaatgaagaagttgccaaaaacactcactgctcatccctgcctcactaccagaaactgaagaagttccttaataagctcgcagaggaacgtcgccagaagaaggagacttag

SEQ ID NO: 194308 - DNA, 2544 bp, synthetic construct
  misc_feature 1..2544: note = Description of Artificial Sequence: Synthetic coding sequence
  source 1..2544: mol_type = other DNA
atgagcaagagcttccagcagagcagcctgagccgggacagccagggtcatggcagagacctgtccgccgcagggatcggactactcgccgctgcaacccagtcgctgagcatgcccgcttccctgggaaggatgaaccagggaactgcaagactcgcaagcctgatgaaccttggcatgtcgtcttccctgaatcagcagggtgctcattctgctctcagcagcgccagcacctcctcccacaacttgcaaagcatctttaatatcgggagcagggggcccttaccgctttcgtcccagcatagaggcgacgcagaccaggcttccaacatcctggcgtcttttggcctgtcagcaagagacctggatgaattatctcggtatcctgaagataaaataaccccggagaatctgccacaaatattgttgcagctgaaacgtcgcagaactgaggaaggcccgaccctgagctatgggcgcgacggcagatctgctactcgcgagcccccctaccgcgtgcctagggacgactgggaggaaaagaggcacttcagacgggactcttttgatgatcgcggtccgtccctcaatcctgttctggattacgaccatggctccagatcccaggaaagcggatattacgataggatggactacgaagacgaccggctgcgggatggcgagaggtgccgggacgattctttttttggcgagacatcccacaattaccacaagtttgattccgagtacgaaagaatggggcgcggcccgggccctctccaggagcgttcactgttcgaaaagaaacggggagctcctcctagtagcaacatcgaagactttcatgggctcctgcccaaaggttatcctcacctgtgttcaatctgtgatctgccagttcactccaataaggagtggagccagcacatcaacggagcttcacatagtcggcgctgtcagctgctgttggagatctaccctgaatggaacccagacaatgataccgggcacacaatgggagaccctttcatgctgcagcagtctaccaatccagctccaggtattctgggaccccctccacccagcttccacctcgggggccctgcagttggtccgcgcgggaatttgggggccggcaatggcaatctgcagggccctaggcatatgcagaaggggcgggtggagacaagcagggtggtgcacattatggattttcagcggggtaagaacctccggtaccagctgctccagttagtagaacccttcggtgtaatctcgaaccatttgatcctcaacaagatcaatgaggcttttatcgaaatggccacaacagaagatgcacaggccgcagtggattattatactaccacacccgcgctcgtgttcggcaaacctgtgcgggtccatctttcccagaaatataaacggatcaagaagcccgagggcaagccagatcagaaattcgatcaaaagcaagagctcggcagagtgatccacctgtcaaacttgccacacagcggctattctgacagcgctgtgttaaagttggccgagccatatgggaagattaaaaactatattttgatgaggatgaaaagccaggcctttatagagatggaaacccgggaggatgctatggctatggtcgatcactgcctgaaaaaagccctgtggtttcagggaagatgcgtgaaggtagatctgagcgagaaatacaagaaacttgtcttgaggatccctaatcggggcattgatctcttaaagaaagacaagtcccgcaaaaggtcgtacagtccagatggcaaggaaagccctagcgacaaaaaatcgaagacggacggctcacagaaaacagaatcttccacagagggcaaggaacaggaggagaagtccggtgaggacggggagaaggatacaaaggacgatcaaacagagcaggaacccaacatgctcctggagagcgaagacgagctcctcgtggacgaggaggaagccgctgcgctgctggaaagtggatcctcggtgggcgatgaaaccgatctcgctaaccttggtgatgttgcatctgatggtaagaaggaaccatcagacaaagcagttaagaaagatggcagcgcctctgcggccgccaagaagaagttaaagaaggtcgataagatcgaggaattggatcaggagaacgaagctgcactcgaaaacgggattaaaaatgaggagaatactgagcctggcgcagagtcatcagagaatgccgatgatcccaataaggacacatccgaaaacgcagatgggcagtccgatgaaaataaagacgactatactataccagatgaatatcggatcggaccctatcagcctaacgtcccagtggggattgattatgtaatacctaagaccgggttctattgcaagctgtgtagcttattttacaccaatgaagaggttgcaaagaatacacattgctcttcactgccccactatcaaaagctgaaaaaatttctgaataaactggctgaagaacgacgccagaaaaaggagacgtag

SEQ ID NO: 194309 - DNA, 2544 bp, synthetic construct
  misc_feature 1..2544: note = Description of Artificial Sequence: Synthetic coding sequence
  source 1..2544: mol_type = other DNA
atgagcaagagcttccagcagagcagcctgagccgggacagccagggtcacgggagagatctgtctgccgctgggataggattgctggcagctgcaacacagagcctgagcatgccagcctcccttggccggatgaaccagggcactgcaaggctggcctcgcttatgaacctgggaatgtctagctctcttaatcagcagggggctcactctgcattgagttccgccagcactagcagtcacaacctgcagtccatttttaatattgggagccgtgggcctttacctctcagcagtcagcatcgtggagacgccgaccaggcgtctaacatcttagcctcttttggactctcagctcgcgatctggatgaactcagcagatatcccgaggataagatcacccccgaaaacctcccacagatactgttacagctgaagagaaggaggaccgaggagggccctaccctgagctatggaagggacggtcggtctgccacccgagagcccccctacagggtgcctcgcgacgattgggaggagaagcgccactttcgcagagacagctttgacgataggggaccgtcactcaatccagttctggattatgatcacggcagccgctcacaggagtcaggctattatgaccggatggactatgaagacgataggttgagagatggcgagcgatgtcgcgacgactctttttttggagagaccagtcataactaccacaagtttgactcagaatacgaacggatgggccgggggccaggtcccctgcaagagcgctcactgttcgagaaaaagcggggggcaccaccatccagcaatattgaggactttcatggccttttacctaaaggctaccctcacctgtgttccatttgtgatctccccgtgcacagcaataaagaatggtctcagcatataaatggtgcctctcacagccggcggtgtcagttgctactggagatttacccagaatggaatcctgataatgacactggtcatacaatgggtgatcctttcatgcttcagcagtcaaccaatccagctccaggaatactaggcccaccccctccatcgttccacctcggtgggccagctgttggcccacgcgggaatctgggcgctggaaatggcaatctgcagggcccaaggcatatgcaaaaaggacgcgtagaaacctctagagtggtgcacataatggactttcagcgcggaaagaacctgagataccagctgctgcaattggtcgaaccctttggtgtcattagcaaccacctaatcttgaacaagatcaatgaagcattcattgagatggctacaacggaggacgctcaagccgccgtagactattacacaactaccccggccctagtgtttggcaagcctgtgagagtccacctgtcccagaagtacaaaaggattaaaaagcctgaggggaagcctgaccagaagtttgaccaaaaacaagagctcggtcgggtcatccacctttctaatcttccacactctggctactcagactctgccgtcttgaaactggcggagccctatggtaaaatcaagaactacattcttatgcgtatgaagtcgcaggccttcattgagatggagactcgcgaagacgcaatggccatggtggaccactgcttaaaaaaagcactgtggttccaagggcgatgtgttaaagtggacctgagtgaaaaatacaaaaagttagtgctgcgcatccctaatagggggatcgatctactgaagaaggataaatctcgcaaaaggtcttattcaccggacgggaaggagagtcctagtgataagaaaagtaagacagatggtagtcagaagacagaaagttcaactgaagggaaagagcaagaggagaagtctggcgaggatggggagaaggatactaaggatgaccagacagaacaagaacccaatatgttgctcgagtctgaggatgaacttttggtagacgaagaggaagccgccgctctcctcgagtcaggttcatctgtaggcgatgaaacggatcttgccaatctcggcgatgtagctagtgatggcaagaaggagccatccgacaaggctgtgaaaaaagacggatctgcgagtgccgcagccaaaaagaaactaaagaaggttgacaaaattgaggaattggatcaagaaaacgaggcagctctggaaaatggtatcaaaaatgaggagaacactgagcctggagcagaatcgtctgagaacgccgatgaccccaacaaggacacgagcgaaaatgccgacgggcaatccgatgagaataaggacgattataccatcccggacgaatatagaatcgggccttatcagcctaatgtccccgtgggcatcgattatgtaattccgaaaactggcttttattgcaaactttgctcccttttttatacaaacgaggaggtcgctaagaatacacattgttcctctctcccccattaccagaaactaaagaaattcctgaacaaactcgctgaggaaaggcggcagaagaaggagacctag

SEQ ID NO: 194310 - DNA, 300 bp, synthetic construct
  misc_feature 1..300: note = Description of Artificial Sequence: Synthetic coding sequence
  source 1..300: mol_type = other DNA
atgagcaagagcttccagcagagcagcctgagccgggacagccagggtcacggacgcgacctatccgctgcggggatcggtctcctggccgcggccacacagagtctgagcatgccagcgtctctcggacggatgaatcaggggaccgcccgtttggcgagcctgatgaaccttggaatgtccagttctctgaaccagcaaggtgcccattctgccctgagcagtgctagcaccagtagccataacttgcagagtatttttaatattggctcacgcggacccctgcctctttcgtcctag

SEQ ID NO: 194311 - DNA, 1530 bp, synthetic construct
  misc_feature 1..1530: note = Description of Artificial Sequence: Synthetic coding sequence
  source 1..1530: mol_type = other DNA
atgggcgaccccttcatgctgcagcagagcaccaaccccgcccccggcattctcggtccccctccgccctcttttcacctaggcggaccagccgtgggccctcgcggcaacctgggcgcaggtaatggaaacctccaaggccccagacacatgcagaaagggcgcgtggagacctcacgtgtggtgcacatcatggactttcaacgtggtaagaatcttcgttatcaacttttacagctggtggagccattcggggtgattagtaaccatctcatcctcaacaagattaatgaggcttttattgaaatggccacaactgaggacgctcaggcagcggtggattattatacgacaactcccgccctggttttcggaaaaccagtaagagtgcatctgagccagaagtacaaacgaatcaagaagcccgaggggaaacccgaccagaagttcgatcaaaagcaagagctgggacgtgtgatacacctgtcaaatctacctcacagcggctacagcgatagcgctgtgctgaagctggccgagccctatggcaagattaagaactatattctgatgcgaatgaaatcacaggcgttcatagaaatggagactagggaggacgcaatggctatggtcgaccattgcttgaagaaggccctgtggttccaaggcagatgtgtcaaggtggatctgtcagaaaaatataaaaagctggtcctccggatcccgaatcgagggatcgacttattgaaaaaggataagtccaggaaacggtcctattcgcctgacggtaaagaatcaccgtctgacaagaagagcaaaacagatggctctcagaaaactgagtcttcaactgagggaaaggaacaggaggagaagagtggagaggacggggagaaggacacaaaggacgaccagaccgaacaggagcccaacatgctcctcgagtccgaagacgagttgctggtcgatgaggaggaggcggctgctttgctggaatccggcagttccgtaggtgacgaaacagatttggcaaatttaggtgatgtggcaagtgacggaaaaaaagagcccagcgataaagctgtgaagaaagacggaagtgcctctgccgctgccaaaaagaagcttaaaaaggtggacaagattgaggaattggaccaggagaacgaagccgcactagaaaatgggattaaaaacgaggagaacacagagccaggcgctgaaagctccgagaacgccgatgaccctaacaaggacacctctgagaacgcagacggccagtcagacgaaaacaaggacgactatactatccctgatgagtaccgaatcggcccctatcaaccaaatgtcccagttggaattgactatgtgattccaaaaacagggttctactgtaaactttgctcacttttttatacaaacgaagaagttgccaagaacacccattgcagctctctgccacactaccagaaactaaaaaagttcctgaataagctggcggaagagcggaggcaaaaaaaggaaacgtag

SEQ ID NO: 194312 - DNA, 264 bp, synthetic construct
  misc_feature 1..264: note = Description of Artificial Sequence: Synthetic coding sequence
  source 1..264: mol_type = other DNA
atgagcaagagcttccagcagagcagcctgagccgggacagccagggacatggacgcgatctgtcagccgccggcatagggctcctggcagccgcaacacagagcctgtcaatgccagcgtctctggggcgaatgaaccaagggaccgcaaggctggcttccctgatgaacttgggcatgagtagttcacttaaccaacagggcgctcactctgctctcagtagtgctagcactagctcacataatctccagtctatattttag

SEQ ID NO: 194313 - DNA, 1680 bp, synthetic construct
  misc_feature 1..1680: note = Description of Artificial Sequence: Synthetic coding sequence
  source 1..1680: mol_type = other DNA
atgctgggcgcccagtggcggcggaaccagcccagccgggccgccgaggagtggtctcaacacatcaacggcgcatcgcacagtcgtcggtgccaactgctcttagaaatttatcccgagtggaatcctgacaatgatacaggtcacacgatgggtgatcccttcatgctccaacagtcaactaaccctgcacccggcatcctgggacccccccctcctagttttcacctgggaggacccgccgtcggcccacgcggtaatcttggagccggtaatggcaacctccagggtccccgccacatgcagaaaggccgcgtggagaccagccgagtcgtccacattatggacttccagcggggcaagaatctgcggtaccaactgctgcagctggtggagcccttcggagtaatctccaatcacctgatactgaataaaatcaacgaggcctttatcgagatggccactaccgaagacgctcaagccgccgtggattactacaccaccaccccggctctggtattcggcaagcccgtccgggtgcacctgtcccagaagtataagcgcattaagaagcctgagggcaagcctgaccagaagttcgatcagaagcaagagctcggacgcgtgatacacctcagcaatctgccacattccgggtatagcgactcagccgtactgaagctagccgaaccctatggcaaaatcaaaaattacattttaatgcgcatgaagtcccaggctttcatagaaatggagacccgagaagacgcgatggctatggtagaccattgcctgaagaaggccctgtggtttcagggtagatgtgtcaaagtggatctttctgagaaatataaaaagttggttcttcggattccaaaccgcggaatcgatctgctgaagaaggataagtcgcgaaaaagatcttatagcccagacggcaaagagagccccagcgacaaaaagtctaaaaccgatgggtcgcagaaaaccgaaagttcaacggaagggaaggagcaggaagagaagtcgggcgaggatggtgaaaaggacacaaaggacgatcagaccgagcaggaaccgaacatgctgttggagtcagaagatgaactgctggtggacgaagaagaggccgcagccctgctggaatctggtagcagcgtgggcgatgagacagacctagccaacctgggagacgtcgcttctgacgggaaaaaggagccatctgataaagctgtaaagaaagacggtagcgctagcgcagcggcaaaaaagaaactgaaaaaggtcgacaagatcgaggaactggaccaggagaacgaggcagccttggagaacggcatcaaaaatgaagagaacactgagcccggagccgagtctagcgagaacgctgatgatcccaataaggacacctcagagaacgccgacggccagagtgatgagaacaaggacgattacacgatccctgatgagtacagaatcggcccctatcagccaaatgtcccggttggcatcgactacgttattcctaaaacaggcttttattgtaagctgtgcagtctgttctataccaatgaggaggtggccaagaacacccactgttccagcctgccgcactaccaaaagctcaagaagttcctgaacaaactcgctgaagaaagacgccagaaaaaagagacttag

SEQ ID NO: 194314 - DNA, 237 bp, synthetic construct
  misc_feature 1..237: note = Description of Artificial Sequence: Synthetic coding sequence
  source 1..237: mol_type = other DNA
atgagcaagagcttccagcagagcagcctgagccgggacagccagggccatgggcgcgacctgagcgccgctggcattggtctgctagctgccgccacccagagcttgtctatgcccgcctccctggggcgaatgaaccagggaaccgctaggctggcttcgctaatgaatcttgggatgagctccagtctcaaccagcaaggcgcccactcagcactctcctctgcgtccacatag

SEQ ID NO: 194315 - DNA, 1302 bp, synthetic construct
  misc_feature 1..1302: note = Description of Artificial Sequence: Synthetic coding sequence
  source 1..1302: mol_type = other DNA
atgagcaagagcttccagcagagcagcctgagccgggacagccagggacatggccgggacctgtcagctgcaggcataggtctccttgctgcagctactcaatcgctgtccatgcccgcttcgttaggacggatgaaccagggcacagctaggcttgcgagtttgatgaatcttggaatgtctagctcccttaaccagcaaggcgcgcactctgctttgagctcggcctccacatcatctcacaatttgcagtccatctttaatattggcagccgcggccccctccccctgtcatcccagcatagaggcgatgccgatcaggcctccaatattctcgccagcttcgggctgtccgccagagatctggatgagctgagtcgctatcctgaggacaagatcactcctgagaatctacctcagatactgctacagctgaagcgtcgaaggacggaggaaggaccaactttgagctatgggagagatggtaggtcggctactcgtgaacccccctaccgagtccctcgtgatgactgggaggagaagcggcacttccgccgggatagctttgacgatcggggacctagtttaaacccagtgctcgactatgaccatggctcaagatcgcaagagagtggctactacgacaggatggattacgaagatgaccggttgcgggatggcgagcggtgccgagatgactcgtttttcggtgaaacttcccacaattaccacaaattcgatagcgaatacgagagaatgggccgtggccccgggcccctgcaggaacgctcattgttcgaaaaaaagcgcggtgcccccccttcaagcaatatcgaagactttcatggactcctccctaaggggtacccacacctctgctcgatctgtgacctcccagtccactccaataaggagtggtctcagcacatcaacggagcctctcacagtcgacggtgccagttgctgctcgaaatatacccagagtggaaccctgacaatgacaccggccacacaatgggggacccattcatgctgcaacagtcaactaatccggcacctggcattctggggccacccccgccatcattccacctcggggggcctgccgttggacccaggggaaacctgggtgcgggcaatgggaacctacaggggccacggcacatgcaaaaggggcgggtcgagacatctcgggtggtccacattatggatttccagcgagggaaaaatcttcgataccagcttctgcagctcgtggagccgtttggagttatcagtaaccacctcatcttgaataagtag

SEQ ID NO: 194316 - DNA, 1530 bp, synthetic construct
  misc_feature 1..1530: note = Description of Artificial Sequence: Synthetic coding sequence
  source 1..1530: mol_type = other DNA
atgggcgaccccttcatgctgcagcagagcaccaaccccgcccccgggattctcggcccacccccaccaagctttcacttgggcggcccagccgtaggtcccaggggcaatctcggagctgggaatggaaatctgcagggccctcgacacatgcagaaaggtagggtggaaacaagccgcgtagtgcacatcatggatttccagcgcggtaagaacctccgctaccaactgctgcagcttgttgagcccttcggcgtaatcagcaaccatctcattttgaacaagattaatgaagcctttattgaaatggccactaccgaggatgctcaggcagcggtggactactacaccaccacgcccgccttagttttcggcaaacctgtgagggtgcacctgtcccagaagtataagaggatcaagaagcctgaaggaaaaccggatcaaaagtttgaccaaaagcaagagttgggccgtgtcattcacctgagcaatctgcctcacagcggctactcggattctgccgttctgaaactggccgagccgtatggtaaaatcaaaaattacattttaatgaggatgaagtcccaggcttttatcgaaatggagacacgggaagatgccatggcaatggtggaccattgtctgaaaaaagcgctgtggtttcaaggaaggtgcgtcaaagtggacttatcagagaaatacaagaaactggtgttgcgcataccaaatcgcggcattgatctgctcaaaaaagacaaaagccgcaaacggagctattctcctgacgggaaagaaagtcctagtgacaaaaagagcaagaccgatggctctcagaagaccgagtcctccactgaaggtaaggaacaggaagaaaaatcaggcgaggacggcgagaaggacaccaaagacgatcagacagagcaagagcccaatatgttgctcgagtctgaagacgagctgctggtggacgaggaggaggccgcagctctacttgagagtggctcatcagttggcgatgaaaccgatctggctaatctgggggatgtggcgagcgacggcaagaaagagccaagtgacaaggccgttaagaaggacgggagcgctagtgcagcagctaagaaaaaacttaaaaaggtggataaaattgaagaactggaccaggagaatgaggccgctttggaaaacggaataaaaaacgaagaaaacacggaacctggcgccgaatcaagtgagaacgccgacgatcccaataaagatacttctgaaaacgctgacggccagtccgacgagaataaggacgattacacgatcccagatgaatacagaattggaccctatcagcccaacgtgcctgtgggtatagattacgttatccccaaaacgggcttctattgtaaattgtgtagccttttctatactaatgaagaggttgccaaaaatacccattgttctagcctaccacattaccagaaactcaaaaaatttctgaacaaactcgcggaggagagacggcagaagaaagaaacgtag

SEQ ID NO: 194317 - DNA, 144 bp, synthetic construct
  misc_feature 1..144: note = Description of Artificial Sequence: Synthetic coding sequence
  source 1..144: mol_type = other DNA
atgagcaagagcttccagcagagcagcctgagccgggacagccagggacatggccgcgacctgagcgcggctgggatcggtctgctggccgccgcaacccagtcactgtcaatgccagctagtttaggacgtatgaaccagtag

SEQ ID NO: 194318 - DNA, 237 bp, synthetic construct
  misc_feature 1..237: note = Description of Artificial Sequence: Synthetic coding sequence
  source 1..237: mol_type = other DNA
atgagcaagagcttccagcagagcagcctgagccgggacagccagggccacggaagagacctctccgctgcagggatcggcctcctggccgctgctacccagtccctgagtatgcccgccagcctcggaaggatgaaccaggggaccgccaggttggcatctttaatgaacttgggcatgtcctcatccctgaaccagcaaggtgcccatagcgccttatcttcagctagtacctag

SEQ ID NO: 194319 - DNA, 2544 bp, synthetic construct
  misc_feature 1..2544: note = Description of Artificial Sequence: Synthetic coding sequence
  source 1..2544: mol_type = other DNA
atgagcaagagcttccagcagagcagcctgagccgggacagccaggggcacggcagggatttgagcgctgccggaatcggactcttggctgccgccacacaatcactttctatgcccgcctctttggggcgcatgaatcagggtacagcccggctggcctctttgatgaatctaggtatgtccagcagcctaaaccaacagggcgcacattcagcccttagcagtgcgagtacctctagtcataacttgcagtcaattttcaacatcggaagccggggtccgttgccacttagctctcagcaccgaggggacgccgatcaggcatccaacattcttgcaagttttgggctcagcgctagggacttggacgaactgtccagataccccgaggacaaaatcaccccagaaaacctgccccagatactactccagcttaaaaggaggcgcacagaggaaggccctacattatcctatggacgggacggccgttctgctaccagagaacccccctacagagtacctcgcgacgattgggaggaaaaacgccacttcagaagggattcttttgacgacagggggccttctctcaaccccgttcttgactacgatcatgggagccgcagccaagagtcaggatactatgacagaatggattacgaggatgatagactgagggacggggaacgctgtagggacgactcttttttcggtgagacatcccacaattatcacaaatttgacagcgaatacgagaggatggggagaggccctggacctctccaagagcgctctctgttcgagaaaaaacggggggctcccccgtcctcaaacatagaggacttccacggactgttgccgaaaggataccctcatttgtgtagtatttgcgacctgcctgtgcattccaacaaggagtggagtcagcacataaacggggcttcccactcaaggcgctgccagctgttactggagatctacccagaatggaatcctgataacgacactgggcacaccatgggtgatccatttatgctgcagcagtcaacgaatccggcccccggcatactgggaccaccaccgcctagttttcatctcggtggccccgccgtcggtccccggggcaaccttggagccggaaacggcaacctgcaaggtccgagacacatgcagaaaggtcgcgtagagactagcagggttgttcacatcatggactttcagcggggcaaaaatctccgatatcaattgctgcagttggttgagccttttggcgtgatttctaaccaccttatcctcaataaaattaatgaagcgttcatcgaaatggctacaaccgaggatgcccaggcagcagttgattactacacgactaccccggccttggtgtttggaaaacctgtgcgggtacatctgtcccagaagtataaacgaataaaaaagccagagggcaagcctgatcagaagttcgaccagaaacaggaactaggccgcgtaatccatctgtccaatctgcctcactctgggtactctgatagcgccgtcctaaagctcgctgaaccgtacggaaagattaagaattacatcctgatgcggatgaagtcacaggcattcatcgagatggagacccgcgaggacgccatggcaatggttgaccactgcctgaagaaggctctctggttccaaggccgatgtgtaaaggtggatctcagcgaaaagtacaagaagctggttctaaggataccgaaccggggcatcgaccttttgaagaaagataagagccgcaaacgctcgtatagcccagatgggaaagaatcccccagtgataaaaagtcaaaaacagacggttcgcagaagacagaaagcagtactgaaggtaaagaacaggaggagaagtcgggagaagatggagagaaggacaccaaggacgaccagaccgagcaggagcctaatatgctcctcgaaagcgaggacgaattactggtggacgaagaggaggctgccgccctgctggagtcaggctcctctgtgggcgacgaaaccgacttggccaacctgggggacgttgcttcagacggaaagaaagaaccaagtgacaaggcggtaaagaaggatggctccgcatctgcagcagctaaaaagaaacttaagaaggttgataaaatcgaagagttggaccaagaaaatgaggcagccctggaaaacggcatcaagaatgaggaaaacaccgaacccggagccgagtcttccgagaatgctgacgacccaaacaaagacacttcagaaaacgccgacggccagtctgacgaaaataaggatgactataccatacccgatgagtataggattggaccttatcaacctaatgtccccgtgggtatcgactacgtgatcccgaaaactggattttattgcaaactgtgttctctgttctacacgaacgaggaggtagctaaaaacactcactgctcttctctcccacactatcaaaagctgaagaaattcctgaacaaattagccgaggaaagaaggcagaagaaagagacatag

SEQ ID NO: 194320 - DNA, 30 bp, synthetic construct; identical to SEQ ID NO: 88126
  misc_feature 1..30: note = Description of Artificial Sequence: Synthetic coding sequence
  source 1..30: mol_type = other DNA

SEQ ID NO: 194321 - DNA, 303 bp, synthetic construct
  misc_feature 1..303: note = Description of Artificial Sequence: Synthetic coding sequence
  source 1..303: mol_type = other DNA
atgagcaagagcttccagcagagcagcctgagccgggacagccagggtcacggtcgagatttaagtgcggcgggaatcgggctcctggcggccgctactcagtcacttagcatgccagcatctttggggcggatgaatcagggcacagcacggctagcctccctgatgaacctgggcatgagctcttcactgaatcaacagggagctcacagcgccttgtctagcgcctctacatcaagtcacaaccttcagagtatctttaacattggatcccgtggacctctaccactaagctcccagtag

SEQ ID NO: 194322 - DNA, 324 bp, synthetic construct
  misc_feature 1..324: note = Description of Artificial Sequence: Synthetic coding sequence
  source 1..324: mol_type = other DNA
atgagcaagagcttccagcagagcagcctgagccgggacagccagggccatggcagagacctctctgccgctggaattggacttctggcagcagccacccagagcctttccatgcctgcaagccttggaaggatgaaccaaggaactgcgagactggcgtccctcatgaacctgggaatgagctcctccctaaatcagcagggggcccacagcgccctgtcgtctgcttccacatcgtctcacaatctgcagagtatctttaacatcggatctcgtgggccactgccactgtcctctcaacacagaggtgacgccgaccaatag

SEQ ID NO: 194323 - DNA, 1578 bp, synthetic construct
  misc_feature 1..1578: note = Description of Artificial Sequence: Synthetic coding sequence
  source 1..1578: mol_type = other DNA
atgcgggtgttctgcgtgggcctgctgctgttcagcgtgacctgggcggctcccaccttccagccacagacagagaaaaccaaacagtcgtgcgttgaggagcagaggcaagaggagaaaaataaggataatattggattccaccaccttggaaaacggatcaatcaagagctctcaagcaaagaaaatattgttcaagagcggaaaaaggatttgtcactgagcgaggcgagcgagaacaaaggctcatcaaaatcccaaaactactttaccaatagacagcgcctgaataaagaatatagtataagcaacaaggaaaacactcataacggcttgcgcatgtcgatctaccccaagagcaccgggaataaaggattcgaggacggagacgatgctatcagcaaacttcatgaccaagaagaatacggcgctgctcttataagaaataacatgcaacacattatgggccctgttacagcaatcaagctgttaggcgaagagaacaaggaaaatactccccggaacgtgctaaacattattcctgcatctatgaactatgcaaaggcccattcgaaagataagaagaaaccccagcgagactctcaggcccagaaatctcctgttaagagcaaatccacgcatagaatccaacacaacattgattacctgaaacacctctctaaggttaaaaagatcccttcagactttgagggctctggctacaccgatctgcaagaacggggtgacaatgacatcagccccttctccggcgatggtcagccattcaaggacattcccgggaagggcgaagctaccggtcctgatctggaaggcaaggacatacagaccggcttcgccggcccctctgaagctgaatctacgcacttagatacgaagaaaccaggctataacgagattccagagagagaggagaatgggggaaatacaatcggaaccagagacgaaacagccaaggaggccgacgccgttgatgtatccctggtggagggaagcaatgatattatggggtccactaatttcaaagagttgcctgggcgtgaaggcaatcgcgttgacgctggatcccagaacgcccaccaggggaaagtcgagttccattacccgcccgccccttccaaggagaaaagaaaagaagggagctcagacgccgccgaaagtaccaactacaatgagatcccgaaaaacggtaaagggagtacacgcaaaggcgtggaccacagtaatagaaatcaggccaccttaaacgagaaacagcgcttcccttcgaaggggaagtctcaagggcttccaatcccctcccgaggactggataacgagatcaaaaacgaaatggacagttttaacgggccatcccacgagaacatcataacccacggtcggaagtaccattatgtgccccaccgccagaataacagcacacgtaacaagggcatgccacagggtaaaggctcttggggacgtcagcctcacagcaaccggaggtttagctcgagaaggagggacgatagcagtgaaagcagtgactccggttcctctagcgaatctgatggggactag

SEQ ID NO: 194324 - DNA, 1578 bp, synthetic construct
  misc_feature 1..1578: note = Description of Artificial Sequence: Synthetic coding sequence
  source 1..1578: mol_type = other DNA
atgcgggtgttctgcgtgggcctgctgctgttcagcgtgacctgggcggccccaactttccagccacaaaccgaaaaaaccaagcaatcttgcgtcgaagagcagcgacaggaggagaagaataaagacaatattgggtttcaccacttgggcaaaaggatcaaccaagaactgagctcaaaagaaaatatcgtccaggagaggaaaaaggatttgtctctgagcgaggcatccgaaaataagggttcttcaaagagccagaactactttaccaacagacagcggctgaataaggaatattccattagcaacaaggaaaatacccacaatgggctgcgaatgtctatttaccctaagagtaccgggaacaaagggtttgaggatggggatgatgcgatcagtaaactgcacgaccaggaggagtacggagctgccctgattcggaataatatgcagcacatcatggggcccgtgactgccattaaactgttgggtgaggagaacaaagagaatactccccgcaatgttcttaatatcattcccgcgtccatgaactatgccaaggcacatagtaaagacaagaaaaagcctcaaagagattcccaagcgcagaagagcccagtgaagagcaaatcaacccatcgaatccaacacaacatagattacctgaagcatctgtctaaagtcaaaaagattccctctgattttgaaggcagcgggtataccgatctgcaggagcgcggtgataacgacattagtcctttctctggcgacgggcagcccttcaaggatatccctgggaagggggaagcaactggccccgatcttgaaggtaaggacatccagactggctttgcaggcccttctgaagcagagtccacccacctggacaccaagaagcctggttacaacgaaattccggagcgcgaagaaaatggcggcaacactatcggcactcgggacgagaccgccaaagaggcagatgcggtggatgtaagcctagtggagggctccaatgacatcatgggctccactaacttcaaagagctgcctgggagggaaggcaacagggttgacgccggatcacaaaatgctcatcagggaaaagtggaattccactatcccccggcccctagcaaggaaaagaggaaggaaggctcctctgacgccgcagagtctacaaactacaatgagatacctaagaatggaaagggatccacaaggaaaggagtggaccactctaacaggaatcaggctaccttgaatgagaagcagcgcttccccagtaaggggaaatctcagggcctgcccattccttctagaggtctggacaacgaaatcaaaaatgagatggatagctttaacggaccctctcacgaaaacattatcacccacggcagaaagtaccattacgttccccaccgacagaacaattccactagaaacaagggaatgccacagggcaagggaagctggggccgccagccccactctaatagacgcttctcctcccgtcgccgcgatgattctagtgaatcctccgactctgggtccagttctgagtctgacggggactag

SEQ ID NO: 194325 - DNA, 828 bp, synthetic construct
  misc_feature 1..828: note = Description of Artificial Sequence: Synthetic coding sequence
  source 1..828: mol_type = other DNA
atgcgggtgttctgcgtgggcctgctgctgttcagcgtgacctgggctgcccccacctttcagccacagactgaaaaaaccaaacagagctgtgttgaggagcagcgccaggaggagaagaacaaggacaacattggattccaccatctcgggaaacggataaatcaggagctgtcctctaaagaaaatattgttcaggaaagaaagaaagatctttctctttccgaagcttccgaaaataagggctccagtaaatctcagaattatttcaccaacaggcagagactcaacaaagagtacagcattagtaacaaggaaaatacccacaacggcctgcgaatgtctatataccccaagagcacagggaataagggtttcgaagatggcgacgatgccatcagtaagctccatgatcaagaggagtacggcgcagccctgatccgaaataacatgcaacacattatgggacccgtgacggccatcaagctgctgggagaggaaaataaggagaacactccccgcaatgtgcttaacattataccagcctccatgaactacgcaaaggcccactctaaggacaaaaagaaacctcagcgggactcccaagctcagaagagccctgtaaaatcaaagtcaacacaccgaatacagcataacatcgactacctgaagcatctgtctaaggtgaagaagattccttctgattttgagggctcagggtatacggacttacaagagcgcggggataatgatatttccccctttagtggcaccgccaaccttctccggacattcctcgtcaaggaaaagctgttggtgctgacctag

SEQ ID NO: 194326 - DNA, 1239 bp, synthetic construct
  misc_feature 1..1239: note = Description of Artificial Sequence: Synthetic coding sequence
  source 1..1239: mol_type = other DNA
atgagcatctaccccaagagcaccggcaacaagggcttcgaggacggcgacgatgccatttcaaagctccacgatcaggaggaatacggcgcggctctaatcagaaacaacatgcagcacattatgggtccggtgaccgctatcaagctgctcggcgaggagaacaaggagaacacgccaagaaatgtcctcaatataatccccgctagtatgaactatgccaaggcgcactctaaggacaaaaaaaagcctcagagggattctcaagcacagaagagcccagtgaaatccaaatccactcaccgcattcagcataatattgactaccttaaacacctgtcaaaggtcaagaaaattccctctgactttgaaggatctggatataccgatctgcaagagagaggagacaacgacatttcaccttttagcggggacggtcagccattcaaggacattcctgggaagggagaggctacagggcccgacctggaaggcaaggacatccagaccggcttcgcaggaccttccgaagcagaatctacccacctggacacgaaaaaacccggttataacgaaatcccggagcgtgaggaaaatggcgggaacactatcggcacacgggacgagaccgctaaagaggcagacgcagtagacgtttcgctcgtcgagggctctaacgatattatgggctcgacaaacttcaaagaactacctggcagggagggcaaccgcgtggatgccgggagccaaaatgcccatcaaggaaaggtggagtttcattatccaccagcaccttcgaaagagaaacggaaagaaggcagttccgacgccgctgagtcaacgaattataacgaaattcccaagaacggcaagggtagcaccaggaagggggttgaccactccaaccgcaaccaggcaactctgaacgaaaaacaacgttttccatcaaaaggcaaatctcagggcctgcctattccaagccgaggactagataatgaaattaagaatgagatggatagtttcaacgggccttcccacgaaaacatcatcacgcacggccgtaagtatcactatgtgccacacaggcagaacaactctacccgtaataagggtatgccacagggcaagggcagctggggcagacagccacattccaacaggcgattctcctcccgcagaagagatgacagttctgagagctcagatagcgggtcttcatccgagtcagatggagactag

SEQ ID NO: 194327 - DNA, 1239 bp, synthetic construct
  misc_feature 1..1239: note = Description of Artificial Sequence: Synthetic coding sequence
  source 1..1239: mol_type = other DNA
atgagcatctaccccaagagcaccggcaacaagggcttcgaggacggcgacgatgccatttccaagctgcatgatcaggaagaatatggagccgcgttaatacggaataatatgcagcacatcatgggtccggttacagccattaaattactgggtgaggagaacaaagagaatacgccgcgcaacgtattaaacattatccccgcgtcaatgaactacgctaaggcccactcaaaagacaaaaaaaaacctcaaagggactctcaagcgcagaagtcccccgtgaaaagcaagagcacacatcggatccagcataacatagattatctaaaacatttgtcaaaggtaaagaagatcccttcagacttcgagggtagcgggtataccgatctccaggaacgtggggataacgacatcagcccattctcgggcgacggccagccgttcaaggacattcctggaaaaggtgaagccacaggccccgacttagaaggcaaggacattcagacaggcttcgccggcccctcagaggcggaatcaacacacctggacaccaagaagcctggctataacgaaattccagagagggaagagaacggggggaataccataggaactcgggacgagacagctaaggaggccgacgccgtcgatgtttccctggtggagggcagtaacgatatcatgggatccactaactttaaagagctcccaggtcgggagggcaatcgggtcgacgccggtagccagaatgcccatcaaggcaaggtggagttccactatcctcctgcacctagcaaggagaaaaggaaggagggctcatccgatgcagccgaaagtacgaactataacgagataccaaagaacggcaagggttccacccgcaaaggcgtcgaccattctaatcgaaaccaggccacccttaacgaaaagcaacgatttccaagtaagggaaaaagccagggcctcccaatccctagtcgagggttagacaatgagattaaaaatgaaatggattcctttaacggaccaagtcatgagaatatcattacacacggccggaagtatcactacgtgccacacaggcaaaacaatagtacccgtaacaagggcatgccacagggtaagggctcttgggggagacaacctcatagtaatcgccgctttagctccagacgcagagatgatagcagcgaatcaagcgattcaggctccagcagcgagagcgatggggactag

SEQ ID NO: 194328 - DNA, 312 bp, synthetic construct
  misc_feature 1..312: note = Description of Artificial Sequence: Synthetic coding sequence
  source 1..312: mol_type = other DNA
atgaagagcctgatcctgctggccatcctggccgccctggccgtggtgaccctctgctatgagtcacatgagtccatggagagctacgaactcaatcccttcattaacaggcgaaacgccaatacgttcatttcaccgcagcagaggtggagagctaaagtccaggagcggattcgcgagaggtccaaacctgtgcacgagctgaatcgtgaagcatgtgatgattatcgcttgtgcgagcgctatgccatggtttacggctacaacgccgcctataatcgctattttcgcaagaggcggggtactaagtag

SEQ ID NO: 194329 - DNA, 945 bp, synthetic construct
  misc_feature 1..945: note = Description of Artificial Sequence: Synthetic coding sequence
  source 1..945: mol_type = other DNA
atgggccccctgatcaaccggtgcaagaagatcctgctgcccaccacagttccacctgcaacaatgcggatttggctgctgggaggcttgctgccttttctgcttttgctgagcggccttcagcgcccaacagaagggtcagaggtcgccattaaaatcgacttcgactttgctccagggtcctttgacgatcaataccagggctgttcgaaacaggttatggagaagctgacacaaggagactatttcacaaaagatatcgaggcccagaaaaactactttcgcatgtggcagaaggctcatcttgcctggctgaatcagggcaaagtcttgccacagaatatgaccaccacccatgccgtagcgatcttattttatacattaaatagcaatgtacactcagacttcacacgggctatggcttctgtcgccaggacgccacagcagtatgaacgcagcttccacttcaaatatttacattattatctgacttcagccatccagttgctgcggaaagactccattatggaaaatggaacattgtgttacgaagtgcactacaggaccaaggacgttcacttcaacgcttatacgggtgccacaatccgctttggacagtttctgtccactagcctgctcaaagaggaggcacaggaattcgggaaccagacactctttaccatattcacgtgcctcggtgccccagtgcagtatttcagcctgaaaaaggaagtactgatccccccttatgaacttttcaaggttatcaacatgagctatcacccccgaggcgactggctgcagctccgatcaaccggtaatctgtccacttacaactgtcagcttctaaaagcaagtagcaaaaaatgcatcccagacccaatcgcaattgcaagcctttcatttctcacatccgtgattatatttagcaaatcacgagtctag

SEQ ID NO: 194330 - DNA, 1749 bp, synthetic construct
  misc_feature 1..1749: note = Description of Artificial Sequence: Synthetic coding sequence
  source 1..1749: mol_type = other DNA
atgagcatcgagaccctgctggaggccgcccggttcctggagtggcaggcacagcagcagcagcgcgcccgagaggagcaagaacgcctgaggctggagcaggagagggagcaagagcagaaaaaagccaattcgttggctaggctcgcccataccctgccagtcgaggaacctaggatggaagctccaccgctcccccttagccctcccgcaccacccccagcgccccctcctcctcttgccactccagcaccactgactgttattccaatacctgtagtgaccaattccccccagcccctccctccacctcctccgctgccagctgcggcccagcccttgcccctggcaccccggcagcctgctctggtgggcgcaccaggtctctctattaaggaacccgccccactcccaagtaggcctcaggtgcccactccagcgcccctgttaccggactcaaaggccactatcccaccaaatggcagtcctaaacctctgcagccattgcccactcctgtgctcactatcgccccccacccaggagtgcaaccccagttggccccgcagcaacctccgccacccaccttgggaacactcaagttagcccctgctgaagaagtgaaatcttccgagcaaaagaaacgccccggcgggattggaacaagggaggtgcataacaaacttgaaaagaatcggagggctcacttgaaagagtgcttcgaaacgctgaaacgtaatattccaaatgtggacgacaagaagacatctaatctttccgtcctgcgcacagcccttcgatatattcagtcccttaagagaaaagagaaggagtatgagcacgaaatggaaagactggcaagagagaaaatcgccacacagcaaagactggccgaactcaaacatgagttatcacagtggatggatgttttggaaatcgatagggtgcttagacagaccggacagcctgaagatgatcaggcttctacatcaacagcctctgaaggtgaagataacatagacgaggacatggaggaggacagagccgggttagggccgccgaaactgtcacatagaccccagcccgagctcttgaagtccacactacctccaccaagcactactccagcacctctacctcctcacccccacccacacccacactcagtcgcgttgccccctgcgcacttacccgtacaacagcagcagccacagcagaagaccccacttccagcccccccccccccacccgcggccccagctcagacactggtcccggcacctgctcacctcgttgctacggcaggaggtggttcgactgtgattgcccacacagccactacccacgccagtgtaatccagactgtgaaccacgttctccagggcccaggcggaaagcacattgcacatattgcaccttccgcaccttcacctgccgttcagttagcccccgcgaccccaccgataggacacatcaccgttcatcccgccacactcaatcacgtggctcatctgggttcccaactccccttataccctcaaccggtggcagttagccatatcgctcacacccttagtcaccagcaagtgaatggaaccgctggactggggccccccgctacagtgatggcaaagccagccgtcggggctcaagtcgttcatcatccacagctggtgggccagacagtactgaaccctgtgacaatggtgacgatgccttccttccccgtgtcaaccttaaagctggcctag

SEQ ID NO: 194331 - DNA, 1749 bp, synthetic construct
  misc_feature 1..1749: note = Description of Artificial Sequence: Synthetic coding sequence
  source 1..1749: mol_type = other DNA
atgagcatcgagaccctgctggaggccgcccggttcctggagtggcaggcccaacagcagcaaagagctcgagaagaacaagaacggctccggctcgagcaggaacgcgaacaggagcaaaagaaggcaaactctctcgcccggttagcccacacgctccccgtcgaggaacctcgaatggaggcacccccactccccctctcccctcctgctccacccccagctccgcccccacctttggctactcctgccccactcactgtaatccctatacccgttgtgaccaactccccccagccacttccacccccaccccccctaccagcggccgctcagcctctgcctctggccccgaggcaacccgcactggtgggcgcacccgggttgtccatcaaagagccagcccctttgccctcgcgcccacaagtgccaaccccagcccctctgctgcctgacagcaaagcaacaatacccccaaatggtagccctaagcccttacagcctttacccacgcctgtgctgacgattgccccacaccctggcgtccagccgcagctggccccccagcagccccccccacctaccctgggcacattgaagctggcgcccgcagaggaggtgaagtccagcgaacagaaaaaacgacccggcggcataggcaccagagaggttcacaacaaactggagaaaaaccgaagggcccacctcaaggagtgttttgaaaccctcaaaaggaatatacctaatgtcgacgataagaaaacatccaaccttagtgtcttacgcaccgctctgcggtatattcagtcattgaaacgtaaggaaaaagagtatgaacatgaaatggaacgattggcacgcgagaagatcgctacccagcaacggctggctgaattaaaacacgaactgtcacaatggatggacgtgctggagatcgaccgcgtcctgagacagaccgggcagccagaagacgatcaggccagcacttccactgccagcgagggcgaggacaatatagatgaagatatggaggaagatcgcgccggtctgggtcctcccaaactgtcgcatagaccgcaacccgaactgctgaagagcaccctgcccccaccatctactacccccgctcctctgccaccgcatcctcaccctcacccacacagcgtggccctcccacccgcgcacttgcccgtacaacagcaacagccccagcagaagactcctttaccagcccctccccccccccctgcagcccccgcccaaaccctggtgccagcgcctgcccatctggtcgccaccgctgggggggggtctacagtgatcgctcataccgctacaacgcatgctagtgttatccagactgtgaaccacgtactgcagggcccaggtggcaagcacatcgcccatatcgcaccctcagcccctagtcctgctgtgcagctggcacctgcgacaccgcccatcgggcacatcactgttcacccggccacacttaatcacgtggcgcacctggggagtcagctgccattgtaccctcaacctgttgcggtctcgcacattgctcatacgctatcacaccaacaggtaaatggtactgccggcctgggcccacctgcaaccgtgatggcaaaaccagccgtgggggcgcaggttgtgcaccatcctcagctagtgggccagacggtgctgaatccggtgacaatggtgaccatgccgagctttcctgtgagcactcttaagctggcctag

SEQ ID NO: 194332 - DNA, 594 bp, synthetic construct
  misc_feature 1..594: note = Description of Artificial Sequence: Synthetic coding sequence
  source 1..594: mol_type = other DNA
atggagcccctggccagcaacatccaggtgctgctgcaggccgccgagtttctggagagaagggaaagagaagctgaacacggctatgcctctctttgcccccatcgctctcctggcccaatacaccgccggaaaaagaggcctcctcaggcacctggtgcgcaggattctggccgatggagggcgcagttgaagcggtgcctcgagagactgaaacaacagatgcctctgggggcagattgcgcaagatatacaacactctctctgcttcggagggctagaatgcatatacagaagctggaagaccaggaacagcgggcacggcaacttaaggagaggctcaggtcgaagcaacaatcactgcaacgccaactggaacagttgcgaggactggcgggagcggcggagagggagagacttagggccgatagccttgatagctctggcctgtcttcagaacggtccgatagcgatcaagaggaactggaggtggacgtagaatcgctggtcttcggcggggaagctgaactgctaaggggattcgtggctggccaggagcactcttacagccatggcgggggcgcctggctttag

SEQ ID NO: 194333 - DNA, 1167 bp, synthetic construct
  misc_feature 1..1167: note = Description of Artificial Sequence: Synthetic coding sequence
  source 1..1167: mol_type = other DNA
atggagcccctggccagcaacatccaggtgctgctgcaggccgccgaatttcttgagagaagggagcgggaggcagaacacggttatgcatctctttgtccccaccgcagccctggaccgatccatcgaagaaaaaaacgacctcctcaggccccaggagcccaggatagtgggaggtccgtgcataatgaactggaaaaacgccgaagggcgcaactcaagaggtgcttggaacgtctgaagcagcaaatgccactcggagcagactgcgcacgatacactacactctcattactgcgaagggctcgtatgcatatacaaaaactcgaggaccaggaacagagagccaggcagctgaaggaacgtctgcggtccaagcagcagagcctgcagcggcaacttgagcaactcagagggttagcgggagcagccgaaagggagcgcttacgcgccgacagtctggacagttccggactgagcagcgaaaggtccgattcagatcagggagagtgcccagaggctgaggggctatgcggaccaaggggcgagcccgggctactgaccggaccgttgccagctcagcggagttggaggtggatgtggagggcatggtgcctgggcgtacgccctagctgttgcggagcttcttctcctgcccgctccacggcaacaagaactgccgccgcccctggttacgatgtgcctcacccaggcagagccagcgctttatattcgtgtcaggcacatctgcccggaaggtctccccctcaggcctttagagccgcccgatcacatctcttagagtggactaaacgtactctcgtgtgggagcaggtcctgccaaaacatccagcagccggttgccaggctgggccccttgagggcaagggccaggattctagcggccccccatggacacccgcaggccaggctgcctgggcacgcgctcaagccttcggctccgcagctcctaagggcaccggatccctgttgggtctgttcccctcctggactcggcctcccgcctttgccagccataaactgtatagcatatttattaaatcactatttcataattttccgtccattgttttgcctaacgagaatggcggaactcccaatcaccggcctaccggaaggggtaataacatcagtagtcatcattag

SEQ ID NO: 194334 - DNA, 582 bp, synthetic construct
  misc_feature 1..582: note = Description of Artificial Sequence: Synthetic coding sequence
  source 1..582: mol_type = other DNA
atggagcccctggccagcaacatccaggtgctgctgcaggccgccgagttcctggagagacgcgagcgggaggccgaacacggatatgcctccctgtgtcctcatagatcccccggcccgattcatcggcggaagaaacgccctccacaggcgcccggtgcgcaggactctggacggtcggtgcataatgagctcgaaaaacgacgacgggctcagttaaagaggtgtcttgagagactcaaacagcagatgccgctcggagctgactgtgctaggtacacaaccctctccctcctcaggcgagccaggatgcacattcagaaactggaagatcaagaacagagagcaaggcagttaaaagagaggctcagatcaaaacaacagagcctgcagcggcaactcgagcaactgaggggtctggccggagcagctgaacgagaacgcctgcgcgctgacagtttggattcctcaggcctgtccagcgagcggtccgactccgaccaagtcctgccgaacgaaaatggcggcactcctaatcataggccgaccggtcgcgggaacaatatttcttctcatcactag

SEQ ID NO: 194335 - DNA, 621 bp, synthetic construct
  misc_feature 1..621: note = Description of Artificial Sequence: Synthetic coding sequence
  source 1..621: mol_type = other DNA
atggagcccctggccagcaacatccaggtgctgctgcaggccgccgagtttcttgagcgccgagagagagaggccgaacatggatacgccagtctatgcccgcaccgctccccgggtcctattcataggagaaagaaacgccctccacaggcgccgggggctcaagactccggtcgctccgttcataatgagctcgagaagaggcgtcgtgcgcagctgaagcggtgtctggaacggctgaaacagcagatgcccctgggcgccgattgcgcgcggtatacaacacttagtcttttaaggagagctaggatgcacatccaaaaactggaagaccaggagcagagagcgagacagcttaaggagagactacgcagcaagcagcaaagtctgcagcgacagctggaacagctgcgaggattagcaggcgcagccgagcgcgagcggttgcgggcagatagtctggattcctccgggctgtccagcgagaggtcggatagcgatcaagaagagcttgaagttgacgtggaatctctggtctttggaggtgaagcagagctcctccgtggattcgtggcgggtcaggaacactcttacagccacggaggaggcgcttggctttag

SEQ ID NO: 194336 - DNA, 621 bp, synthetic construct
  misc_feature 1..621: note = Description of Artificial Sequence: Synthetic coding sequence
  source 1..621: mol_type = other DNA
atggagcccctggccagcaacatccaggtgctgctgcaggccgccgaattcctagagcgaagggagagggaggccgagcacggatatgccagcctgtgcccccaccgaagcccagggcccattcatagacgaaagaaacgaccgccccaagccccaggtgcccaggacagtggccggagcgtccacaacgaactggaaaagcgcaggcgtgctcaactaaagcgctgtttggagcggttaaaacaacagatgcccctgggcgcagactgtgctaggtacaccacactgagtttactaaggagggcacgcatgcacattcaaaagttggaagaccaggagcaaagggcgaggcagctgaaggaacggctcagatccaagcagcagtctctgcagagacagctggagcaactccgaggtctggcaggcgcagccgagcgcgagagacttcgagctgatagtctggactcaagcggcctgtcatctgaacggtccgattcggaccaagaggaactcgaagtggacgttgaatcattagttttcggcggcgaggccgaactacttcgtgggtttgtagcaggccaggagcactcctactcccatggcggtggggcttggctgtag

SEQ ID NO: 194337 - DNA, 768 bp, synthetic construct
  misc_feature 1..768: note = Description of Artificial Sequence: Synthetic coding sequence
  source 1..768: mol_type = other DNA
atgatccaggccatccaggtgctgcggttccacctgctggagctggagaaggtccatgaactttgcgataacttctgccacaggtatattagttgccttaagggcaagatgccaatcgatctggttatcgatgaaagagacggctcttccaagtctgaccacgaggagctcagcggatcatcaactaacctggcggatcacaaccctagttcctggagagaccatgacgacgcaaccagcactcattcggccgggaccccaggcccttcttccggcggtcatgcctctcagagtggcgacaatagctcagagcaaggagatggcttggacaattctgtagcctctcccgggaccggtgatgacgacgatccagataaagataagaagagacagaagaaacgcggcatcttccctaaagtggccacaaatatcatgcgcgcatggctgttccagcacctgactcacccttatccttcggaagaacagaaaaagcaactagctcaggacacgggcttgaccatactgcaggtcaataattggtttatcaacgcaaggaggaggattgtgcagcccatgatcgatcaaagcaatcgcgccggattcctgttagatccttccgtcagtcagggtgccgcttactcaccagagggccagcccatgggatccttcgtcttagacggccagcagcacatgggcatccgccccgctggtcctatgtctggtatggggatgaacatgggcatggatggtcagtggcattatatgtag

SEQ ID NO: 194338 - DNA, 9081 bp, synthetic construct
  misc_feature 1..9081: note = Description of Artificial Sequence: Synthetic coding sequence
  source 1..9081: mol_type = other DNA
atggaggagaagcagcagatcatcctggccaaccaggacggcggcaccgtggccggggccgcccccacattcttcgtgattctcaagcaaccaggaaatggcaagaccgaccaagggattctcgtgactaaccaggacgcttgcgccctagcttcctctgtttcctcaccggtaaaatccaaggggaaaatatgcctgcctgcggattgcaccgtcggcggcatcacagtcacactggataacaactctatgtggaacgaattctatcaccggtctaccgagatgatccttacaaagcagggacggcggatgtttccttactgcagatattggataacaggcctggattccaacctcaagtacatcctggtgatggacatcagccccgttgacaatcacagatacaaatggaacggcaggtggtgggagccaagcggcaaagccgagccccatgttttaggacgcgtctttattcatccagaatccccttctactgggcactactggatgcatcaacctgtcagtttctataagctaaagctcaccaacaatactctcgatcaggagggccacataatactccattcaatgcatcggtacctgccacgcctgcacctggtccctgccgagaaagcggtggaggtcatccagctgaatggtccgggtgtgcataccttcacttttcctcagaccgagttcttcgctgtgacagcgtatcaaaatattcagataacccagctgaagatcgattataatcctttcgccaagggctttcgggatgacgggctcaacaacaaacctcaacgcgatgggaagcagaaaaacagttccgaccaggaaggtaataatattagcagctcgtctgggcacagagtgagactcaccgaaggtcaggggtctgagatacagccaggggatcttgaccctcttagcagagggcacgagacaagcggaaaaggactggaaaagaccagtctgaatatcaaaagggactttctcggtttcatggatactgacagcgcactaagtgaggttccgcagctcaagcaggagatctcagagtgtctcatcgccagctccttcgaggacgactccagggtcgcgagccctcttgatcaaaacggttcgttcaatgtggttataaaggaggagcctctggatgactacgattacgaactgggggaatgtcccgaaggcgtgaccgttaagcaggaggagaccgacgaggagactgacgtgtactcaaattcagacgacgacccaattttggagaaacagctcaagaggcacaataaagtcgacaacccagaggctgaccatctctctagcaagtggctcccctccagcccttctggggtagctaaggcgaagatgttcaagctcgatactgggaagatgcccgtggtctacctggaaccatgcgccgttactaggtccaccgtaaagatctcagagttacccgataacatgctttctactagcaggaaagacaagtcctccatgctggcagagttggagtatttgccaacatatattgaaaactccaatgaaaccgccttttgcctggggaaagaatccgagaacggcctgagaaaacacagccctgacctgagagtggtgcaaaagtaccccctgttgaaggagccacagtggaagtatcctgatatcagtgactccataagcaccgagaggattttagatgattctaaggattccgtgggcgactctctttcagggaaagaagacctcggccgtaagcgtaccaccatgctgaagatcgccaccgcagccaaggtggtcaatgctaaccaaaatgcttctcccaatgtgcccgggaaacgcggcaggcccagaaagctgaaactctgtaaggcagggcgcccccccaaaaatactggaaagtcgctgatctcgacaaagaataccccagtgtctccaggaagcaccttcccggacgtcaagcccgacctggaggacgttgacggagtgctgtttgtttctttcgagagtaaggaagcccttgacatacatgccgttgacggaactacagaagaatcatcttctcttcaggcatccacgactaacgacagcgggtatcgagctcggatttcccagctggagaaagagttgattgaagacctgaaaacactgcgccacaagcaggtgatacaccctggcctccaagaggttgggcttaaactcaatagtgtggatccaactatgtctatcgacctgaaatatcttggagttcagctgcccttggctcccgccacaagctttccattctggaacctaactggaaccaacccggcgtctcccgacgctggttttccattcgtttccaggacaggaaagacaaacgacttcaccaagataaaaggttggcgggggaagttccactcagcgagcgctagccggaatgaaggaggcaactccgaatccagtttgaaaaatcgttctgccttctgctcagacaagctggacgagtatttggaaaacgaaggtaaattgatggagacgagtatgggcttttcttccaacgcccccacaagtcccgtcgtctaccagcttcctactaagtcaacctcctacgtcagaacacttgacagcgtcctgaaaaagcagtccactatttcaccctccaccagctattctcttaaaccccacagcgttcccccagtctcccgaaaggccaagtcccagaatagacaggcaacgttttcgggccgcaccaagtcaagctacaaatccatccttccctacccagtcagccctaagcagaaatactcccacgttatactcggtgataaggtcaccaagaacagttcaggtatcataagcgaaaaccaggccaacaactttgtcgttcccaccctggacgagaacatctttccaaagcagattagtttgaggcaggcccagcagcagcagcagcaacaacaggggtccagaccacccgggctcagtaagagccaagttaagctcatggacctcgaggattgtgccctctgggagggcaaaccacggacctacatcacggaagaacgcgcggatgtaagtctgaccaccctgctgaccgcccaggcgtcactgaagaccaaacctattcacaccattatcagaaaacgcgcccctccttgtaacaacgatttttgcaggttggggtgcgtgtgctcttcgttggccctggaaaagaggcagcccgctcactgcaggagaccagattgtatgttcggctgtacatgcctcaaaagaaaagtggtgctcgtgaaaggaggctcgaaaaccaaacacttccagcggaaggctgcacaccgggatcctgttttttacgataccttaggggaggaggctcgcgaggaagaagagggaataagagaagaagaagagcagctgaaagagaaaaaaaaacgcaaaaaattggaatacactatctgtgaaactgaacccgaacaaccagtccgccattaccccttatgggtgaaggtggagggcgaagtcgatcccgaaccagtctatatccccacaccctccgtgatagagcctatgaaacccttgttactaccgcaaccggaggttctgagcccgactgtgaaggggaaactgcttacgggcatcaagtcgccacgcagctacacacccaaaccaaaccccgtgatccgcgaagaggacaaggatcccgtgtacctctattttgaatctatgatgacctgtgcgagggttcgagtctacgaacgcaaaaaagaggatcagcgccaacctagttcctcatcttccccctccccaagcttccagcagcagacttcctgtcatagctcccccgagaaccacaacaatgctaaggagccagatagtgagcagcagccgcttaaacaactgacatgcgatctggaggatgattccgacaaattgcaagagaagtcctggaagagttcatgtaatgagggggagtcaagtagcacaagctatatgcaccagcggagccccggagggccgacaaagctgatcgagatcatttccgactgcaactgggaagaggacagaaataaaatcctctccatactttctcagcacattaactctaatatgccacaatccctcaaagtgggttccttcatcattgagctcgcatcccagaggaaatccaggggggaaaagaatccccccgtctatagtagccgcgtcaagattagcatgccttcttgccaagatcaggacgatatggccgagaaatctggttctgagacgccagatgggccactatccccaggaaaaatggaggacatcagcccagtgcagaccgatgccctggatagcgtgagagaacggctacacggcgggaaagggttgcctttctacgctggactgtctccagccggcaagcttgtagcctacaagcgaaagccatctagtagcacttccggccttattcaggtggccagtaacgctaaagtggcagcctcgcggaagccccggacactgctcccatcaacctccaatagtaagatggcctcaagcagcggcacagcaactaatcgccctggtaagaaccttaaagccttcgtgccggcaaagcgtcctattgctgccagaccctctcccggtggagttttcactcaattcgtgatgtccaaggttggtgcactacagcaaaagatccctggagtctctacaccccagactctggccgggacacaaaagttctcgattaggccgtcgcctgtgatggtggtgaccccagtcgtgtcttctgaaccggttcaggtgtgctcgcctgtaacagccgctgtgaccaccaccaccccacaggtgtttctggagaacacgaccgccgtcacacctatgaccgccatctcagatgttgagaccaaggaaacaacctatagttccggagccaccactactggtgtggttgaagtgagcgaaacaaataccagcacctccgttaccagcactcagtccactgccacagtgaacctgaccaagacaaccggcattacgacccccgttgcctccgttgccttccctaagtccttggtagccagtccgtcaaccatcactctgccagttgcctctactgcctcaacttcgctggtagtcgtcaccgccgccgcaagctcaagcatggtgacgacccctacctcctctctgggctccgtgcctattattctgtccggaatcaacggatcccctccagtgtcccaacgcccagagaatgcggcccagattccagtagccacccctcaagtgtcccccaatacagtgaagagagcaggccctcgtttactccatcccaatggccagatcgtgcagctgcttccactgcaccagctgaggggctccaatactcagcctaacctccagccagtaatgtttagaaatcctggcagcgtcatgggcatccggttgccagctccgtcaaaaccgagcgagaccccaccaagctcaacctcgtcatctgcttttagtgtgatgaatcccgtgatacaagccgtgggctccagctctgcggtcaacgtgataacacaagctccctcattactgagtagtggcgcctccttcgtgtctcaggccgggacattaacgcttcgcattagcccaccagaaccacagtcgttcgccagcaagacgggttctgagaccaaaattacctatagctctgggggacagcctgtgggtacagcctccttgattccgcttcagtcagggagcttcgccttgcttcagctgcccgggcaaaaacccgtcccatctagcattctacagcatgtggcctctttacaaatgaagagagaaagtcaaaacccagatcaaaaggatgaaactaattcaataaaacgagaacaggaaacaaaaaaggttttacagtcagaaggcgaggcagtagatccagaggcaaatgtaatcaagcagaatagcggcgcagccacctcagaggaaactctgaacgattccctcgaagacagaggggatcatctggatgaggaatgcctgccagaggagggctgtgccaccgtcaagccatcagagcactcctgtataaccggctctcacacagaccaagattacaaagacgtgaatgaggagtatggtgctagaaatcgcaagtccagtaaggagaaagtggccgtgctggaggtcaggactatttctgaaaaggcttccaacaaaacagttcagaacctttccaaggtgcagcatcaaaaactgggagatgtgaaggtagaacagcagaaaggctttgacaatcccgaggagaactcatcagagttccctgtcacttttaaagaggaatccaaatttgagctgtctgggagcaaggtgatggagcagcagagtaacttacaacccgaggctaaagaaaaggaatgtggagactcgttagagaaggatcgcgaacggtggagaaaacatctaaaaggacctttgaccagaaagtgtgtaggggcatcccaggaatgtaaaaaagaggctgatgagcaactgatcaaggaaaccaaaacgtgccaagagaactccgacgtttttcaacaggagcaagggatctctgacttgttaggaaagagcggcatcaccgaagatgccagggttttaaaaactgagtgcgattcctggagtagaatctctaacccctcagcatttagcattgttccaagacgggccgctaagtctagcagaggtaatggccactttcaggggcacctgctcttgcctggcgagcagattcagcccaaacaggaaaaaaaaggcggtcggtcatccgctgattttacagttctggacctggaggaggacgacgaagacgataacgagaagacggatgactccattgacgaaatcgttgatgtggtctcggattaccagagcgaggaagtggatgacgttgagaagaataactgtgtggagtacatagaagacgacgaggaacacgtcgatatcgagactgtggaagaactgagcgaggagattaatgttgctcacttaaagactacggccgcacatactcagtcattcaagcaacctagctgtacacatatatcagccgatgagaaagcagccgaacgttcccgcaaggcgcctcctattcctctgaagctgaagcctgattactggtccgacaaactacagaaagaagcagaagcctttgcttactatcgtcgtacacataccgctaacgagcgaaggagacgtggtgaaatgcgcgacctttttgagaagttgaaaattacgctcggcctcctccacagctccaaagtatccaagtcgctgatactcacacgagctttttcagaaatacagggactgactgatcaggctgataaactgatcggccagaaaaacctgctgacacgcaagagaaacattctgataagaaaggtctcttctctgagcggcaaaaccgaagaggtggtgctcaaaaagctggagtacatctacgccaaacagcaagcactggaggctcagaagcgaaaaaagaaaatgggcagtgatgagttcgatataagtccacgtattagcaagcaacaggaaggttcctcagcctcttcagtggacctcggtcaaatgttcattaacaatcgacgcggcaaacccttaatcctgtcacggaaaaaggatcaggccaccgagaacactagtcccctcaatacacctcacacgtcagcgaacctagttatgaccccccagggtcagctgctaaccctgaagggacccctcttcagcggtccagtggtggccgtgtcacccgacctactggagtccgatttaaagcctcaggtggcaggcagtgccgtggctctgcccgagaacgatgacctgttcatgatgcctagaatagtgaacgtgacttccctcgctacagagggcggcctggtagatatgggaggatccaagtaccctcacgaggtgcctgacagcaagccctctgatcaccttaaggatacagtcaggaacgaggataacagtctggaggataagggcagaataagttcccggggtaatcgggatggccgagtcacacttgggcccactcaagtgtttctggcaaacaaggattcggggtacccgcaaatcgtggatgttagcaacatgcaaaaagcacaggagtttctgcccaagaagattagcggagatatgagaggcattcagtacaagtggaaggaatctgagtctcggggagagcgcgtgaagtctaaagattcgagcttccataaactgaagatgaaggacctcaaagattcatctatagaaatggagctgagaaaggtcacctcagcaatagaggaggcagccctggatagttctgagctgctcactaatatggaggatgaggacgatacggacgagacactgacctctctgctcaatgaaatcgcattcctcaaccagcaactgaacgacgatagcgtgggtctggccgagctgcccagcagtatggatacggagtttccaggcgatgcgagaagagcttttatctccaaagtgccaccaggcagcagagccactttccaggtcgagcaccttggcactgggctcaaagaattaccggatgtgcaaggtgagtccgatagcatctcccctctgctgttgcaccttgaagatgacgacttctctgagaatgaaaaacagctcgcggaaccagcctccgagcctgatgtgctgaaaatcgtgatcgacagtgagatcaaggactcactgctgagcaacaagaaggccattgacggcggcaagaacacctcaggcctcccagcggaacccgagagcgtttcatcacccccaactcttcatatgaaaacagggttagagaactccaactcaactgatacactctggcgccccatgcccaagctagccccccttggtttaaaggttgcaaacccatcaagcgacgcggacggtcaaagtctaaaggtaatgccgtgcctagccccgatcgccgccaaagtaggctctgtggggcataagatgaacctgacaggcaacgaccaagagggccgcgagagcaaggttatgccgactctggcacctgtggtggctaaattgggcaactccggggcatcgcctagcagcgctgggaagtag

SEQ ID NO: 194339 - DNA, 8571 bp, synthetic construct
  misc_feature 1..8571: note = Description of Artificial Sequence: Synthetic coding sequence
  source 1..8571: mol_type = other DNA
atggaggagaagcagcagatcatcctggccaaccaggacggcggcacagttgcaggggccgccccaacattttttgtgatcctgaagcagcccggaaatggcaagaccgaccagggcatactcgtgaccaatcaggatgcttgcgcactcgcctcatctgtgagcagccctgtaaagtctaaggggaagatctgtctgcctgccgattgcactgtaggcggcatcactgtcactctagacaacaattcgatgtggaatgagttttatcatcggtccacagagatgatattgacaaaacagggaaggcgaatgttcccttattgccgatattggatcaccggtctggattccaatttaaaatatatcctcgtaatggacattagccctgttgataatcaccggtacaaatggaatgggcgatggtgggagccatccggtaaggccgagccgcacgtgctaggcagggtctttatccatcctgaatcaccctctactggtcactattggatgcaccagcctgttagcttttataagttaaaactcacaaataatacattggatcaagaggggcacatcatcttgcatagcatgcatcggtacctgccacggctgcacctcgtccccgcagagaaagccgttgaagtcatccagcttaacggacccggcgtgcacaccttcacatttccgcagaccgagtttttcgctgtcactgcataccaaaatatacagattacccagctcaagatagactataacccatttgccaaaggctttagagacgatggcctcaataataagccccagagggatggcaagcagaagaactcttcagatcaggagggtaataacatctccagctcaagtgggcacagagtccggcttaccgaaggccagggaagcgaaatccagccaggcgacttagaccccttatctcggggccatgagactagtgggaaaggcctcgagaaaacctctctaaatataaaacgcgacttcctcggatttatggacacagattcggctttgtccgaggtcccacagcttaagcaagaaatctcagaatgtctgatcgcctcatcattcgaggatgatagtagagttgccagtcccctggatcagaatggcagcttcaatgttgtgattaaggaagaaccccttgacgactacgactatgagctgggggagtgtccggagggggtgacggtcaaacaagaggagaccgacgaggaaaccgatgtgtacagtaacagtgacgatgacccgatcctggagaagcaactaaagaggcacaataaggtggataaccccgaggcagatcatttaagctctaaatggttaccgagcagtccgagcggggtggccaaagctaaaatgttcaagctcgataccgggaagatgccagtggtttacttggagccctgcgccgtgacccgctctactgtgaaaatatcagaactccctgacaacatgctatcaacctccaggaaggataagtcttcaatgcttgctgagctagaatacctaccgacctacattgagaattccaatgagaccgctttctgtttgggaaaagaatcagagaacggcctacggaaacactcccctgatctcagagtcgtacaaaagtatccgctgctgaaggaaccgcagtggaaatatcctgatatctctgactcgatttctaccgagaggatcttagatgattcgaaggacagcgtaggcgatagcctcagtggtaaggaagatctgggccgtaaacgaaccaccatgctgaagatcgccactgccgccaaagtagtgaacgcgaaccagaacgcctcccccaacgtgccgggaaagaggggcagacctcgcaaactgaaactgtgtaaggccggccgcccccccaagaatacgggcaaaagcctcatttcgaccaagaacactcccgtaagtccaggtagcactttccccgatgtcaagccagatcttgaggatgtggatggcgtcttgtttgtgagttttgaatcaaaagaagccctggacattcacgcagttgatggaaccacggaagaatcatcctccctgcaggcatccaccacgaatgactctggctatcgagcgaggatcagccaacttgaaaaagaattgatagaggatctgaaaaccttacgtcataaacaggtcattcaccccggactgcaagaggtagggctgaagctgaacagcgtggaccctactatgagcatagatcttaagtatctgggcgtgcaattacctctggcccctgctacatcttttcccttctggaatttgacgggcactaatccagcttcccccgatgcggggtttcctttcgtgagccgcactggcaagactaacgacttcacaaagatcaagggctggcggggaaaattccattctgcttccgcctctaggaatgaagggggcaactccgaatcctccctcaaaaatcggtctgccttttgttctgataagttggatgaatacctggagaacgagggtaagctgatggagaccagcatgggctttagctccaatgcacctacgagccctgtggtctaccagctgcccacaaagagtacatcttacgtgagaacgctcgactctgtgttgaagaagcaatccaccatctctcccagtacctcatattccctgaagcctcactccgtaccaccggtgtctcgcaaggcgaagtcccaaaatagacaagcgacgttctcaggaagaacgaagtctagttacaaatccattttaccttaccccgtgtcaccgaaacagaaatacagccacgtgatactgggagacaaagtgacaaaaaatagttctgggattatttctgagaatcaggctaacaatttcgttgtgcccacacttgatgagaacatcttccccaaacagatctccttgcggcaggctcagcagcagcagcagcagcagcagggatcacgacctcctggcctctcaaagagccaagtaaagttaatggatttggaagattgcgccctctgggaaggtaaaccaagaacttacataactgaggagagagccgatgttagcctgactactttgttgactgcgcaggcttcattaaagaccaaacctatccacaccatcatcaggaagagggcacccccctgcaacaacgacttttgtcgactgggatgtgtatgctcctcactggccctggagaagagacagcctgcacactgcaggcgccccgattgcatgttcgggtgcacatgtctgaaacggaaggttgtcctcgtcaagggcggcagcaagactaagcacttccagcggaaggcagcccaccgcgatcccgtgttctacgatactcttggggaggaggcacgggaggaggaggaaggcattcgggaggaggaggagcagctgaaggagaagaagaagaggaagaaattggagtatactatttgcgagaccgaacctgagcaacctgtgaggcattacccactgtgggtgaaagtggaaggggaggttgatccggaacctgtgtatattccgactccatcagtgatcgagccaatgaaaccactgctccttccgcagcctgaggtgctgagccctacagtgaagggtaagctcttgacaggcattaaatctccacgttcttataccccgaagcccaaccctgtgatcagggaggaggacaaagatcctgtgtacctgtatttcgaatctatgatgacttgcgctcgcgtgagagtctacgaacggaaaaaggaggatcaacggcagccttctagctcctcttcaccgagcccctcttttcagcagcaaacaagctgccatagctcaccagagaatcacaataatgcgaaggaaccagacagtgagcaacaaccactgaagcagctcacctgcgatctggaagatgactcagacaagctgcaggagaaatcttggaagagttcctgcaacgagggtgagtcctcaagcacctcgtatatgcaccagcgcagtcccgggggtccgaccaaactcatcgagatcatttccgactgcaattgggaggaggatcgcaataagatactatctattctaagccagcatatcaattcaaacatgcctcagtctctaaaggttgggtccttcatcatcgagctggcatcccaacgaaaatccaggggagaaaagaatcctccagtctactcctctcgtgtcaagatatcgatgccgagctgccaggaccaagacgatatggcggagaaatccggtagcgagacgcctgacggacccctatcgccagggaaaatggaggatatctcacccgtccagacggacgcactcgactccgtcagggaaagactccatgggggcaagggactccccttctacgccggcctttccccggcaggtaagctcgttgcatacaaaagaaagccatcaagttcaactagcggattaattcaggtggccagtaatgctaaagttgctgcatctaggaaaccccgtacactgcttccctctacgtccaactcaaagatggcgagttccagcggaaccgccactaatcggcctgggaagaacctcaaggcattcgtgcccgccaaacgcccaatcgaaaatgccgctcagatccccgtagccactcctcaggtttctcccaacaccgtgaaaagggcaggcccaagacttctgttaatcccagtccagcagggatcccccaccctgagacctgtctccaacacccaacttcagggccacagaatggtgctccagccggttcgctctccatcgggcatgaacctcttccgccatcccaatggtcagatcgttcaattgctgcctcttcatcagctgcggggctccaacacccaacccaatctgcagcctgtgatgttccgaaatcctggcagcgtgatgggcatcaggctgcctgcacctagcaaaccctcagagacccccccttcatcgaccagcagtagtgctttttcagtgatgaaccctgtgatccaggccgtaggtagtagctctgcagtgaatgtgatcacccaggcgccatccctgctgtcgagcggcgccagcttcgtttctcaggctggcactctcaccttgaggattagccctccagagcctcagagcttcgcatccaaaaccggctccgaaactaaaattacttactccagtggaggccagccagtcggaacagccagtttgattccgctacagagtggaagtttcgccctgttacaactccccggacagaagcctgtcccctcaagcatcctgcagcacgttgccagtttgcaaatgaaacgagagtctcagaatccagatcagaaggatgaaaccaactctatcaagagggaacaggaaaccaagaaagtgctccaatcggagggcgaagccgtggaccctgaggctaacgtaatcaaacagaacagtggcgctgcgaccagcgaagaaaccctgaacgatagtctcgaagacaggggagaccaccttgacgaggagtgccttccggaggaaggctgcgccaccgtaaagcccagtgagcactcctgtattaccggaagccacacggaccaggattataaggacgtaaacgaagaatacggcgcaaggaatcgcaaaagctcaaaggaaaaggtagcggtcctggaagtgagaaccatcagtgagaaagcttccaataagacagtccagaatctgtccaaagtccagcaccagaagttgggtgacgtcaaagtggagcagcaaaagggattcgataaccctgaagagaatagctccgaattccccgtaactttcaaggaagaatccaaatttgaactttctggcagcaaggtgatggaacaacaatctaatttacagccagaagccaaagagaaagaatgtggcgactcgctggaaaaggatagagaaaggtggaggaaacacctcaaagggcctctcacacggaagtgcgtcggggcttcccaggaatgcaagaaagaagccgatgagcagctgataaaggagacaaagacgtgtcaagaaaactccgatgtcttccagcaagagcaaggaattagcgacctgctcggaaagtctggcatcacagaagacgctagggtgttgaagacagagtgtgactcttggagtcggattagtaatccttcagccttcagcatcgtaccgcggagagccgccaaaagctcccggggcaatggacattttcagggccacctccttctcccaggcgagcaaatccagccaaagcaggagaagaaagggggaagatccagtgctgactttaccgtcctcgacctagaggaggatgacgaagatgataacgaaaagacagacgattccattgacgagattgtggatgtagtttcagactaccagtcagaagaagtggacgatgtggagaagaataactgtgtggaatatattgaggacgatgaggagcatgtagatatagagactgtggaggagctcagcgaagaaataaacgtcgcacaccttaaaaccaccgcagcccacacacagtcatttaagcagccatcgtgcacccacataagtgcagacgagaaggccgccgagaggtcacgcaaagcccctcctatccccctcaaactcaaacccgattactggagcgataagcttcagaaagaggccgaggccttcgcctattaccgccgcacccacaccgcgaacgaacgacggagacgaggggaaatgagggatctattcgaaaaattgaagatcactctagggcttctgcacagctctaaggtgtccaagtcactaatcttgacccgcgctttcagtgaaatacaggggctcaccgaccaagccgataagcttattgggcagaagaacctgttgacgaggaaacgaaatattttgatccgcaaagtgtcttcattgtccggcaagacggaagaagtagtgctaaaaaagctcgagtacatctatgctaagcagcaagcactcgaagctcagaagcgtaaaaagaaaatgggatccgatgaatttgatatctcccccaggatatctaaacagcaggaagggagcagtgcgtcctccgtggacctcggtcagatgttcataaacaaccgaaggggaaaaccgttaatcctgtcccggaaaaaagatcaggccacagagaatacttcccccctgaacaccccgcacacgtcagccaatctggttatgactcctcagggtcagctgctcacccttaaagggccgctgttctcaggacctgttgttgctgtgtccccagacttattagagtctgacttgaagccacaggtcgccggatccgccgtcgctctgccagaaaatgacgatctgttcatgatgccccgaattgtcaacgtgacatcactcgctaccgagggagggttggttgatatggggggcagtaagtatccccatgaggtcccagattccaagccgagcgaccatctgaaggataccgtaaggaatgaggacaattcactggaggataagggccgaatatctagccgggggaatcgagatggtcgcgtcaccctggggcctacccaggtgttcctagctaataaggacagtggctacccccagattgtggatgtgtccaatatgcagaaggcacaggagttcctccctaagaaaatttctggagacatgcgagggattcagtataagtggaaagaaagtgagagcaggggtgagcgggtgaagtccaaggacagcagttttcataagttgaagatgaaggacttgaaagactccagcatcgaaatggagcttagaaaagtgacttcagccattgaggaagctgccctcgatagcagcgagttactcaccaatatggaggatgaggatgacacagacgagaccttaacatctctcctcaacgaaatagcatttctgaaccagcagctgaatgatgactcagtgggcctagccgagttgccctcatcaatggatactgagtttcccggtgatgctagacgcgccttcatatccaaggtgcctcccggctccagagctacgttccaagtcgagcacctgggcaccgggctgaaggaacttcctgatgtgcagggagagtccgatagcatttcgcctttgctgctgcatttagaggatgacgatttctcagagaacgagaaacagttagccgagcccgcaagcgaacccgacgtactgaagatagtgattgactcagaaatcaaggattccttattgtctaataagaaagcaatcgacggcggcaagaacacatccgggctccccgcagagccagagtccgtgtccagccctccaaccttacatatgaaaaccgggctcgagaattcaaacagtactgataccctctggagacctatgcctaagctcgcccccctcgggttaaaagtggccaacccaagctcagatgccgacggacagtctctaaaagtaatgccatgtctcgcccccatagccgccaaggtggggagtgtgggacataagatgaatctgacagggaacgaccaggaaggcagggagtcaaaagtgatgccaaccctcgcgcctgtggtggccaagctggggaattccggcgcttctcctagctccgccggcaaatag

SEQ ID NO: 194340 - DNA, 687 bp, synthetic construct
  misc_feature 1..687: note = Description of Artificial Sequence: Synthetic coding sequence
  source 1..687: mol_type = other DNA
atggagcgggtgaagatgatcaacgtgcagcggctgctggaggccgctgagtttttggagaggcgggagcgggagtgtgagcacgggtacgcatcctcgttcccctcgatgccgagtcctcggctgcagcactcgaaacccccacgtcgcctgagccgtgcccagaaacattcaagcggctcctccaacacttcaaccgccaaccggtccacacataatgaattggaaaagaatcgtcgggcccatctgagactctgtttagaacgtttgaaagtgctcatcccccttggcccagattgcacaaggcacaccactctaggcctgctcaataaggctaaggcccacataaagaagcttgaggaagctgagcgaaaatctcaacaccagttggagaaccttgagcgcgagcagaggttcctaaagtggcgcctagagcagctgcaggggccacaggagatggaacgtattcggatggattccattggctcaacaatcagttcagaccgatccgactctgaaagagaagagattgaagtggacgtcgagtcaaccgaattttctcacggtgaagtggacaacattagtaccacctctattagtgacattgacgatcattcaagcctcccctctattgggagcgacgaagggtactcttctgcctctgtcaaactcagttttacatcttag

SEQ ID NO: 194341 - DNA, 888 bp, synthetic construct
  misc_feature 1..888: note = Description of Artificial Sequence: Synthetic coding sequence
  source 1..888: mol_type = other DNA
atgggcaagcggggccggccccggaaggaggcccggtgcgagggcgccggactggcaccagctgctccccccgcggtgccacccgccgtggccgctccacagcctcccgctctccccgaggaccccgctggagcaaagcctaggtgtcccttttctgatatttttaatacaagtgagaattccatggagaaacatatcaatacattccttcagaatgtacagattctcctggaggctgcttcatacttagagcaaatcgagaaagagaataagaaatgcgagcatggatatgctagtagctttccctccatgccgtctccgcgactccagcatagtaagcctccacggagattgagcagggcccaaaagcacagtagcggcagttccaacacaagcacagcgaatcgaagcactcataacgagttggagaaaaatagacgcgcgcaccttagactgtgtctagaacgcctcaaagtcctgataccactgggaccagattgtacccgccacaccaccctcggattactgaacaaggccaaggctcatatcaagaagctggaggaggcagagcgcaagagccaacaccagttggagaacctcgaaagagagcagagattcctgaaatggcgccttgaacagttgcagggaccccaagagatggaacggatccgcatggactctataggatctacgataagtagcgaccgctcagattccgagagagaggagatcgaggtggacgttgagtccactgagttcagtcacggcgaagttgataacattagtaccacgagtatttcggacatcgacgaccactcctcacttccatctatcgggtccgatgagggatacagctcggctagcgtcaaactgtcattcacttcctag

SEQ ID NO: 194342 - DNA, 549 bp, synthetic construct
  misc_feature 1..549: note = Description of Artificial Sequence: Synthetic coding sequence
  source 1..549: mol_type = other DNA
atgcccagcccccggctgcagcacagcaagcccccccggcggctgtctagagctcaaaagcattctagtggctcctccaacaccagcaccgcaaaccggcgtgctcaccttagactgtgcctagagagattgaaagtgctgatccctctgggaccggattgcactaggcatactaccctgggtttactgaataaagccaaagctcatatcaaaaaactggaggaagctgagaggaagtctcaacaccagttggagaatctcgagagagaacagaggtttctgaaatggcgcttagagcagctacaaggaccacaggagatggaacggatccgtatggacagcatcggctccacaatatcatccgaccggtcagactccgaaagagaggaaatcgaggtggatgtggaatcaacagagttttctcatggagaggtcgacaacatctccactacaagcatctctgatattgatgaccacagcagtctgccgtccatcggcagtgatgagggctactcctcggccagcgtcaagctgagcttcacaagttag

SEQ ID NO: 194343 - DNA, 579 bp, synthetic construct
  misc_feature 1..579: note = Description of Artificial Sequence: Synthetic coding sequence
  source 1..579: mol_type = other DNA
atgcccagcccccggctgcagcacagcaagcccccccggcggctgtcccgagcacagaaacattcgtccggcagctccaatacctctaccgcaaaccgctccacacacaacgagttagagaagaaccgaagagcacacctaagattgtgtctagagagactgaaggtgctgatccctctcggtcctgactgtacccgacacactacacttggtctgcttaacaaagccaaggcacacatcaaaaaactcgaagaggcagaacgcaaaagtcaacatcagttagagaacttggaacgcgagcagagattcctaaagtggaggctggaacaattacagggcccccaggaaatggaaagaatcaggatggatagcataggtagcacgatatcctctgatcgctccgattcggaacgcgaggagatcgaagtggatgtggaatcaaccgaattctctcacggcgaagtcgataatatcagtacaaccagcatctccgatatcgatgatcactccagccttccaagtattggttccgatgaaggctacagcagcgcgtcggttaaactgtccttcacctcctag

SEQ ID NO: 194344 - DNA, 579 bp, synthetic construct
  misc_feature 1..579: note = Description of Artificial Sequence: Synthetic coding sequence
  source 1..579: mol_type = other DNA
atgcccagcccccggctgcagcacagcaagcccccccggcggctgtcacgagcacagaagcatagttccggttcctccaacacctcaaccgccaaccgaagcactcataacgagctggagaaaaatcgccgtgcacacctgagactgtgtctggaacgtctcaaagtcctgattccactcggcccagactgtacaaggcacactacgctaggtttactgaacaaagctaaagctcacatcaagaaactggaagaagccgagagaaaaagtcaacaccagcttgaaaatctcgagagagagcagaggttcctgaagtggagacttgagcagcttcaggggccacaagagatggaacgaatacgcatggatagcattggatctacaatttcgtccgaccgcagcgacagtgaaagggaggagatcgaagttgacgttgagtccactgagttcagccacggagaagtagacaacataagcaccacttctatctccgatattgacgaccacagctccctgcccagcattgggagtgacgaggggtacagttccgcttctgttaagctgtctttcacatcatag

SEQ ID NO: 194345 - DNA, 579 bp, synthetic construct
  misc_feature 1..579: note = Description of Artificial Sequence: Synthetic coding sequence
  source 1..579: mol_type = other DNA
atgcccagcccccggctgcagcacagcaagcccccccggcggctgtctagggcccagaaacatagcagcggctcctcaaacacatccaccgccaatcggtcgacccataatgagctcgagaaaaaccggcgtgctcacctgcgcctgtgtctggagagacttaaggttcttatcccgttgggtcctgactgtacccggcacaccaccttaggactgcttaacaaagccaaagcacacattaagaagctggaggaagcggagagaaagagtcagcatcaactcgaaaacctggaacgcgagcagcggttcctaaaatggcgtctcgaacagctccagggcccccaggaaatggaacggattcgaatggactccattgggtcaaccatttcgtccgatagatccgattcagagcgcgaggaaatcgaagtcgatgtggagtctaccgaattttctcacggggaggtagacaacatctcaaccacgagcatctcggacatcgacgaccatagtagtttaccgtccataggcagtgatgaaggatatagcagcgccagcgtaaaactatcttttacctcgtag

SEQ ID NO: 194346 - DNA, 657 bp, synthetic construct
  misc_feature 1..657: note = Description of Artificial Sequence: Synthetic coding sequence
  source 1..657: mol_type = other DNA
atggagcgggtgaagatgatcaacgtgcagcggctgctggaggccgcagaattcctggaaagaagggaaagagagtgcgaacacgggtacgcctcctccttcccatcaatgccttcccctaggctgcagcattccaagccaccccggcgtctatccagggcacagaaacactctagtgggagctctaacactagcaccgcaaatcggcgcgcccacctcaggctctgccttgaacgactcaaggtgttgatcccactgggtcctgattgtacccggcataccaccctcggcctgctcaataaggccaaggcacacataaaaaagctcgaagaagccgaaagaaaatctcagcaccagctggaaaatctggaacgcgaacagcgcttcttaaaatggcggctggagcaactgcagggaccccaggaaatggagcggatacgcatggactccattggctctaccatttccagcgataggtcagatagtgaacgggaggagatcgaagtcgatgtggagagcactgagttctcccacggggaagtcgacaatattagtactacttcgatatccgacatagacgatcatagctccttgcccagcattggatccgatgagggttatagctccgccagcgttaaactgagcttcactagctag

SEQ ID NO: 194347 - DNA, 657 bp, synthetic construct
  misc_feature 1..657: note = Description of Artificial Sequence: Synthetic coding sequence
  source 1..657: mol_type = other DNA
atggagcgggtgaagatgatcaacgtgcagcggctgctggaggccgctgagtttctggagagacgggaaagagagtgcgaacatggctatgcttcttcctttccctctatgccctccccgcgactgcaacacagcaaaccccctcgccgactgtcccgggctcagaaacattccagcggatcctccaatactagtaccgccaataggcgagcgcacctgaggctctgtctggagaggctgaaggtcctgattcccctgggccctgattgtactagacacaccacccttggactcctgaataaggcgaaggctcacatcaagaagctcgaagaagcagagcgtaagagtcaacatcagctggaaaatcttgagagggagcagcgatttttgaaatggagattggagcagttgcaggggccacaggagatggagcgaatacgtatggactccatcgggagcacaatcagcagcgataggtctgattccgaacgagaggagatcgaggtggatgtggaaagtactgagttctcccacggtgaagtcgataacatttctacgacaagcattagtgatattgatgatcactcatcccttccctctattggctctgacgagggatacagtagcgcaagcgtgaagttgagttttacctcctag

SEQ ID NO: 194348 - DNA, 357 bp, synthetic construct
  misc_feature 1..357: note = Description of Artificial Sequence: Synthetic coding sequence
  source 1..357: mol_type = other DNA
atgcccagcccccggctgcagcacagcaagcccccccggcggctgtccagggcccagaaacactcaagtggctctagtaatacatctaccgctaatagaagcacacataatgagctcgagaagaaccgacgcgcacacttaaggctgtgcctggaacgactcaaggtgttgattcccctgggccctgactgcacaagacacactacgctcggtctgttgaacaaagctaaagcccatatcaagaaactggaagaggctgagcggaaatcccaacatcagcttgaaaatctcgagcgggaacagaggttccttaagtggagattggagcagctccagggacctcaggaaatggagtag

SEQ ID NO: 194349 - DNA, 681 bp, synthetic construct
  misc_feature 1..681: note = Description of Artificial Sequence: Synthetic coding sequence
  source 1..681: mol_type = other DNA
atgggcaagcggggccggccccggaaggaggcccggtgcgagggcgccgggctggcgccggcagccccgcctgctgtccctcccgccgtcgctgctccccagccacctgcccttcccgaggatccagctggcgcaaagccccggtgccctttctcagatattttcaataccagcgagaacagcatggaaaagcacattaacacctttctccagaacgtgcagatcctcctggaggccgccagctatctagaacaaatcgagaaagagaacaaaaaatgtgaacatggttacgcttcttcgttcccttccatgccatctcccagattgcaacatagcaaaccacctagaagactgtcacgagcccagaagcactcaagcggatccagtaacacatcaacggccaatcggcgtgcccacctgaggttatgtcttgagcgccttaaggtgctgatcccactggggccggactgtacccggcataccaccttgggcctgctgaataaagccaaagctcatattaagaagcttgaggaggcggagcgaaagagccaacaccagctagagaacctcgagagagaacagagattcctgaagtggcgcttagagcagctgcaggggccgcaggaaatggaacggatcagaatggacagtatcggcagcactatctccagtgatcggtag

SEQ ID NO: 194350 - DNA, 897 bp, synthetic construct
  misc_feature 1..897: note = Description of Artificial Sequence: Synthetic coding sequence
  source 1..897: mol_type = other DNA
atgaccgagcccggcgccagccccgaggacccctgggtgaaggcctctcctgttggggctcacgccggggaggggagggctggtagggctagagcacgtaggggggctggtagaaggggagcgtccctgctatccccaaaatcacctaccctgagcgtgcccagaggctgtagagaagacagcagtcaccctgcctgcgccaaggtcgagtacgcttacagcgataattctttagatcccgggttattcgtcgagagcacacgaaaaggcagcgttgtgtcaagagcaaattcgatagggtcgacatctgcgtcctcagttcccaataccgatgatgaggacagtgactatcatcaggaggcttataaggaatcctacaaagatcgccgcagacgcgcgcatacccaggctgagcaaaagaggcgggacgcaatcaaaagagggtacgacgatttgcaaacaattgttccaacctgtcagcagcaggatttctccattggttcgcagaagctttccaaggccatcgtgctccagaagactattgattacatccagtttctgcacaaggaaaagaaaaagcaggaagaggaagtctcgacattgagaaaggatgtaaccgcactgaagattatgaaagtgaattacgagcagattgttaaagctcatcaggacaatcctcatgagggagaggatcaagtgtccgaccaggttaaattcaacgtattccaaggaataatggactccttgttccagtccttcaacgcatccatttccgtggctagcttccaggagctgtctgcctgtgtctttagttggatcgaagaacattgcaaaccacagacccttagagagatagtgattggagtgcttcaccagctcaagaaccagctgtattag

SEQ ID NO: 194351 - DNA, 645 bp, synthetic construct
  misc_feature 1..645: note = Description of Artificial Sequence: Synthetic coding sequence
  source 1..645: mol_type = other DNA
atgaccgagcccggcgccagccccgaggacccctgggtgaaggtggaatacgcctattccgacaatagcctggatcccgacgatgaggattctgattatcaccaggaagcttacaaggagtcatataaggataggagaaggcgtgctcacacccaggcagaacagaagaggagagacgcgatcaaaagaggctacgatgatttacaaaccatagttcctacatgtcagcagcaagatttcagtatcggctcccaaaaactatctaaggcaatcgtcctccagaagactatagattacatccaattcctccataaggagaagaaaaagcaggaagaggaggtatccactctgcgtaaagatgttacagcactcaagatcatgaaagtcaactatgaacagattgtaaaagcacatcaggacaacccccacgagggtgaggatcaggtgagcgaccaggttaagttcaacgtttttcagggcattatggacagcctctttcagtcctttaacgcatctatttcagtagcaagtttccaggagctttcagcctgcgtgttcagttggatagaggaacactgcaaaccacagacgttacgtgagattgtgatcggagtgctacatcagctcaaaaatcagctgtattag

SEQ ID NO: 194352 - DNA, 735 bp, synthetic construct
  misc_feature 1..735: note = Description of Artificial Sequence: Synthetic coding sequence
  source 1..735: mol_type = other DNA
atgaccgagcccggcgccagccccgaggacccctgggtgaaggtggagtacgcctacagcgataactccctcgacccagggctgttcgtcgaatcaacccgcaagggaagcgttgtgtccagggcaaacagcatcggtagcacaagtgcttcctccgtacccaacaccgacgacgaagacagtgattatcaccaggaagcttacaaagaaagttacaaggaccggcgccgacgggctcacactcaggcagaacagaagcgtagagatgctatcaagaggggttacgatgatctccagaccatcgtaccaacgtgccaacaacaagatttcagcatagggtctcagaaactgagcaaagctatcgtactgcagaaaactatagattacatccagttcctgcacaaagagaaaaagaaacaagaagaagaagtgagcacactgcgaaaggacgtcactgccctgaagataatgaaggtgaactacgaacagattgtcaaggcccaccaggataatcctcacgagggggaggaccaagtttccgaccaggtgaaattcaacgtcttccagggtatcatggattcactattccagagctttaatgcttcaatttccgttgctagcttccaggaactctcagcctgcgttttttcttggattgaggaacactgcaaaccccaaacactgcgcgagatagtcatcggagtgctgcatcaattaaaaaaccagctctattag

SEQ ID NO: 194353 - DNA, 2826 bp, synthetic construct
  misc_feature 1..2826: note = Description of Artificial Sequence: Synthetic coding sequence
  source 1..2826: mol_type = other DNA
atggccgaggccaacccccggcggggcaagatgcggttccggcggaatgcagcaagtttcccaggaaatttacacttggtgctcgtgctgaggccaacgagcttcctccagcggacgttcaccgatattggcttttggtttagtcaggaggatttcatgcttaagctccctgtggttatgctctcatctgtcagcgatttattaacctacattgatgataagcagcttacacctgagcttggtggtaccctccagtattgtcattctgagtggatcattttcaggaatgccatcgagaatttcgccctgactgtcaaggagatggcccagatgctgcagagttttggaaccgagctggcagaaacggaactgcccgacgacatcccatccatcgaagagattctggcaatcagagctgagcgttaccacttgctcaaaaatgatattactgcggtgactaaggaggggaaaattcttctcactaatcttgaggtgcctgataccgagggtgccgtctctagccgactcgaatgtcaccgccagattagcggcgactggcagaccatcaacaaattgttaacacaggtacacgatatggaaacggccttcgatgggttctgggagaaacaccagttgaagatggagcagtatcttcagctctggaagttcgagcaggactttcagcagcttgtaaccgaggtcgagttcctgctcaatcagcaggctgaactcgccgatgtaaccggaacgatcgcccaggtcaagcagaagattaaaaaactggagaatctggacgagaatagtcaagaactactgagtaaggctcaattcgtcatcctgcatggccacaagctggccgctaaccaccactatgcactagacttgatttgtcagcggtgtaatgagctccgctatctgtccgatattctggtgaatgaaatcaaggctaagcgcatccagctcagcagaacattcaaaatgcacaagttgctccaacaggcccggcaatgctgcgacgagggtgagtgcctgttagcaaaccaagaaatagacaaatttcaatcaaaagaagatgcgcagaaggctctccaggacatcgaaaattttctcgaaatggcactgccctttatcaactacgaacccgaaacattacagtatgagtttgatgtgatcctgagccctgagcttaaggtccaaatgaaaaccattcagctcaaacttgagaatatcaggagcatatttgagaatcagcaggccggatttcggaatctggctgataaacatgtgagacccatccagttcgtggtgccgactccagagaatttggtgacctctggaacacccttcttctcttccaagcaggtgggtgtgggttattccttcttccaggcctgcaagctgttcagtaaaggcaagaagacctggagacaaaaccagagtaatcttaagattgaagttgtgcccgattgtcaggagaaaagaagtagcggtcccagctcttcactcgacaatggcaactcgctggatgtcctgaagaatcacgtgttgaatgagcttatccaaactgagcgagtatatgtcagagaactgtataccgtgctactgggctatagagctgaaatggataatcccgagatgtttgatctgatgcctcctctgttgaggaataagaaggacattctgtttggcaacatggcggagatctatgagttccacaatgacatcttcctttcttcactcgaaaactgcgctcatgcccccgaacgagtggggccttgcttcttggaaaggaaggatgactttcagatgtatgccaagtactgccagaataagcctcggtccgaaacgatctggaggaaatattccgagtgcgctttcttccaagaatgccaacgaaagctaaagcaccgccttagactggattcgtacttgctgaagcccgttcaacgcataaccaaatatcagttgctgttgaaagagctcttaaagtactccaaggactgcgagggatctgccctcctgaaaaaggcccttgatgcgatgttggacttactcaagagcgtaaatgatagcatgcatcagattgctattaacggctacattggaaatctgaatgaactggggaagatgataatgcagggagggttctccgtttggattgggcacaagaagggcgccacaaagatgaaagacttggccaggtttaagcctatgcaaagacacttgttcctctatgagaaagccatagtcttctgtaagaggcgggttgaaagcggcgagggatccgaccgctacccctcgtactcattcaagcactgttggaagatggacgaagtaggaattactgagtatgtcaaaggtgacaatagaaaatttgaaatctggtacggggagaaggaggaggtttacattgtgcaagcttcaaacgtcgacgttaagatgacctggctgaaggaaatacgaaatatacttcttaaacagcaagagctcctcactgtgaagaaacgcaaacaacaggatcaactgaccgagcgagataaatttcaaatatctctgcagcagaatgacgagaagcagcaaggagcatttattagtacagaggaaaccgaactagaacatacctccaccgtggtggaggtctgtgaggctatagcctctgtccaggcagaagccaacaccgtgtggaccgaagcaagtcaaagcgcggagatctctgaagagcccgctgaatggtctagtaactacttttatcccacctacgacgagaacgaggaggagaacaggcccctgatgagacccgtatcagagatggctttgctgtactag

SEQ ID NO: 194354 - DNA, 2583 bp, synthetic construct
  misc_feature 1..2583: note = Description of Artificial Sequence: Synthetic coding sequence
  source 1..2583: mol_type = other DNA
atggccgaggccaacccccggcggggcaagatgcggttccggcggaacgctgccagctttccagggaatctgcacctcgtgcttgtactaaggcctacatcattcctccagagaacattcactgacatcgggttttggttttctcaggaagactttatgctcaagcttccagtggtcatgctgagtagcgtctccgacctcctgacttatatcgacgacaaacagttgacccccgaactaggcgggaccctgcagtactgtcattctgagtggataatatttcggaacgccattgaaaactttgctctgacggtaaaagaaatggcccagatgttgcagtcatttggaacagagctggccgagaccgaactgccagacgatatcccgtcgatcgaagaaatcctcgcaatccgagcagagaggtaccatttgctaaagaacgacattactgccgttaccaaagaaggaaagattctgctgaccaatttagaagttcccgataccgaaggcgccgtctcgtccagacttgagtgtcatagacagatttctggggactggcagaccatcaacaagctgctcacacaggttcatgacatggagacagcatttgatgggttctgggagaagcatcagcttaagatggaacagtacctgcagctgtggaagttcgagcaggatttccagcagcttgtcacagaagtggagtttctcctgaatcagcaggcagagctggcagacgtgaccggaaccatcgcacaggtgaagcagaaaattaagaagctggagaatctggacgagaattctcaggagctcctgagtaaagcccagtttgtgatccttcacggccacaaactggccgcgaaccatcattatgcactggacctcatctgtcagaggtgtaatgagctgagataccttagtgatatactggtgaatgagataaaggcaaagagaatacaactgtcacgcaccttcaagatgcacaaattattgcagcaggcccggcagtgctgcgacgaaggagaatgtctcctggctaaccaggaaatcgataaattccagtccaaagaggatgctcagaaagctctgcaagacatcgagaatttcctggaaatggcccttccatttattaattatgagccggagacattgcagtacgaatttgacgtgatcctgagtcctgagctgaaggtgcagatgaaaacgatacaactgaagctggagaatattcgcagcatcttcgagaaccaacaggctggcttcagaaatctcgccgacaaacatgtcaggccaatccagtttgtggtgcctactccggagaacttggttacaagtggcacaccttttttcagttctaagcaaggaaaaaaaacatggaggcaaaatcaaagcaaccttaagatagaggtggtgcccgactgccaggaaaagcgatcgtctgggcctagttcttcgcttgataacggaaactcactggacgtactgaagaaccacgtgctcaatgaactcatacaaactgagagggtgtacgttagggaactctacacagtcttactgggttacagagctgagatggataacccagaaatgtttgatcttatgcctcctttattgcgcaataagaaggatatcctgtttggcaatatggcagagatctatgagtttcataacgatatttttctctcctctctcgagaattgtgctcacgcccccgaaagggtcgggccctgcttcttggagcgcaaggacgatttccagatgtacgctaagtactgtcaaaacaagcctcggagtgagaccatctggcgcaaatattccgaatgcgctttctttcaagagtgccagcggaaactcaagcatcgcctgcgtctggatagctacctcctgaagcccgtgcaacgcatcactaaatatcaacttctgctgaaagaactgttgaagtacagtaaagattgtgaaggaagcgcattgctcaagaaagctttggacgcaatgcttgatctcctgaaatccgtcaatgacagcatgcatcaaatcgccatcaatggatatattggaaacctcaatgaactcgggaagatgataatgcagggaggcttctctgtctggattggccataagaaaggagctacaaagatgaaggacctcgccagatttaaacccatgcagcgccacctgttcctgtatgagaaagccattgtgttttgcaaacgtcgcgtagagtccggcgagggctccgatagatatccctcctacagcttcaagcactgctggaagatggatgaggtcgggataaccgagtatgtaaaaggagacaaccggaaattcgagatctggtacggtgagaaggaggaggtatacattgtgcaggccagcaacgtggatgttaaaatgacctggcttaaggagattaggaatatccttctgaaacagcaagaactgctcaccgtgaaaaagaggaaacagcaggaccagctaacggaacgagacaaatttcagatttctctgcagcagaatgatgaggacctatgccgtcgttggctgtcatacatagacgaggcaaccatgagtaatggaaaatag

SEQ ID NO: 194355 - DNA, 2778 bp, synthetic construct
  misc_feature 1..2778: note = Description of Artificial Sequence: Synthetic coding sequence
  source 1..2778: mol_type = other DNA
atggccgaggccaacccccggcggggcaagatgcggttccggcggaatgccgccagcttcccaggcaatttacatctggtgttagtcttgagacccacttcttttttgcagaggactttcactgacattggcttttggttctcacaggaggattttatgctgaagctaccagtcgtaatgctgtcctctgtgagcgacctgctgacatacatcgatgacaaacagctgacgccagaactgggagggaccctgcagtattgtcattcagagtggatcatatttcggaacgccatcgaaaatttcgccctgaccgtaaaagaaatggcgcagatgctccagagttttggcacagagctggccgaaaccgagctaccggacgatatcccctccattgaggaaattctggcaattagagccgaaagataccaccttttgaaaaatgacatcaccgcggtcactaaagagggaaaaatccttctgaccaacctagaggttcctgacaccgaaggagctgtgagtagtaggcttgagtgtcatcggcagatttccggtgactggcagaccattaacaaactgctcacacaggttcacgacatggagacggcgtttgacggattctgggagaaacaccaattaaaaatggaacagtatctgcagctgtggaaattcgaacaggattttcagcagttggtgacagaagtggagttcctcctgaatcagcaagcggaattggccgacgttacaggcacgatagcccaggtgaagcaaaaaattaaaaaacttgagaacctagacgaaaattcccaggagttattgtctaaggcccagttcgtcatcctgcatgggcacaagttggcagctaatcatcactatgccttagaccttatttgtcagcggtgcaatgagctgagatatctctcagacatacttgtgaatgagattaaagcgaaaagaatccagttgtccaggacgttcaaaatgcataaacttctgcagcaagctaggcagtgttgtgacgaaggcgaatgcctgctggccaaccaggagatagataagttccagagtaaggaggacgcccagaaagccctccaggacattgagaatttcctggaaatggccctgcctttcatcaactatgagccggagacgcttcagtacgagtttgatgtcatactgtccccagaattgaaggtccagatgaagacaatccaacttaaactcgaaaatatcagatctatctttgagaatcagcaagccggattccggaacctcgctgataagcacgtacggcctatccagttcgtggtgccaacacccgaaaacctagtcactagcggaacaccgttcttcagctccaaacagggcaagaaaacctggcgacagaatcagtctaatctcaagatagaagtggtccccgattgtcaggaaaagagatcctctggcccaagttcttcactagataacggtaactcacttgacgtgttgaagaaccacgttcttaacgaacttatccagactgagagagtgtacgtcagagagttgtacactgtgctcctggggtatcgggccgagatggacaatccagaaatgttcgacttgatgccacctctactccgaaataaaaaggatatcctattcgggaacatggcagaaatatatgaatttcataacgatatatttttgtcctctttggagaattgtgctcatgctcctgagagggttggaccctgttttttggagcgcaaagatgatttccagatgtatgctaaatattgtcagaataaaccccgatctgaaaccatttggcggaaatacagcgagtgcgctttcttccaggaatgccagaggaagctcaaacacaggcttcggctggatagctatctcttgaagcctgtgcagagaattacgaagtatcagctgctccttaaggagctgttaaagtacagtaaagattgcgaagggtcagccctgctaaagaaggccctggatgcaatgctcgatctgctgaaatcagtcaacgatagcatgcatcaaatcgctattaatgggtacattggtaatctcaatgaactgggaaaaatgatcatgcaaggaggattcagtgtctggatcggccataagaaaggggccacaaaaatgaaagatctagcacgctttaaaccaatgcagaggcaccttttcctctacgagaaggccatcgttttctgcaaaaggcgggtggagtccggggaagggagcgaccggtatcccagttattcatttaaacactgttggaagatggacgaggtgggaatcacagaatacgtgaagggggataacaggaaatttgaaatctggtacggcgaaaaggaggaagtgtatatagtccaggcttctaacgtcgacgtcaagatgacatggctaaaggagatcaggaatatcctgctgaagcagcaggaactgctgaccgtcaaaaaacgtaagcaacaggaccagctgacggaaagagataaatttcagatctccctgcagcagaatgacgaaaagcagcagggagcctttatcagcacagaagagaccgaacttgaacacaccagcactgtcgtcgaagtctgcgaggctatcgccagcgtccaggccgaggcaaacaccgtttggactgaggccagccagtcagctgagatctccgaagagcctgctgagtggtctagcaactatttctatccgacatacgatgaaaatgaagaggagaaccggccactcatgagacctgtgtcagaaatggctcttttgtactag

SEQ ID NO: 194356 - DNA, 3213 bp, synthetic construct
  misc_feature 1..3213: note = Description of Artificial Sequence: Synthetic coding sequence
  source 1..3213: mol_type = other DNA
atgccccaggccgccgccagcgccccctggaccagcgtgagctgcggtcgaattccaggcctgccccagaacccagatggttgcacattcatgccaatcgctcaggcaattcctctacaggttgacatggcaatggccctccagagagtcaggattgcagagaaatatgggaagaactacctttgcttactgcaggcagtctttgtggccgagaccgatctgcttctgcggataaaggacatcagccactttctcatgcaagacattgccttccttagcggggggcggggaaaggacaatgcttggattatcaccttcccggagaactgtaatttcaggtgcatcccagaagaggttatcgcaaaagtcctgacgtatttaaccagtatcgctcgacagaatgggtccgatagtcggtttaccatcatcctggataggagactggacacctggtcctctctcaagattagcctgcagaagatttcagcaagttttccaggcaacctgcacttagtcttagtcctgagacccacctcttttttgcagcggacttttactgacattggattttggttcagtcaagaggattttatgttgaaattgccagtcgtcatgcttagctcagtaagcgacctactgacatatatcgatgacaagcagctgaccccagaactgggcggcactttacagtactgccacagcgaatggataatcttcaggaatgcaattgagaactttgcccttaccgtgaaagaaatggcccaaatgctgcagagctttggtaccgaactcgcagagaccgagcttcccgatgacatcccatcaatcgaggagatcctggctattcgcgctgaaaggtatcacttgctgaaaaatgatattaccgcagtcaccaaagaaggcaagatcttattgacaaatcttgaggtccctgacactgaaggagccgtgtcaagtcgcttagaatgccacagacagatcagtggtgattggcaaactataaataaactattgacccaagtccacgatatggaaaccgcattcgatggcttttgggagaagcaccagttgaagatggaacagtacctgcagctttggaagttcgagcaggatttccagcagctcgtcactgaggttgaattcctgcttaaccagcaggccgagttagcagatgtcaccggaacgattgcccaggtaaagcaaaagatcaagaaactggagaacctggacgaaaactctcaggaactcctctctaaggctcaatttgtaatcttacatggtcataagctggctgcaaatcaccattacgcacttgacctcatatgccagcggtgcaacgagttgcggtatctcagcgatatactcgtgaacgagataaaagccaagcggatacaactttctcgaacctttaagatgcacaagttactgcagcaggcacgccagtgctgcgacgagggtgaatgtcttctagcaaatcaagagattgataaattccaatcgaaggaggacgcacaaaaggcactgcaagatatcgaaaatttcctggagatggccctcccattcatcaattacgagccagagaccctgcagtatgagtttgacgtgatattgagccccgaactgaaggtgcaaatgaagaccatccagctgaagttagagaatatcaggtcgattttcgagaatcaacaggctgggtttcggaacctggccgataagcatgtgcgccccatacagttcgtagtgcctacccctgagaatctggtgacttctggtacgccttttttctcgtcaaaacaggggaaaaagacgtggcgacagaatcagtccaatttaaagatcgaggtggtccccgattgtcaggagaaacgaagcagtgggccttcttccagtctggacaatggaaactcattagacgtgctcaagaatcacgttctcaacgaactgatccagacagagcgggtctacgtccgcgagctgtacacagtgttgttaggttatcgcgccgaaatggacaatcctgagatgttcgatcttatgcccccactgctgagaaacaaaaaagatatactgttcggtaacatggctgaaatctatgagttccataacgatatcttcttgagctctttagaaaactgcgcccacgctccagagagggtgggcccttgctttctggagagaaaggatgattttcaaatgtacgctaagtactgtcagaacaaaccccgctccgagaccatctggcgcaagtactcagaatgcgctttctttcaggaatgccagcggaaattaaagcaccggctgagactggacagctaccttctgaagccagtgcagaggattacaaaatatcaactgctgttgaaagagctgctgaagtatagtaaggactgtgaaggtagcgccctgcttaagaaggccctagacgccatgcttgacttgctgaaatccgtgaatgatagtatgcatcagatagcaataaatgggtatattggaaatttgaacgaattgggcaagatgatcatgcagggcgggttcagcgtgtggatcggtcacaagaagggcgcaactaagatgaaggacctagctcgtttcaagccgatgcagcggcacttgttcttatatgaaaaagctatcgtgttctgtaagcgtcgagtcgagtccggcgaaggcagcgataggtaccctagctatagctttaaacattgttggaaaatggatgaagtcggaatcactgaatatgttaagggtgacaaccgcaaattcgaaatttggtacggcgaaaaggaggaggtttacatcgtgcaagccagtaatgtggacgtgaaaatgacatggctgaaagaaatccgcaacatcctcctcaagcaacaggaactcctgaccgtaaagaagagaaagcagcaggaccagttgactgaacgagacaaattccaaatctcacttcagcagaatgacgaaaaacagcagggcgccttcatctccactgaagaaaccgaactggagcatacatcgacagtagttgaagtgtgtgaagcgatcgcaagcgtgcaggcagaggccaatacagtgtggactgaggcttcacaaagtgctgagattagcgaagaacctgctgaatggtcgagcaactatttctaccctacttatgacgaaaatgaggaagagaacaggccgctgatgagaccagtgtcagagatggcactactttactag

SEQ ID NO: 194357 - DNA, 2958 bp, synthetic construct
  misc_feature 1..2958: note = Description of Artificial Sequence: Synthetic coding sequence
  source 1..2958: mol_type = other DNA
atgcaggacatcgccttcctgagcggcggccggggcaaggacaacgcatggataatcaccttccccgagaactgtaacttcaggtgcatcccagaagaggtcatagctaaggtgcttacttacctgacctcaatcgctcgccaaaatggttctgacagcaggttcaccatcatcttggatagaagactggacacttggtccagcctaaagatttctctgcagaaaatttcggcttcattccccggcaacctccatctcgttctcgtgctgcggcccacaagctttctccaacggacatttactgacattgggttctggttctcccaggaagactttatgctgaagctacccgtggtcatgctgtcttccgtgagtgacctcctcacgtatattgatgacaagcagctgacccccgaactgggtggaacattgcagtactgccattcagagtggattatttttagaaatgccattgagaacttcgcactgaccgtaaaagaaatggctcaaatgctccaaagttttgggacagagctcgcagaaaccgagctgcccgacgacattccttccattgaagaaatactggctatccgcgccgaacgatatcacctgctcaaaaatgacatcacagctgtcacgaaggagggaaaaatactacttacaaatctggaagtgcctgataccgaaggcgcggttagcagtagactcgagtgccataggcagataagtggcgactggcagacgatcaataagctgctgactcaggttcatgatatggagactgctttcgacggcttttgggagaaacaccagctgaaaatggagcagtacctacagctgtggaaattcgaacaagacttccagcagctggttaccgaggttgaatttctgctcaaccagcaggccgagttggcagacgtcaccgggaccattgctcaagtgaagcaaaaaatcaagaagctggaaaatctggatgaaaattctcaggagttgctcagtaaagcccagtttgtgattctccacggccacaaattggctgctaatcaccattacgccctggacctgatttgtcaaagatgtaacgaattgcgctatttgtccgacattcttgtcaatgagataaaggctaaacgcatccagctttcccgaacatttaagatgcataagctgcttcagcaagcccgccagtgctgcgatgaaggggagtgtctgcttgcgaatcaagaaattgataagtttcaatccaaggaggatgctcagaaagctctgcaggacatcgagaattttctcgagatggccttgccatttattaattacgaacctgagaccctgcagtacgaattcgatgtgatcctttccccagagctgaaagtgcagatgaagacaatccagcttaaactggagaatattcggtcgatttttgagaaccaacaagctggctttaggaatctggctgacaaacatgtgcggccgatccagttcgtggtccctaccccagaaaacttggtcaccagcggtacaccgtttttttcctcaaaacaggggaagaaaacatggcgccaaaaccagtccaacctgaagatcgaagtggtgccggactgtcaggagaaaaggagtagcggcccctcctcctccttggataatggaaatagcctggacgttctgaagaatcatgtgctaaatgagctgatccagacagaacgcgtgtacgtgcgggagctatacacggtgcttctggggtaccgcgcagagatggacaaccctgagatgttcgatctgatgcctcctctgttgcgcaataagaaagatatactcttcgggaacatggctgaaatctatgagttccataatgacatttttctgtctagtctggaaaactgtgctcacgcccccgagcgggtgggcccttgcttcctggaacggaaggatgactttcagatgtatgctaaatattgtcagaataaaccgaggagcgagacgatctggcggaaatatagtgaatgtgctttcttccaggaatgccaacggaagttgaagcaccggctgcggctagatagctacctcctaaagccagtgcagcgcattactaagtatcagctgttacttaaagaattattaaaatacagtaaagactgcgaaggttctgccctcctgaagaaggctctcgacgcaatgctggatcttcttaaatctgttaacgactcaatgcaccaaatcgccatcaatgggtacatcggcaacttaaacgagttagggaaaatgatcatgcaggggggcttttctgtatggataggccataaaaagggtgctacaaagatgaaagacttggctcggttcaagccgatgcagcgtcacctttttctatatgaaaaagctatagtgttctgcaaacggagagtggaaagtggagagggttctgaccgatatccctcttacagcttcaaacactgttggaagatggatgaggtcggtattaccgagtacgtcaagggcgacaaccgcaaattcgaaatctggtacggcgagaaggaagaagtgtacatcgttcaggcctctaacgtggatgtgaagatgacctggttgaaggagatcaggaacatcttactcaagcagcaggaactgcttacggtgaagaagcgcaaacagcaggatcaattgactgaacgtgacaagttccagatcagcctgcagcagaatgatgaaaagcaacagggagcattcataagcactgaagaaaccgaactcgagcacaccagcacagtggtcgaagtctgcgaggccatcgctagcgtacaggcggaggctaacacggtgtggaccgaggccagtcagtccgctgaaatcagcgaggagcccgctgagtggagctctaactacttttatcccacttacgacgagaatgaggaggaaaatcggcccctaatgcggccggttagcgagatggccctgctgtattag

SEQ ID NO: 194358 - DNA, 1290 bp, synthetic construct
  misc_feature 1..1290: note = Description of Artificial Sequence: Synthetic coding sequence
  source 1..1290: mol_type = other DNA
tgacacgtgctgaacgagctgatccagaccgagcgggtgtacgtgagagaactgtataccgtgctcctggggtatcgagcagagatggacaaccctgagatgtttgacctcatgcctccattactgagaaataaaaaggacatcctgtttgggaacatggcggaaatttatgagttccacaacgacattttcctctcttcactggaaaactgcgcacatgctccagaacgggtcggcccgtgcttcctggagcgcaaagatgatttccagatgtatgcgaagtactgccagaacaaacctaggagcgagaccatctggaggaaatactctgagtgcgcattctttcaggagtgtcagcgtaagctgaagcatagactgagactagattcttacctgctcaaaccagtacagcgtattacgaagtaccagctgcttctcaaggaactgctcaagtactccaaggattgtgagggatccgccctgctgaagaaggccctcgacgctatgctggatttgttgaaatcggtgaatgatagtatgcaccaaattgcaatcaatgggtacattgggaacctcaacgagctgggcaagatgatcatgcagggagggttttccgtgtggataggccataaaaaaggggccacaaagatgaaagatttagctagattcaaacccatgcagcggcacctatttctttatgagaaggccatagtgttctgtaagagacgtgtggagtccggggagggctccgaccggtacccatcatattccttcaagcactgctggaaaatggacgaagtagggataaccgaatacgttaagggcgacaacagaaagttcgaaatttggtatggcgaaaaggaggaggtttacattgtacaggcctcaaacgtagacgtgaagatgacgtggctgaaggagatccggaatatcttgctgaaacaacaggagctcttgacagtgaagaaacggaagcaacaggaccagttaaccgaaagagataaattccagattagccttcaacagaatgatgaaaaacaacagggcgcgttcatatccaccgaggagacagaactggagcataccagtactgtggtggaggtttgtgaagctattgcatccgttcaagcagaggccaataccgtgtggactgaggcttcacagagtgcggagatctcggaagagccagctgaatggtcctctaattatttctatcccacatacgacgagaacgaagaggaaaacagaccactcatgcggcctgtgagtgagatggcccttctgtattag

SEQ ID NO: 194359 - DNA, 1587 bp, synthetic construct
  misc_feature 1..1587: note = Description of Artificial Sequence: Synthetic coding sequence
  source 1..1587: mol_type = other DNA
gtgcagatgaagaccatccagctgaagctggagaacatccggagcattttcgaaaaccagcaggccggcttccgcaaccttgccgacaagcatgtacgaccaatccagttcgtggttcccacacccgagaatctggtaacttcaggaaccccatttttcagctcaaagcaaggcaaaaagacctggaggcagaaccagtccaatttaaagatcgaagtggttccagattgccaggaaaaacggtcaagcggcccttcgtcatccctggataatggcaactcactcgacgtgttgaagaaccacgttctgaacgagctgatccagaccgagagggtgtacgttagagaactttacacagtacttttggggtatagggccgagatggataatcctgaaatgtttgacctcatgccaccgttgttgagaaacaagaaggacatactatttggaaacatggctgagatctatgaatttcataatgatattttcctctccagcctggagaactgcgctcatgcgcccgaacgtgtgggcccatgttttctcgaacggaaggatgatttccagatgtatgccaaatattgccagaacaagcctagatctgagactatctggaggaaatattccgaatgcgcgttttttcaggaatgccagcgcaaactcaagcacagactaagactggacagctacctgctaaagcctgtgcagcgtatcactaagtatcagcttctgctgaaggagctgttgaaatactcaaaggactgtgaggggagtgcgctgctgaagaaagcacttgatgccatgctggatctgctgaagagcgtaaatgacagcatgcaccagatcgcgataaatgggtatatcggaaatctcaatgaactgggaaagatgatcatgcagggaggattttccgtgtggatcggccacaaaaagggcgccacaaaaatgaaggacctagcacggttcaagcccatgcagagacatcttttcctctatgagaaagcaatagttttctgtaaacggagagtggagagtggcgagggatctgatcgctaccccagctatagtttcaagcactgctggaaaatggatgaggtgggaattacagaatacgtcaaaggagacaacagaaaattcgaaatttggtatggcgaaaaggaagaagtgtacatcgtgcaggcatctaacgtggacgtgaagatgacctggttaaaagagatccggaacatactgctgaaacagcaggaactcctgactgttaagaaaagaaaacagcaggatcaactcaccgagagggataaattccagatcagtctccaacaaaatgacgagaaacagcagggtgcctttatctctaccgaagagaccgagttggaacacacatcaactgtggtcgaggtgtgcgaagcaatcgcatcagtccaagcagaggccaacacagtgtggaccgaagccagtcagagtgcagaaatatctgaggaacctgccgagtggagctccaactatttctatccgacatatgatgagaacgaggaagaaaatagacctttgatgcgcccagtttcagagatggccctgctttattag

SEQ ID NO: 194360 - DNA, 3006 bp, synthetic construct
  misc_feature 1..3006: note = Description of Artificial Sequence: Synthetic coding sequence
  source 1..3006: mol_type = other DNA
atgcaggacatcgccttcctgagcggcggccggggcaaggacaacgcctggatcattacttttccagaaaattgcaatttcagatgcatacctgaagaggtaatcgccaaggtgttgacataccttactagcatcgccaggcagaatggatctgacagccgcttcaccattattctggataggcgattggacacttggagttcgctcaagatatctttacagaagatttccgcctcttttcctgggaatctgcacctggtgctcgtgctccgccccacctcttttctgcaacggacctttacggacatcggattttggttttcacaggaagattttatgctgaagttgcccgtggtcatgctctccagcgtgtcagatctcttgacctatatcgacgataaacagttaacccctgagctggggggcactctgcaatattgccactcagaatggattatttttcggaacgccatcgagaatttcgccctcaccgtgaaagagatggcgcaaatgcttcagtcgtttgggacagaattggctgagaccgaactgcccgacgatatccccagcatcgaggagatactggccatccgagccgagaggtatcacttgctgaagaatgatattactgccgtgacaaaggaggggaaaattttgctgaccaatctcgaagtgccagataccgaaggggctgttagttctcgacttgagtgccatcggcagatcagcggggactggcagacaataaacaaattgctgactcaggttcatgacatggaaaccgcctttgacggcttttgggagaaacatcagctgaagatggaacagtatctgcaactttggaaatttgaacaggattttcagcagctcgtcacggaagtggaattcctcctaaaccagcaggcagagctggcggatgtgactggcaccattgcccaggttaagcagaaaataaagaaactggagaacctggatgagaacagccaggaactgctctccaaggcccagtttgtgatccttcacggacataagttggctgcgaaccaccactatgccctcgacctaatctgccagcggtgcaacgagctcaggtacctgtcagacattttggtgaacgaaattaaggctaagaggatccagctgtccagaacttttaagatgcacaaactgctccaacaggcacgtcaatgttgtgacgagggtgaatgtctactcgctaatcaggaaatagacaaattccagtctaaggaggatgcacagaaggccctccaggacatcgaaaattttctggaaatggccttgcctttcatcaactacgagcctgagaccctgcagtatgaattcgatgtgatcctgagccctgagctcaaagtccagatgaagaccatccagctgaagctcgaaaacatccgctctatttttgagaatcagcaggccggcttccgtaacttagctgacaaacatgtccgacccattcagtttgtcgtgccgacccctgagaatctggtcacgagcggcactccattcttttccagtaagcaggtcggagtgggctattctttttttcaggcctgtaaattgttcagtaagggtaagaagacatggagacagaaccagtctaatctgaaaatagaggtcgtgcctgactgtcaggaaaaaagatcctcaggcccgagcagttccctggataatgggaacagtctagatgtgcttaagaaccatgtcctcaacgaattgatccaaacagagcgggtctatgtccgcgagctctataccgtactactaggctatcgtgctgaaatggacaacccagagatgtttgacctcatgccgccactgctccgcaacaagaaggacattctgtttggaaatatggccgagatatatgagttccataatgacatcttcttgagcagtttggagaattgtgcccacgctccggaaagagttgggccatgcttccttgagcggaaagatgactttcagatgtatgctaagtattgccaaaacaagccacgctcagagactatctggcggaaatattctgaatgcgctttctttcaagaatgccagaggaagctcaagcacagactgaggctagactcatacctgctgaaacccgtgcagcgcatcaccaagtatcaattattgcttaaggaactactcaagtactcaaaggactgtgaaggctctgcactcctcaagaaggcgctggatgctatgctggacctgctgaagtcagtgaatgactcgatgcatcagatcgccattaacggatacatcggcaatttaaatgaactggggaaaatgattatgcagggtggatttagcgtctggataggccacaaaaagggcgcaaccaagatgaaggatcttgctcgctttaagccaatgcaacgccatttgttcctgtatgaaaaagcaatcgtcttctgcaaacgcagggtcgaatctggcgaagggtccgaccgctacccatcatactctttcaaacactgttggaaaatggatgaggtaggaattaccgagtacgtcaagggcgacaaccggaaattcgaaatatggtatggcgagaaagaggaagtgtacatcgtccaggccagcaacgtggatgttaaaatgacctggctgaaggagattaggaatatcttgttgaagcagcaagagttgctcacagtgaaaaagcgtaagcagcaggaccagctgactgagcgtgacaagtttcagatatccctgcagcagaatgacgagaagcaacaaggtgccttcatctctactgaggagactgaactggagcatacttctactgtcgtcgaggtttgtgaggccatagctagcgtacaggctgaagcaaacactgtgtggactgaggcaagtcagagcgccgaaatctcggaagagccagctgagtggtcatccaactatttctatcccacttacgacgagaatgaagaagaaaaccggcctctgatgagaccagttagcgaaatggccctgttgtattag

SEQ ID NO: 194361 - DNA, 2958 bp, synthetic construct
  misc_feature 1..2958: note = Description of Artificial Sequence: Synthetic coding sequence
  source 1..2958: mol_type = other DNA
atgcaggacatcgccttcctgagcggcggccggggcaaggacaacgcttggatcataacctttccggaaaactgtaacttcaggtgcattcccgaagaggtgatcgcaaaggtgctgacctatctgaccagcattgctcggcagaacggctccgattccagattcacgatcattttagacaggcgcctggatacctggtcatcgctaaagatctccctgcaaaagatctccgcaagtttccccggcaacttgcatctagttctcgttctgcggcccactagttttctgcaacgcaccttcactgacattggattctggttttctcaggaggacttcatgcttaagcttccggtcgtgatgctgtcaagcgtgtccgacttgctaacgtacatagatgataagcagctgacaccagagttgggcggtaccctccagtattgccattcagaatggattatctttagaaatgccattgagaattttgccctcacggtcaaagaaatggcacagatgctgcagtcgtttggaactgagctggcggagactgaactgcccgacgacatcccatcaatcgaagagatcctggccattcgagctgaaaggtaccacctgcttaagaacgacatcaccgcagtgacaaaggaaggaaaaatactccttacaaatctagaggtaccagacaccgaaggcgccgttagctcaagacttgaatgccaccgccagatctccggcgattggcagacaattaacaagctgctgactcaggtgcacgacatggaaaccgcttttgatggcttttgggagaagcaccagctgaagatggagcagtacttacagctttggaagttcgaacaggatttccagcagctcgtgacagaagtggaatttctgctgaatcagcaagcagagttggccgacgtgactggcacaatcgctcaggtgaagcaaaagataaagaaactcgagaacctggatgagaatagccaggaactgctatctaaagctcaattcgtcattctccatggacacaagttggccgctaatcaccattacgcacttgaccttatctgtcagcgctgtaatgagctccgctatctctccgacatattggttaacgagatcaaggccaaacgcatccagttaagtagaacgttcaagatgcacaagctcctacagcaggcgcgtcagtgttgtgatgaaggagaatgtcttctggcaaaccaagaaattgacaaattccagtcaaaagaggacgcgcaaaaggctctacaggacattgaaaatttcctggagatggccctgcctttcatcaattacgaacctgagacactacagtacgagtttgacgtcatcctatctcccgaattaaaagtccagatgaagaccatccaacttaaattggagaatatccgtagtatatttgaaaaccagcaggcgggatttcgtaatcttgcagataaacacgtccggcccattcaattcgtggtcccaactcccgagaatttggtgaccagtggcaccccgttcttttctagcaagcaggggaagaagacttggcgacagaaccaaagcaaccttaagatcgaggtagtgcccgattgtcaggaaaaaagatcgagtggaccctcaagctccctggataatggtaacagtctggatgtgttgaagaaccatgtccttaacgagctcatccagacagagagggtgtatgttcgggagctatataccgtcctcctgggatacagagccgaaatggataaccctgagatgtttgatctcatgccacctctcttaagaaataagaaagacatcctgtttggcaatatggccgagatatatgaattccataacgatatattcctttctagtttggaaaattgtgcccatgcaccggaacgagtcggcccttgttttctcgagaggaaggatgattttcagatgtatgccaaatactgtcaaaacaagccacgatctgaaaccatttggcggaaatattctgagtgcgcttttttccaggagtgccagcgaaagctgaagcatagactccgcctagacagctacttgctgaagcccgtgcagagaatcactaagtaccaactactactgaaagagctcctgaagtactccaaggattgcgagggttctgcactcttaaaaaaggccctagatgccatgttagacttgctaaaatcagtcaatgactcgatgcatcagatcgccatcaatgggtacatcggtaatctgaatgaattggggaagatgataatgcaggggggttttagtgtgtggattggccataaaaagggcgctacaaagatgaaagatttggctcgctttaaacccatgcagagacacctttttctgtacgagaaagcgatcgtgttctgtaagcggagggtcgagagcggcgaaggctccgataggtatccttcttatagcttcaaacactgctggaaaatggatgaagtggggatcacagaatacgtaaaaggggataatcgaaagttcgaaatctggtatggcgagaaggaagaagtttacattgtgcaggccagcaatgtggacgtcaaaatgacctggctgaaggaaatcagaaacatcctcctgaaacagcaggagttgttgactgttaagaaaagaaagcagcaggaccagctgactgagcgcgataaattccaaatttccctgcagcaaaatgacgagaagcaacaaggggctttcatctcgaccgaggagacggaactggagcatacctcgactgtggtggaggtgtgcgaggctattgcaagcgtccaggccgaggcaaatactgtgtggacagaagccagccaatctgctgaaatttcagaagagccagctgagtggtccagtaattacttctacccaacctacgatgaaaacgaagaagagaaccggcccctgatgcgcccggtgagcgaaatggctctgctgtattag

SEQ ID NO: 194362 - DNA, 2466 bp, synthetic construct
  misc_feature 1..2466: note = Description of Artificial Sequence: Synthetic coding sequence
  source 1..2466: mol_type = other DNA
atggccgaggccaacccccggcggggcaagatgcggttccggcggaatgccgccagcttccctggcaacttacacttggtgcttgttctgcggcccacctcctttctgcagagaacattcaccgacattgggttctggttctcacaggaggacttcatgttgaaacttcctgccattgagaacttcgcactgactgtcaaggagatggcgcagatgctccaatccttcggtacggagttggctgaaaccgaacttcccgacgatatcccaagcatcgaagagatcctggcaatcagagcagagagataccatctcctgaagaacgatattactgctgtgacaaaggaggggaagattctcttgactaatttggaagtgcctgataccgaaggcgctgtatcaagtagactagagtgtcatagacagatctccggggattggcagacaataaataaactcctgacccaagtgcatgatatggagactgccttcgacggcttttgggagaagcatcagctcaagatggagcagtatttgcagctttggaagtttgaacaggatttccagcagctggtgaccgaagttgaatttctcctgaatcagcaggccgaactggctgacgtgactggcacgatcgcccaggttaagcagaaaattaagaagctggaaaacctcgacgagaatagccaggagctgctctctaaggctcagttcgtgatcctgcacggccacaaactagcagccaaccaccactacgctctggatctgatatgtcagaggtgcaatgagcttagatacttaagtgatattctggtgaacgagatcaaagccaagcgtattcaactatcccggaccttcaagatgcacaaactgctgcaacaggcacgccagtgctgtgatgaaggcgagtgcctgcttgcaaatcaggaaattgacaagttccaatcaaaggaggacgcacagaaagcccttcaggacattgaaaattttctggaaatggctctgccatttattaactacgagcccgaaacactccagtatgagttcgatgtcattctctctccagagcttaaggtacaaatgaagactatacagttgaagctcgaaaacattcgttcaattttcgagaatcagcaggcaggatttaggaatcttgcggacaagcatgtaagacctattcagtttgtggtccctactccagaaaatctggtaacctcaggcacccccttcttcagctctaagcagggcaagaagacctggagacagaaccagtccaatctgaaaattgaggtggttcctgactgccaggagaagagatcatcagggccatcatcttccctggacaatggcaattctctggatgttctcaaaaatcacgtcctgaatgaactaatccagacagagcgtgtttacgtccgggaactgtatactgtcctgctgggctatagagcggagatggataatccggagatgttcgacctgatgccccctctactgcggaacaaaaaggacattctattcgggaacatggccgagatttatgagttccataatgatatattcctttcaagccttgagaactgtgcgcacgcccctgagcgggtgggcccttgtttcctggaaagaaaggacgacttccagatgtacgccaaatactgccagaacaagccaaggtccgagactatctggcggaagtattccgagtgtgccttttttcaagagtgtcaacgaaagttgaaacatcggctccgactggactcctacttgctcaaacccgttcagcgcataaccaaataccaactccttcttaaagagctccttaagtattcaaaggattgtgaaggctcggccctactaaagaaagctctggacgccatgttggaccttctcaaaagcgttaatgactcaatgcaccagatagctatcaatggctatataggcaacctgaatgagctgggaaagatgattatgcagggcggtttctccgtctggatcggacacaaaaagggcgctactaaaatgaaagatctggcacggtttaagccaatgcaacgccacctttttctctacgaaaaggctattgttttttgcaaacgcagggtggaatctggcgagggcagcgacaggtacccaagttattcgttcaaacattgttggaaaatggatgaagtggggattaccgagtacgttaaaggtgacaacagaaaatttgagatttggtatggggagaaagaggaagtctacatcgtgcaggcaagtaatgtggatgtgaagatgacatggctaaaggagattcgaaatatactgttaaaacagcaggagctgctgaccgtgaagaaaagaaagcagcaggatcaactgaccgagcgagacaaatttcagatcagtctgcagcagaatgacgaggatctgtgccgtcgctggctgtcttacattgatgaagccactatgtcaaatgggaaatag

SEQ ID NO: 194363 - DNA, 2955 bp, synthetic construct
  misc_feature 1..2955: note = Description of Artificial Sequence: Synthetic coding sequence
  source 1..2955: mol_type = other DNA
atgaccgtgcggcggctgagcctgctgtgccgggacctgtgggccctgtggcttcttctgaaggctggtgctgatgaaataatgcaccaggatatcgtcccactgtgtgctgctgacatacaagaccagcttaaaaaaaggtttgcttatctctcaggcggcaggggtcaggacgggagccccgtgattacatttccagactatcccgctttttccgagatcccagacaaggaattccaaaatgtgatgacatacttgacatccattccctccttgcaggatgccggtatcggcttcattctggtgatcgaccgcagacgcgataagtggacttctgtgaaagcttctgtgctgcgcatcgctgcctccttcccggctaatttgcagctcgtcctggtgctccggcccacaggtttcttccagcgtactctctcagatatcgctttcaaattcaaccgtgacgactttaagatgaaggtgccagtgattatgctttcaagcgtaccggacctccatggctatatcgacaaatcgcaattaaccgaagacctcggtggtaccctggattactgccactcaagatggctatgccagcgaacggccatcgagagctttgccctgatggtcaaacagacagcccagatgctgcaatcattcggcacggagctcgcagagacagagctacctaacgatgtgcagtcaacctcttccgtgctgtgcgcccacacggaaaagaaggataaggcaaaggaggacttacgactggcattaaaggaggggcatagcgtgctggagagcctgcgggaactacaagcagaaggatctgaacccagtgtcaaccaggatcagcttgataaccaagcgacggtccagaggctgttggctcagctgaatgagacagaagcagcgttcgatgaattttgggctaagcaccaacaaaagcttgagcaatgcctccagttgcgccatttcgaacagggctttcgcgaggtgaaggctatacttgatgcagcgtctcagaaaatcgccacgtttacagacattggcaatagtctcgctcacgtcgaacacctgctgcgtgatttggcatcctttgaagaaaaaagtggcgtagcagtcgaaagggcaagggcgcttagtttggacggagaacagctcatcggcaataagcactatgctgtagatagtattcggccaaagtgccaggagttgcggcatctgtgcgaccagttctctgctgagatcgctcgcaggaggggtcttctcagcaagtctcttgaactccacagacgactagaaaccagcatgaagtggtgcgatgagggcatctacctcctcgcttctcagcctgtggacaaatgccagagccaggacggggccgaagctgcactgcaggaaattgagaaattcctggaaacaggtgccgaaaataagatccaggagcttaacgcaatctataaggaatatgagtctatcctaaaccaggatctgatggagcatgtccgcaaagttttccaaaaacaagctagcatggaagaggtgttccaccggcgccaggcaagcttaaaaaagctggctgccaggcagaccaggccggtgcaacctgtcgccccccgcccggaagctctggctaaatcgccatgcccgtctcccgggatccgcaggggatcagagaacagttcatcagaaggaggggcgctgagacgtggaccttaccgcagagcaaagtctgagatgtccgagtctcgccagggcagaggttcagccggggaagaggaagagagcctggccatcttgcggcgccatgtgatgtcagagttgcttgatactgaaagagcgtacgtagaggaactcctgtgcgttctggagggttacgcagctgaaatggacaacccactcatggcgcatctgctaagcacaggtctccataataagaaagacgttttgttcggaaacatggaagaaatctaccattttcataacagaatctttttgcgggagctggagaattacaccgactgtccggagcttgttggcaggtgttttctcgaaagaatggaagactttcaaatctatgaaaagtattgccagaataagcccaggagcgagagtctgtggaggcagtgcagcgactgcccctttttccaggaatgtcagaggaaacttgaccataagctcagcctagatagctacttactgaaacccgtccagagaatcaccaaatatcagttattgcttaaggagatgctaaagtacagccggaattgcgagggtgccgaagacctccaggaggctctgtccagtatcctcggaatccttaaagccgtgaacgattcaatgcacctcattgccattacaggatatgacggcaacctgggcgacttaggcaaactactaatgcagggctcattttcggtatggacggatcataagagaggtcacactaaagttaaagagctggcgcgcttcaagccaatgcaacggcacttgtttctgcacgaaaaggctgtactcttctgtaagaaacgagaagagaacggcgaagggtatgaaaaggctccctcttactcatacaagcagtcattgaacatggcagctgtcggcattactgagaatgtgaaaggggacgctaagaagtttgaaatctggtataacgcaagagaagaggtgtacatcgtgcaggcccccacgcctgaaattaaggcggcttgggtgaacgagatcaggaaggtgctaacgagtcagctgcaggcatgtcgggaagcttcccagcaccgggcactggaacagagtcagagcctacccttacctgctcccacatctacgtccccctctaggggcaattctaggaatattaagaagttagaggaacgaaagacagatccactcagtttagaagggtacgtaagcagcgcccccttgacaaagcctcccgaaaaagggaaagagccttag

SEQ ID NO: 194364 - DNA, 3390 bp, synthetic construct
  misc_feature 1..3390: note = Description of Artificial Sequence: Synthetic coding sequence
  source 1..3390: mol_type = other DNA
atggccgagaagggcgccagccggggcaccctgcggcggctgtggtctttgcctaggcgaaggcgcggaacggcaggccgcagcagaccggatgaaattatgcatcaggacatcgttcccctgtgcgcagcagacatccaggaccagcttaagaaacgattcgcgtacctatctggcgggaggggacaggacggcagccccgtcataacttttccagactacccagccttcagcgagatccctgacaaggaatttcagaatgttatgacgtaccttacgtccatcccttctcttcaagatgcgggcataggattcatactggtgattgacaggagacgcgacaagtggacgtccgtgaaggcgtccgtgctgcggatagccgcatccttcccagcaaacctgcagctggtattagtactcagacccactggcttcttccagcgtaccctgagcgacatcgccttcaaatttaaccgggacgattttaagatgaaggtacctgtcatcatgctgtcgagcgttcccgaccttcacgggtatatagataagtcccagctcactgaggacctgggcggcacattggactattgtcacagtcggtggctctgtcagaggacagccatcgagtcatttgctcttatggtcaaacagaccgcgcagatgctgcagtccttcgggacagagcttgccgagaccgagcttcctaacgacgtccaatccacctcctctgtgctgtgcgcacacacggaaaagaaagacaaggcaaaggaggatttgcgactggcattgaaggaaggacactctgtgctggaatctctgcgagagttacaggccgaaggcagcgaaccttcggtgaatcaggaccagctggacaatcaagctacagtgcagcgcctgctggcccagctgaatgagactgaagcagcttttgatgagttctgggccaagcaccagcagaaactggagcagtgcctccagctcaggcattttgaacagggttttcgagaggtcaaggcaattctagacgccgccagtcagaagatcgccacattcaccgatattggcaacagtctggcccatgtggagcacctgctgcgggatctcgcaagttttgaggagaaaagcggggtggccgtcgaacgagccagggccctgagcctggacggcgagcagctgatagggaacaaacactacgcagtggattcaatccgtccgaagtgccaggaattacgtcatctgtgcgatcagtttagcgccgagatcgcacgacggaggggcttgctgtcaaagtcattagaactgcataggagactagaaacctcaatgaaatggtgcgacgaggggatctacttgctggcttctcagcctgtggacaagtgtcagtcccaggacggcgctgaagccgcgcttcaggagattgagaaatttctcgaaacaggcgccgagaataaaatccaggagcttaacgcaatttataaggaatacgagagtatcctaaatcaagatcttatggaacatgtccgcaaagtgtttcagaaacaggcgagcatggaagaagtcttccatcggcgccaggccagtctgaaaaaactggctgcacggcaaactaggcccgtccagcccgttgccccgaggccagaagcactggcgaaaagtccctgcccaagccctggtatcagaagaggatccgaaaatagtagttccgaaggaggggctttgcggcgcggcccctatcgccgcgcaaagtccgaaatgagtgaaagcagacagggcaggggaagtgccggggaggaggaggagtccctggcaatccttcggcggcacgtgatgtctgaactcttggacaccgagagagcttacgtcgaggagcttctctgcgtgctggagggttatgcagccgagatggataatccactgatggctcatcttttgagcacggggctgcataataagaaagacgtcttgttcggaaatatggaagaaatctaccactttcacaatcggattttcctgcgtgagttggagaattacacggattgccccgagctggtggggcggtgtttccttgagaggatggaagacttccaaatctacgagaaatattgccagaataagcctagatctgaaagtctctggagacagtgctcggactgtccttttttccaggagtgtcaacgcaagctggatcataaactatccctggattcctaccttttgaagcccgtgcagagaatcactaagtatcagctactgttgaaggaaatgcttaaatattccagaaactgtgagggcgccgaagatctgcaggaggctctatctagtatcctcggaattctgaaagcagttaacgatagcatgcacctgattgccattaccggctatgatgggaacttaggcgacttggggaaacttctgatgcagggatccttcagtgtgtggaccgaccacaagagaggtcacaccaaggttaaggagctggctaggttcaagcccatgcagcgccacttgtttctccacgaaaaggcggttctattctgtaagaaaagggaagagaacggcgagggatacgagaaagcccctagttatagctacaaacagagccttaatatggctgctgtgggcattactgaaaacgtaaagggcgacgctaaaaagttcgagatttggtacaatgcccgggaggaagtttacattgtgcaggccccaacacctgagataaaagcagcgtgggtcaacgagatcagaaaagtgctgacctcgcagttgcaggcctgtcgcgaggcttctcaacaccgagcgctcgaacaaagtcagagcctgcctctgcccgcacccacgagcacttcaccttcgcgtggcaactcccgcaacatcaaaaagttggaggaaagaaagactgatcctctctcactcgagggttacgtctctagcgcccccctgaccaaacccccggagaaaggaaaaggatggtccaaaacaagtcattcactggaggcccccgaggatgatggcggttggtccagtgccgaggagcagattaattcctccgacgctgaggaggatggcgggttaggtcctaagaagttggttcctgggaagtatactgtagtagctgatcacgagaaaggcgggcctgacgcattaagagttagatctggagatgtggtggagctggtgcaagagggagatgagggactgtggtacgtcagggacccaactacgggtaaggaaggatgggtccctgcctcatccttgtcagtgaggcttgggccatccgggtccgcgcagtgcctgtcatctagcgagtcctcccccggcagcgctgtactgagcaattcaagctcttgctcagaaggcggtcaggcccccttttccgaccttcagggatag

SEQ ID NO: 194365 - DNA, 3549 bp, synthetic construct
  misc_feature 1..3549: note = Description of Artificial Sequence: Synthetic coding sequence
  source 1..3549: mol_type = other DNA
atggcccgggtggagagccccgtgcccgccgcccgggccagcctgactggaagctgcgtgctcggccaggcaatgccgttgaggggaggcgccgggccctcccccgcgtcacacggccctacgcatggcccatccgaccctcgcacctgtctccctggacgcggcgccggcggcatgaggccacacgggaggggagccttgggatgctgcggattgtgctctttttacacatgccatggcgccgccggagatgagatcatgcaccaggatattgttcctttgtgcgcagctgatatccaggatcaactcaagaagaggttcgcatatctttccggtggtcggggtcaggacggaagtcctgttattacatttcctgactaccccgccttcagcgaaattccagacaaagagtttcagaatgtgatgacttatctgacctctattccatccctgcaggacgccggaatcgggttcattctcgttatagataggcggagggataagtggaccagcgtgaaggcttcggtgctgcgaatagccgctagttttccagccaatcttcagctggtgctagtcctgcgcccaactggatttttccaaagaaccctgtctgacatcgcttttaagtttaacagagatgacttcaaaatgaaggtaccagtaattatgctgtcgagcgtccctgacttacatggctacatcgacaagtcacaattaacagaagacctgggcggcaccttggattactgccacagtaggtggctgtgccaaaggacagctatcgaatctttcgctctcatggtgaaacagacagcacagatgctgcagtcatttggcaccgaactggccgaaacggaactccctaatgatgttcagtctaccagctccgtattgtgtgcacacacagaaaagaaggataaggcaaaggaggatctgaggctagccctcaaggagggacattcggtcctcgagagtctccgcgaactccaagcagagggcagcgagcctagtgtgaaccaggatcagcttgataatcaagctactgtacagaggctgcttgcccaattgaatgagaccgaggctgcattcgatgagttctgggccaaacaccaacagaaactggaacagtgcctgcagcttcgccactttgagcagggattccgggaggttaaggccatcctggacgctgcttctcagaagatcgccacgttcacggatatcggcaattctctggcacacgtggaacacctgttgagggatctggcctccttcgaggaaaagagtggagtagctgtcgagcgcgcgagagccctgtctttggatggtgaacagttgattggcaataaacactacgcagtagactctattaggcctaagtgccaggagctacgtcatctttgcgaccagtttagtgcagagattgcacgtaggcgtggtttgctgagcaagtcactagaactgcatagacgtcttgaaacctcaatgaagtggtgtgatgaggggatctatcttttagcctcgcaacccgtcgataaatgccaaagtcaagacggagcagaagccgcactgcaagagatcgaaaagtttttggagacaggcgccgagaacaaaatacaagagctcaacgctatttataaggagtatgagagtattctgaatcaggacttgatggaacacgtcagaaaggtttttcagaagcaggcgtctatggaggaagtctttcaccggaggcaggcttctctgaaaaaactggccgcgagacagacaaggcccgtacagcccgtagctccaagacctgaggccctggcaaaaagcccctgtcctagccctggtatccggagagggtccgagaatagttcttccgaaggaggcgctttaagaagaggcccatataggcgcgcaaaatcggagatgtctgagagcagacaaggccgggggtcagcgggcgaagaggaggaatctctcgctattctccgcaggcatgttatgtcggaactcttagatactgaaagggcgtatgtggaggagttgttgtgtgtgttggaggggtatgctgccgaaatggacaatcctctgatggcccacctcttgtcaaccggactgcacaataaaaaagacgtgctattcggaaatatggaagagatatatcacttccacaacagaatcttcctgagggaactggagaactatactgactgtcctgagctagtgggccggtgcttcctagagagaatggaagacttccaaatctatgaaaaatactgtcaaaacaagcccaggtctgagtcattgtggcggcagtgcagtgattgccccttcttccaggagtgccaaaggaagctcgatcacaagttatcactggatagctatctgcttaagccagtacagagaattacgaaataccagttattgttaaaagagatgttgaagtacagccgcaattgtgaaggtgctgaagatcttcaggaggctctttcttccattctcggcatattgaaagcagtgaatgacagcatgcatctgattgcaatcacagggtatgatgggaacttgggcgatctcgggaagctgttgatgcaagggagtttcagcgtatggactgaccacaaacggggacacactaaggtgaaagaacttgcccgcttcaaaccaatgcaacgacacctgttcctgcacgagaaagctgtactgttttgcaaaaagcgggaagagaatggagaaggctatgaaaaagcaccgtcctactcatataaacaatccttgaatatggctgctgtcgggatcaccgagaatgttaaaggcgacgccaagaagtttgaaatttggtacaacgccagagaggaagtctatattgtgcaggcacccaccccggagatcaaggccgcatgggtgaatgaaattaggaaggtgctgacctctcaactccaagcatgccgagaagcatcccaacatagagcactagagcaatctcagagtctgcctctgcccgcaccaacgtctacctcaccaagtcgtgggaatagtcggaacattaaaaagctggaggagcggaaaacagaccccctgtctctagaggggtacgtttccagcgccccgctgactaagccacccgagaagggcaagggctggtccaagacgtcgcactcgctagaagcgcctgaagatgacggggggtggtctagcgccgaggagcagatcaactctagcgacgctgaggaggatggaggtctcgggcccaaaaaactggtgcccggaaagtacactgtagtagccgaccatgaaaagggcgggcccgatgcactgcgggtaagatctggcgacgtggtggagttagtccaagagggggacgaagggctatggtatgtcagggatccaaccaccgggaaagagggttgggtccccgcctcttcactttccgtaagacttgggcccagtgggagcgcgcagtgtttaagtagcagcgaatcttcacctggatccgcggtgctcagcaactcttctagttgcagcgagggcggacaggccccgttcagcgacctgcaaggatag

SEQ ID NO: 194366 - DNA, 3414 bp, synthetic construct
  misc_feature 1..3414: note = Description of Artificial Sequence: Synthetic coding sequence
  source 1..3414: mol_type = other DNA
atgttcgactgctggcggttcatcctgtgcaagcggcccggcagcaattcgtactctagcccacaaaggcctaacgaagctaagaaagaagagactgatcatcagatcgacgtctccgacgtgatccgattagtccaagatacaccagaagcaaccgcaatggcgactgacgagatcatgcatcaggacatagtccccctgtgcgccgcggacattcaggaccagctgaagaagcggtttgcctacttgtcaggcgggcggggccaggatgggtccccagtcattacttttccggattacccagctttctctgaaatcccagacaaagagtttcagaatgtgatgacctatctcaccagcatcccaagcctgcaggacgccggtatcggttttattctggtgattgaccggaggcgggacaaatggacgtctgtcaaagcatcagtgcttaggatcgccgctagcttcccagctaatctgcagctagtcctcgtacttcgcccaacagggttctttcaacgaaccttatcggacattgcatttaaattcaatagggacgatttcaagatgaaagttcccgtgataatgctaagtagcgtccccgacttgcacggctatattgataaatcccagttaaccgaggacctgggcggaacgctggactattgccacagcagatggctttgccagcggacagctatagagtcttttgccttaatggtcaagcaaactgctcaaatgctacagtctttcgggaccgaattggccgaaactgagctgccgaatgatgtacagagtacctcaagtgtcctgtgtgcccacaccgagaaaaaggacaaagccaaggaggatctcaggctagccttgaaagagggacactcagtgttggagtccctccgggagctgcaggccgaaggatctgagcccagcgtgaaccaagaccagcttgacaaccaggccaccgtgcaaaggctgctcgcccaacttaacgaaactgaggccgctttcgacgagttttgggcgaaacaccaacagaagctggagcagtgtctgcaactgcgccactttgagcagggatttagagaagtgaaagccatactggatgccgccagtcagaagatcgcaacattcaccgacattggcaatagtctcgcacacgtggagcacctgttaagagatttagcctccttcgaggagaagagtggcgttgccgtggagcgggcaagggcactgtccctggatggggagcagttaataggaaacaaacattacgccgttgacagcatcagacccaagtgtcaggaactgaggcatctgtgcgatcaattttccgcagaaatagcccggaggcgggggttactttctaaatccctggaactacaccggagactcgagacctctatgaagtggtgcgacgagggaatttacctgcttgctagccagccagtggataagtgccagtcccaagacggcgccgaggcagcactgcaggagatcgagaagtttcttgagaccggcgctgagaacaaaatccaggaacttaatgccatctacaaagaatacgagagcatattgaaccaagatcttatggagcacgtgagaaaagtctttcaaaagcaagcatcaatggaagaagtctttcacagacgccaggcctcacttaaaaagctggccgcgcgccagacacgacccgtacagccggttgccccccgacctgaggcattggccaaatccccatgtccttccccaggtattcgtcgcggatcagaaaattcatcatcggagggaggcgcactccggagagggccatacagacgggccaagagcgagatgagcgagtcccgacagggtcgggggagtgcaggggaggaggaggagtccctcgccattctgaggagacacgtaatgagcgagctgctggacaccgagcgcgcatatgtggaggaacttctctgcgtcctggaaggctatgccgctgaaatggataacccactgatggcccacctgctgagcaccggtctccacaacaagaaagacgtgctcttcggaaatatggaggagatctaccattttcacaatcggattttcttgagggagctggagaactacaccgactgtcctgagctggtgggccgctgttttttggagcgaatggaagacttccagatctacgaaaagtactgtcagaataagcccagatccgagtctctgtggcgccaatgttcggactgtcctttcttccaagaatgtcagaggaagctagaccacaagttgtctttggacagctatctgttaaaacccgtgcagaggattaccaaatatcagcttctgcttaaagagatgctcaaatattccaggaactgtgagggtgctgaggatttgcaggaggcgctctcctccatcctggggattctaaaggccgttaacgacagcatgcacctgatagcaatcacgggatacgatggcaacctgggagacctaggaaaattgctgatgcaagggtccttttctgtgtggacggatcacaagcggggacacacaaaggttaaagagctggctcgcttcaagcccatgcagaggcacttgtttttgcatgagaaagctgtgctcttctgcaaaaagcgcgaagaaaacggagaaggctatgagaaagcaccaagctacagctataaacagtcactgaacatggctgccgtgggcataaccgagaacgtgaagggtgacgccaagaagttcgagatctggtacaatgccagggaagaagtgtacatcgtacaggcaccgacgcctgaaataaaggccgcatgggtgaacgagatcaggaaggtactgacgagccaactccaggcctgcagagaggcatctcaacaccgtgcgctggagcagtctcagtcattaccgctgccggcacccacatccactagtccatctaggggaaactctcggaacatcaagaagcttgaggagaggaagaccgaccctctgagtctggagggttacgtgtcgtccgcaccgctaacaaaacctcccgagaagggtaaggggtggtcgaagacatcacattccttggaggcacccgaagacgacggtggctggtcaagcgctgaggaacaaataaatagctccgacgccgaagaagacggaggtcttggcccgaagaaactggtccctgggaagtatacagtagtcgcagatcacgaaaaagggggcccggatgctctccgagtgaggtccggtgacgtagtagaattagtccaggaaggcgacgagggactttggtatgtcagagatcccaccactggcaaggagggctgggttcccgcttcttctttgtctgtgagactaggtcccagcgggtcagcccaatgcttgagcagctcaggaaaagcacatgtgcccagagctcatccctag

SEQ ID NO: 194367 - DNA, 2382 bp, synthetic construct
  misc_feature 1..2382: note = Description of Artificial Sequence: Synthetic coding sequence
  source 1..2382: mol_type = other DNA
tgaagccagaagatcgccaccttcaccgacatcggcaacagcctggctcacgttgaacaccttctcagggatctagctagtttcgaagagaagtccggcgtggccgttgagcgggcccgcgcactctctttggatggagagcaactgatcgggaataagcattatgcggtcgactctataagacctaagtgtcaagagctccgccatctctgcgatcagttttcagccgagatcgcccggagacgtggcttgctgtctaagtccctggaactgcaccgcaggctggagacaagcatgaagtggtgcgacgaaggcatctacctgctcgcttcgcagcccgtcgacaagtgtcaaagccaggacggagccgaggccgcactgcaggagatcgaaaaattcctggaaacgggggcagaaaacaaaatacaggagttaaacgcgatctacaaggagtacgaatcaattttgaaccaggatctgatggagcacgtgcgcaaagtcttccagaagcaggccagtatggaggaggtgttccaccgccgtcaggcatctctgaaaaagctggcagcacggcaaactcggcccgtccagccagtggcaccacgccccgaggctcttgcaaaaagcccctgtccatctcctgggattaggcgcggaagcgaaaactcttcatccgaagggggagccctgcggcggggcccttatcgccgggcgaaatctgaaatgagcgaatcaaggcaggggcgcgggtcggccggagaggaggaagagagccttgctatcctgcgtcgccacgttatgagcgagcttcttgacacagaaagagcctatgtagaggagctcctctgcgtgttggaaggttacgcagcggagatggataatccactcatggctcatctgctgtcaacaggactgcacaacaagaaagacgtgctcttcggaaacatggaggagatttatcactttcataaccggatcttcttgagggaactggaaaattacacggattgcccagaacttgtgggcagatgcttccttgagcgaatggaagactttcagatctacgagaaatactgccagaacaagcctcgctcggaatcattgtggagacaatgtagtgactgtcccttctttcaggagtgccagcgaaagctggatcataagctgtctctcgacagctacctgctaaagcccgtccaaagaattactaagtatcagctgcttctcaaagaaatgctaaaatactctcgcaactgcgaaggagctgaagacctgcaagaggctctctcgtccatcttgggtatacttaaggccgttaatgatagtatgcatttaatcgccattactggctatgacggaaacttgggggacctgggaaagctactcatgcagggctccttctccgtgtggactgatcataaacgcggacataccaaggtgaaggagttagccaggttcaagccaatgcagagacatctgttcttgcatgaaaaagcggtgctgttctgtaagaaaagggaagaaaacggcgagggctacgaaaaggcaccaagctactcgtacaaacagagtctgaacatggctgcagtggggataacagaaaacgttaaaggggatgcaaagaaattcgaaatttggtataatgccagggaggaggtttacatcgtccaagctccaacaccagagattaaggcagcttgggttaacgaaatccgtaaggtgttaacgtcgcaactgcaagcctgcagagaagcctctcagcacagggccctcgaacagtcacagagcctgccccttcccgccccaacctcgacctctcccagcagaggcaacagcaggaatatcaaaaagttggaagagaggaaaacagacccactttccctggaagggtacgtgtcaagcgcccccctgaccaaacctcccgaaaaagggaaggctagtcccacatcacctgataagaaagctaaacgccacgaggtgaagagcgaccccacacctttcggagtccggggttggagcaaaacatcccacagcctggaagcccccgaggacgatggaggttggagcagcgccgaagagcaaattaactctagcgacgctgaagaagacggtggtctagggcctaaaaaacttgtccccgggaagtatactgtcgtggccgaccacgaaaagggtgggccggacgcacttagggtcagaagtggcgacgtggttgagctcgtgcaagagggggatgaggggctgtggtatgtgagggatccaacaaccggcaaggaggggtgggtaccagcgtcctctttatcagtcaggcttggaccgagcggctccgctcagtgcctcagctcttcgggcaaggcccacgtgcctagggcacatccatag

SEQ ID NO: 194368 - DNA, 3291 bp, synthetic construct
  misc_feature 1..3291: note = Description of Artificial Sequence: Synthetic coding sequence
  source 1..3291: mol_type = other DNA
atgcccctgcggggcggcgccggccccagccccgccagccacggcccaacacacggacccagcgaccctaggacatgcttacctggccggggtgccggcggtatgcgcccccacgggcggggcgcacttggctgttgtggcctttgttctttttatacctgccatggtgctgcaggcgatgagatcatgcaccaggacatagttccactgtgtgccgcagatattcaggaccaactgaagaagaggttcgcttaccttagcggcggcagaggccaggatgggagcccagtcatcactttccccgattaccccgcattttccgagattcccgacaaagaatttcagaacgtgatgacctatcttacctccatccctagcctacaagacgcgggaatcgggttcatactggtcattgaccggcgccgcgacaaatggacttcggtaaaagcctcagtgttgcggatagctgctagctttcccgcaaacctccagcttgtccttgtgcttcggcccacaggattcttccagcggacgttgtcagacatagcattcaagttcaaccgcgacgactttaagatgaaggttcctgtgatcatgctgtccagcgttccagatcttcatggttatatcgataagtcacagctgaccgaagacctgggcggcacgctggactactgtcactcccggtggttgtgccagaggacagccatcgagagttttgctttgatggtaaaacagaccgctcagatgctccagtccttcggcactgagctcgctgagacagagctccctaacgatgtccagtcaacctcttcagtactatgcgcccacaccgaaaaaaaggacaaagccaaggaagatttacgactcgcactgaaagagggacactccgtactggaatccctccgggagctgcaagccgaggggagcgagcccagcgtcaaccaggaccagctggataaccaagccactgttcagcgattgttggcacaactgaatgaaactgaagcagcctttgacgagttctgggccaaacaccagcagaaactggagcagtgtcttcagcttcgtcacttcgagcagggtttcagggaggtcaaagcgatcctcgatgccgccagccagaagattgccacgttcactgatattgggaatagcctagcccatgttgagcatctgttgagggacctggcaagcttcgaggaaaaatcgggtgtagccgttgagagggccagggcactgtcgcttgatggggaacaactcatcggcaataaacattacgctgtggattccattcgacccaaatgtcaggagctgcgtcatctgtgcgaccagttttccgcggaaatcgctcgaagaagaggtctcctgtcaaagtctctcgagctgcaccggaggctggagacatccatgaagtggtgcgatgagggaatatacctccttgcaagccaaccggtggataaatgtcagtctcaggatggggccgaggcagccttgcaagagatcgagaaattcttggaaaccggagccgagaacaagatccaggagttgaatgcgatctacaaggagtacgagagtatcttgaatcaggatctgatggagcatgtgaggaaggtgttccagaaacaggcaagtatggaggaggtgttccacaggcgccaggcctcactaaagaagttggcggctcgccaaacaaggccggtccagcccgtggctcccaggccagaagccctggctaaatctccctgtcccagccccggtattagacgtgggagcgagaactcctcttctgaggggggagctcttaggcgtggcccctacagacgggctaagagcgagatgtcagaatctagacagggtagggggagcgccggcgaagaggaggagtcactggccatcctaaggcggcacgtcatgagcgagttattggacacggagcgcgcttatgtcgaagagctgctgtgcgttttggaaggctatgccgcggaaatggataatccactgatggctcacttactctcaacgggactgcataacaagaaggatgtgcttttcggtaatatggaggaaatctatcacttccacaatcgcattttcctgcgagaacttgagaattataccgactgccctgaattggttggtcgctgctttttggaaagaatggaagatttccagatttatgagaagtattgccaaaacaagcctagatccgaaagcctgtggcgtcagtgttctgactgtcccttttttcaggaatgccaaaggaagcttgaccataaactcagtctggattcctaccttcttaaaccagttcagcgtatcacgaaatatcaactgctgctgaaggagatgctcaaatactcccggaactgcgaaggagccgaagaccttcaagaagctctgtcaagtatcttgggcatcctgaaagctgtgaatgattcaatgcatctaatcgctattaccgggtatgatgggaaccttggcgatctgggcaagttactcatgcagggctctttctccgtgtggactgaccacaaacgaggccacacaaaggtgaaggaactggccagatttaagcctatgcaacggcatctgtttttgcatgagaaggccgtgctcttttgcaaaaagagggaggaaaatggtgagggatatgagaaggctcccagctacagttacaaacagagcctgaatatggcagccgttggtattaccgagaatgttaagggggatgccaaaaagttcgagatctggtataatgcccgcgaagaagtctacattgtgcaggctcccactcccgaaatcaaggccgcctgggtgaatgagatccggaaggttctgacttcccagttacaagcttgtcgtgaagcaagccagcacagagcactcgagcagagccagtcattgccactgcccgctcctacatcaacaagcccaagcaggggaaattccaggaatattaagaaactcgaggaacggaagacggaccctttgagcctggaggggtacgtgtctagcgcacccctgacaaagcccccagagaaaggtaagggatggtctaaaacttcccactcactcgaagcccctgaggatgatggtggctggtcctccgcagaggagcagatcaattcttcggacgcagaggaagacggagggctgggtcccaaaaagctggtgcccggaaagtatacagtggtggccgaccacgaaaaaggagggccagacgctttgcgcgttaggtcaggagatgtcgtggaacttgtgcaggaaggtgatgaaggtttgtggtag

SEQ ID NO: 194369 - DNA, 411 bp, synthetic construct
  misc_feature 1..411: note = Description of Artificial Sequence: Synthetic coding sequence
  source 1..411: mol_type = other DNA
atgcaccaggacatcgtgcccctgtgcgccgccgacatccaggaccagctgaaaaagcgattcgcatatctgtccggagggcgggggcaggacggatcccccgtcataactttcccagattaccctgcgttcagcgagattcccgataaagaattccagaacgtgatgacctatttaacgtccattcccagcctgcaggatgctggcatcggattcatcctggtgattgaccgaaggcgggacaaatggacgtccgtcaaagcttctgtcctgagaatcgcagcatcgttcccagccaatttgcagctggtacttgttctccgtccaaccggcttcttccaaagaactctgagtgacatcgctttcaagtttaacagagatgatttcaagatgaaagttcccgttatttag

SEQ ID NO: 194370 - DNA, 3372 bp, synthetic construct
  misc_feature 1..3372: note = Description of Artificial Sequence: Synthetic coding sequence
  source 1..3372: mol_type = other DNA
atgaccgtgcggcggctgagcctgctgtgccgggacctgtgggccctgtggctgcttctgaaagctggcgctgacgaaatcatgcaccaggacatcgtgccattgtgcgccgccgacatccaggatcagttgaagaaaaggtttgcctacttgtcagggggaaggggccaggatgggtcacccgtaatcacttttcctgactacccagccttcagtgaaatcccagataaagagttccagaatgtcatgacatacctaacgtctatcccgagcctgcaggacgctggtattggtttcattcttgtcatcgaccgccgtcgggataaatggacctcggtgaaggcatcggtactgcgcattgccgctagctttcccgccaatcttcaactggtgctcgtgctgcgaccaacaggtttcttccagagaaccctttcggatatagcatttaaattcaaccgcgatgacttcaagatgaaggtccctgtgattatgctttccagcgtgcccgacttacatggctacatagataagtcgcagttaactgaagacttgggtggcacgctcgattactgccacagtcgatggttgtgccagaggactgctatcgaatcattcgctctaatggtgaagcagaccgcccagatgttacagtcttttggtacagaactagccgagaccgagcttccaaacgatgtacagtcaacctcatcagtgctttgtgctcatacagagaagaaggataaagctaaagaggacctcaggctggccttaaaggagggacattcagtgctggagagtctgagggaattacaggccgaaggttctgaacccagtgtaaaccaggaccagctggacaaccaagccaccgtccaacggttattggcccagcttaatgaaaccgaagctgcttttgacgaattttgggccaaacatcaacaaaagctggagcagtgcctgcagctgaggcacttcgagcaaggatttagagaagtgaaggccatactggatgcagctagccagaagatcgctacgtttactgacataggaaatagcctggctcatgtggaacacctgttgagggatttggcctcatttgaggagaaaagcggtgtcgccgtggagcgagctagggcgctgagcctcgacggcgaacagttaatcggcaataaacactacgcggtcgatagcatacggcctaaatgtcaggagctgcgccatctttgcgaccagtttagtgccgaaattgcccgcaggcgagggctcctgagcaaatctctcgaattacataggcgccttgagacgtctatgaaatggtgtgatgaaggaatttacctcctggcttcccaaccagtggataagtgccaatcgcaggacggggcagaggccgctctgcaagaaattgaaaagttcctggagactggcgctgagaacaagatccaagagctgaatgccatctataaggaatatgaatccatcctcaaccaagaccttatggaacacgtgagaaaagtcttccagaagcaagcctccatggaggaggtgttccacagacgccaggcctccctcaaaaaactggccgccagacagacccggcctgttcagccggttgctccaagacccgaagccttagctaagtctccatgtcccagtcccggcatcagacggggcagtgagaatagttccagcgaagggggtgcccttcggagagggccctataggagagcgaagagcgagatgtctgaaagcagacaggggaggggaagtgccggcgaagaggaggaatctctggctattctgcggcgtcatgttatgtctgaacttctggatacagagcgcgcttacgtcgaagagctgctctgtgtactggaggggtacgccgccgagatggacaatcctctcatggcacatctgttgtccacaggactccacaacaaaaaggatgtcctcttcggaaacatggaggagatttaccacttccacaatagaatttttctgcgggagctggaaaactataccgattgccctgagctcgtcggtaggtgtttcttggaacggatggaggattttcagatctacgagaagtattgtcaaaataagccccgctctgaatcgctgtggaggcagtgcagcgactgcccattttttcaggagtgtcagcggaaactggatcataaactgtctcttgactcatatttacttaaaccggtgcagcggatcaccaaatatcagttgcttctcaaagagatgctaaaatactcccgcaattgtgagggggccgaagaccttcaggaagctcttagcagtatccttggcattctgaaggccgtgaatgattccatgcatttaatagcaatcactggatatgatggaaatctgggtgacttgggaaagctcctgatgcagggatctttcagcgtttggacagatcacaagagaggtcacaccaaggtgaaagagctcgcccggtttaagcctatgcagcgccatctgttccttcacgaaaaggccgtgctgttttgtaaaaaaagagaagagaatggagaaggatatgagaaggcccctagctattcttacaagcagtcattaaatatggctgcagtgggcattaccgaaaacgtgaaaggagacgccaaaaaattcgaaatttggtataatgcgagagaagaagtatacattgttcaggcccccaccccagagataaaagcagcatgggtaaacgagatcaggaaagtgctgactagtcagctgcaggcatgccgagaggccagccagcacagagctttggaacagtcgcagtcgcttcccctgcctgcccctacctctacgagccccagcagaggcaattcccggaacatcaaaaaactggaggaaaggaagacagatcccctgagcctggaggggtacgtcagctcagcgccactaacgaagcccccagagaaaggcaaggggtggtctaaaacttctcatagcttggaggcgccagaggatgatggcggctggtcctctgctgaagagcaaatcaactcaagcgacgcagaggaggacgggggattgggacccaaaaagctggttcccggcaaatacacagtggttgccgaccacgagaagggtggccccgatgcgcttcgcgtgaggagtggcgacgtagttgagttagtgcaggagggcgacgagggtctgtggtatgtcagggatcctaccacagggaaagaagggtgggtgcccgcaagctctctatctgtccgactggggccttctggcagcgctcaatgccttagctcctctgaatcttcacctggctcagctgtgctatcaaattcttcgtcttgctccgagggtggccaagccccattcagcgacctccagggctag

SEQ ID NO: 194371 - DNA, 741 bp, synthetic construct
  misc_feature 1..741: note = Description of Artificial Sequence: Synthetic coding sequence
  source 1..741: mol_type = other DNA
atgcggttctggctgcggaccgaggagatggccctggaggagatggtgcagcgtctgaatgccgtgtcaaaacatacggacgaaattatgcaccaggatatagtacctctctgtgcggctgacatccaagatcagctgaagaaacggttcgcctatctgtccggggggaggggccaggatggtagccctgtcatcactttccctgactaccctgcattttcagagattccggacaaggagttccagaatgtgatgacctatctgacgtcaataccatctctgcaggatgctggcatcggcttcattttggtaattgacaggcgccgtgacaagtggacgtcagttaaggcatctgtgctgagaatcgctgcaagctttcccgcaaacctccagctggtgcttgttttgcgacccaccgggttttttcaacgcaccctgtcggatatcgctttcaagtttaatcgggatgattttaaaatgaaggtgcccgtgatcatgctgtcatccgtgcccgacctacacggatatattgacaagagccaactgacagaggatctgggtggtaccctggactattgtcacagtagatggctatgccaaaggacagccatcgagtcgtttgccctcatggtcaaacaaacagcccaaatgctgcagtcctttggaactgaattggctgaaactgagctccccaatgatgtgcaaagtacctcttccgttctgtgtgcccacacggagtag

SEQ ID NO: 194372 - DNA, 3342 bp, synthetic construct
  misc_feature 1..3342: note = Description of Artificial Sequence: Synthetic coding sequence
  source 1..3342: mol_type = other DNA
atgggcgacggcaaggccgtgcggatcagcgtggccgagatgaagagttattatctgtacagcgagtggtgcagctggcttctcagcgttgccgaggatgagatcatgcaccaggacatcgtgcctctgtgcgcagccgacatccaggatcagctcaagaagcgctttgcctatctctccggcggcagaggccaagacggctctcccgtgattacttttccagattaccccgcttttagcgagattcctgataaggaattccagaatgttatgacttatctgacaagtataccctctttgcaggacgccgggatcggcttcatcctcgtaatcgacagacgtcgtgataagtggacgagcgttaaggcatctgtgctgaggatcgctgcatcgttccccgcaaatctacagctggtgctggttctccggcctaccgggttcttccagcgtactctgtctgacatcgcattcaagtttaatcgggacgatttcaagatgaaggtgcctgtgattatgttgagttccgtcccggatcttcacggttacatcgacaagagccagttaaccgaggatcttgggggtaccctggattattgccactccagatggctctgtcaacgcaccgccatagagtcatttgccctgatggtcaagcagacagcacagatgctgcaatcattcggaactgagctggccgagacggaactacccaatgacgtacagtctacctcaagcgtgctttgtgcacatactgaaaagaaggacaaggccaaagaggatctgaggcttgcgctcaaagaggggcacagtgttctggagagcctcagagagttacaggcagaaggtagcgagccttccgtcaaccaggaccagcttgacaatcaagccacagttcagcggctgttggctcagctgaatgagactgaggctgctttcgacgaattctgggccaaacaccagcagaaattggagcagtgtctgcagttgagacatttcgaacagggatttagagaggtcaaggcaatactggacgcagcgagccaaaaaatcgccactttcacggacatagggaactcactagcacacgtcgaacacttgttgcgggatcttgcctctttcgaggaaaaatccggggttgcagtggagcgggccagggccctgtccctcgatggtgaacagctcattgggaataagcattatgccgtggactcaatccgacccaagtgccaagagctgcgccacctgtgtgatcagttttccgctgagatcgctaggaggcggggcctgctctcgaaatctcttgagttacatagacgactcgagaccagcatgaaatggtgcgacgagggaatctatcttctcgcgagtcagcccgtggacaagtgtcagtcccaggacggcgctgaagccgcactccaggagatcgaaaaattcctcgagacgggtgcggaaaacaagatacaggagttaaacgccatctataaagagtacgaaagcatcctgaaccaagacctcatggagcacgtccgcaaagtcttccagaagcaggcctctatggaggaggtatttcatagacggcaggcctccctcaaaaaattagctgcgcgccagaccaggccagtccaacctgtggcccctcgacccgaagcactggcaaaatccccgtgtccttcacctggtattcggagaggcagtgagaacagcagcagcgaaggcggtgccctgagaagaggcccctacagacgcgctaagagtgagatgagcgagtcaagacaaggaaggggttccgctggagaggaggaggagagtcttgcaatcctacggcgtcacgttatgtcggagcttctcgatactgaacgggcttatgtggaagaactgctgtgtgtgctggagggatacgcagctgagatggataacccacttatggcccatctgctgtccaccggattacacaacaaaaaggatgtgttgtttgggaacatggaagaaatttaccatttccataacaggatttttctgcgagaactagaaaactatactgactgccctgagctagttgggagatgttttctggagcggatggaggacttccagatctacgagaaatattgccagaataagccacgcagcgagagcttgtggaggcagtgcagcgactgtccattcttccaagaatgtcaaaggaagttagatcacaagctgtccctggattcttatttattgaaacccgttcaaagaattaccaagtaccagctgttgctgaaggaaatgctcaagtactcccgtaattgcgaaggggccgaggatctacaggaagcgctttcctctatactgggcatcctcaaagcggtcaacgatagcatgcacctcatagctattacagggtacgacgggaacctgggagatctcggtaagctgctgatgcaggggtcattttccgtatggaccgaccacaagaggggacacaccaaagtgaaggagctggcgcggttcaaacctatgcagcgtcacctgttcctccacgaaaaggctgttctgttttgtaaaaagcgggaagagaatggcgaaggatatgagaaggctcccagttattcatataagcagtcgctgaacatggcagccgtcgggattaccgaaaatgtgaagggagatgctaaaaagttcgagatctggtataatgctcgtgaagaagtgtatatcgttcaggcaccaaccccagaaatcaaggccgcctgggttaatgaaatccgcaaggtcctcacatctcaactgcaggcctgccgagaggcaagccagcacagagcccttgaacaaagccagagtctcccgcttcctgcccccacgtccactagcccctcacgtgggaactcccggaatataaagaaattggaagaacggaaaaccgatccattaagcctggaaggttacgtgagttccgcacccctaacgaaaccacctgagaaagggaagggctggagcaagacctcccactccctggaagctccggaggatgatggcggttggagctcagccgaggagcagatcaacagtagtgatgctgaagaggacggcgggttaggccccaaaaaactggtgcccggaaagtacacagtggtagccgaccacgagaagggcggcccagacgccctccgcgtgcggagtggtgatgttgtggagctcgtgcaggagggggatgagggcttgtggtacgtacgcgaccccaccacaggcaaggagggctgggtgccagcatcatcgctgagcgtgcggctgggacccagcggatctgcacaatgtctaagcagctccggaaaggcccatgtccctagagcacacccttag

SEQ ID NO: 194373 - DNA, 2712 bp, synthetic construct
  misc_feature 1..2712: note = Description of Artificial Sequence: Synthetic coding sequence
  source 1..2712: mol_type = other DNA
ctgaagatgcccgtgatcatgctgagcagcgtgcccgacctgcacggatatatcgacaagtctcagctgaccgaggatttgggaggcacgctggattactgccatagtcgctggttatgccagcggacagccatagagtcttttgcactgatggtcaagcagactgcccagatgttgcagagctttggcaccgagcttgccgaaacagagctgccaaatgacgtccagtcaacaagttctgttttatgcgcccacactgagaagaaagacaaggccaaggaggatctgcggttggcactcaaggagggtcacagcgttctggagagtcttcgcgaattgcaggccgaaggcagcgagccctcagttaaccaggaccagctcgacaatcaggcaaccgttcagcgcctattggcccaactgaacgaaaccgaggcagctttcgatgaattttgggcgaaacatcagcagaaacttgaacagtgcctccagctgcggcactttgaacagggcttccgtgaggtgaaggctatcctggatgccgccagtcagaagatcgccacattcacggacattggtaactctttggctcacgtggagcatctcctccgcgatttggcatcgtttgaagaaaagtccggagtggccgtcgaacgagctcgtgcgctgtccctggatggcgagcagctgataggcaacaagcattatgctgttgactcgatacgccccaagtgccaggaattgaggcatctgtgtgaccagtttagtgccgagatcgcccgccgccgagggctcctttcgaagtcgctcgagctgcacagaaggctggagacatccatgaagtggtgcgacgaaggcatttatcttcttgcctctcagcccgttgacaaatgtcaatcccaagacggagccgaggccgccttacaggagatcgaaaaatttttggaaacaggagccgagaataagattcaagaacttaatgctatctacaaggaatatgagtctatattaaatcaagacctgatggagcacgtgcgcaaagtgtttcaaaagcaagcatccatggaagaagttttccacaggagacaggcttcactgaagaagctggcagcgcggcagactcggccagtgcaaccagttgccccccgccctgaagccctggctaaatcaccctgtccctccccaggaattcgacgcggaagtgaaaattccagcagcgagggcggtgccctgagacggggcccataccggcgggccaagagcgagatgtcggagagtcggcaggggcggggtagtgcgggcgaagaggaagaatctctggccatcctgcgacggcatgtgatgagtgagctgctcgatactgagagagcttacgtggaggagctgctctgcgtcctggaaggatacgcagccgagatggataaccccctgatggcccacctcctctccacgggacttcacaacaaaaaggatgtactctttggcaacatggaagaaatctatcatttccacaacagaatattcctccgggagcttgaaaattacacagattgcccggagctggtgggacggtgttttttagagagaatggaagatttccaaatttatgagaaatactgccagaacaagccacgcagtgaatctctatggaggcagtgttcagactgccctttctttcaggagtgtcaacggaagctcgatcataagttgagcttggactcatacttgctgaagcccgtccagcgaattacaaaataccagctactgttaaaagaaatgctgaaatactctagaaattgcgagggcgccgaagacctgcaggaggccctctcgtcaatcctgggaatcctgaaggcagttaatgactcgatgcacctaatagctattacaggatacgatggcaacctcggtgatctcggtaagctgctaatgcagggtagcttcagcgtgtggactgaccataaacggggccataccaaggtgaaagaactggcccgctttaagcccatgcagagacatctcttcctgcacgagaaagcagtcttattttgcaaaaagagagaagagaacggcgaggggtatgagaaagcccctagctactcctacaagcagagcctgaatatggccgccgtggggataaccgagaacgtcaagggagacgccaagaagttcgaaatatggtacaatgccagagaggaagtctacatcgtacaggcccctacacctgagatcaaagcagcctgggtgaacgagattcgcaaggttcttacctcccaattgcaagcatgtagggaggcgagccagcacagggctcttgagcagtctcaatctttacctctgccagccccaactagtaccagccccagtaggggtaacagcagaaatatcaagaaacttgaggagagaaaaacggaccccctatcattagaagggtacgtgagctcagcaccactcacaaaacctcccgaaaagggcaagggatggtcaaagacatcccattccttagaggcccccgaggatgacgggggatggtcctctgcggaggagcagatcaatagtagcgatgctgaggaagatggtggactggggcctaagaaattggttccaggaaagtacaccgtggtggcagatcatgagaagggaggcccagatgcactcagggttcggtcgggtgatgtcgtggagcttgtccaagaaggggacgaaggactgtag

SEQ ID NO: 194374 - DNA, 3414 bp, synthetic construct
  misc_feature 1..3414: note = Description of Artificial Sequence: Synthetic coding sequence
  source 1..3414: mol_type = other DNA
atgttcgactgctggcggttcatcctgtgcaagcggcccggcagcaattcttattctagtcctcagcggcccaacgaggcaaaaaaggaagagacagaccatcagatagatgtctcggacgtaattaggttggtccaggatacccccgaagctacagcgatggctacagacgagattatgcaccaggacatcgtgccactctgcgctgctgatatccaggatcaactcaaaaagaggtttgcctacctgagtggcggccgaggacaggacggcagcccggtaatcacatttccagactatcctgctttttcggagatccccgacaaagaattccaaaacgtgatgacctaccttacctcaattccctcactgcaggatgccggcattggatttattctggtgatcgacagacggcgcgataaatggacatcagtcaaggcttccgtcctccggatcgccgcttccttcccagctaatctgcagctggttctcgtgcttcggcccactggctttttccaacggacactctccgacatcgctttcaagtttaatagagacgacttcaagatgaaggtgccggtgataatgctcagttctgtgcccgaccttcatggctatattgacaagagtcagctgactgaggacctagggggaactctggattattgtcacagccggtggttatgccagaggacagctatcgaatccttcgcactgatggttaaacagaccgcccagatgctccagtcatttggaacggagcttgccgaaacggagttgcctaatgatgttcaatctacttcctccgtcctgtgcgcccacaccgaaaagaaagataaggctaaagaggatcttcgactagctctgaaagaaggccacagcgtgctggaaagtctgcgagaactccaggcggagggatccgagccgtccgtcaatcaagaccagctggacaaccaggctaccgtgcaacgcctgctcgcccagctcaacgagacagaggccgcatttgacgaattttgggcaaaacaccagcaaaagcttgagcaatgcctgcagctgagacacttcgagcagggcttccgcgaagtgaaggctatattagacgctgcttcccaaaagatcgcaacttttacggatatcggaaatagcctagctcatgtggaacacctgctcagagatctcgcatcttttgaggagaagtccggtgttgccgtggaacgggcgcgtgctctgtcactggatggagagcagctcatcggcaacaaacactacgcagtagacagcatccgcccgaagtgtcaggagctccgccacctttgcgatcagtttagtgctgaaattgccaggcgcagagggctgttgtcaaaatcccttgagttacacaggagactagagacatccatgaagtggtgcgatgaggggatctatttactggccagccagcccgtcgacaagtgccaatctcaggatggagcagaagccgcactccaggagatagaaaagttcctggagacgggcgctgaaaacaagatccaggagctaaacgccatctacaaagagtacgaaagcatcttaaatcaggacctcatggagcacgttagaaaagtattccagaagcaagccagtatggaagaggtctttcatcggcgccaagcctccctcaaaaagctggcagcccgacaaacacggcccgtccagcccgtagctccccgacccgaggctctggccaaaagtccatgtccctccccaggaattcgccggggatcagaaaatagctcaagtgagggaggcgccctccggcggggcccgtacagacgagccaagagcgagatgtcggaatcaagacagggaaggggaagtgccggtgaagaagaggagagccttgctatcctgcgacgacacgttatgtccgagctgctggacaccgagagggcatacgtggaagaactgctctgtgtcttggagggctacgccgccgagatggacaaccctctcatggctcaccttttatccacaggtttacacaacaaaaaagatgtcctgtttgggaatatggaggagatctaccattttcacaatcggatctttctccgcgagctcgagaattacacggactgcccagagctggtgggaagatgctttttggagaggatggaggactttcaaatttacgagaaatactgccaaaacaagccgcggagcgaatcgctgtggcgccaatgtagcgactgcccattctttcaggagtgtcagcgcaaactggaccataaactttccctggattcttacctcctgaagcccgtacagcgtattactaagtatcagcttctgctaaaagaaatgctgaagtactcaaggaactgcgagggggccgaagacctgcaagaggcattgtcttcaatcctgggaatcctgaaagccgtcaacgactcaatgcacttgatagcgatcacaggctatgatggaaacctcggggacctgggtaagcttttgatgcagggctctttttctgtgtggacagatcataagagagggcataccaaggttaaggagctcgcccgcttcaaacccatgcaacgccacttgttcttgcacgaaaaagccgtgttgttctgcaaaaagagagaagagaacggcgaaggttatgaaaaagctcctagttattcatacaagcagagcctgaacatggcagctgtaggcatcacagaaaatgttaagggcgatgccaagaagtttgagatttggtacaatgcccgcgaagaggtgtacatcgtgcaagcacctacgcctgaaattaaggcagcttgggtaaatgagattagaaaggtgctcacctctcagctgcaggcgtgcagagaggcctcacagcaccgcgctcttgagcagtcccaaagcttgcccctgcccgcccctacttctacctcacctagtaggggcaacagcaggaatatcaagaagctggaagagcggaaaaccgatccgttgtctcttgagggctacgtgagtagtgctccgctgacaaaaccccccgaaaagggaaagggatggtctaagacctcccactccttagaagcgccggaagatgatggaggatggtcttctgccgaggagcaaatcaattcttccgatgccgaagaggacgggggtttgggcccaaagaagctggtcccaggaaaatacactgtcgtcgccgatcacgaaaagggtggtccagatgctctgcgagtacgtagcggtgacgtcgttgaattggtgcaggaaggtgacgaaggcctctggtacgttagggacccgaccaccgggaaagagggttgggttcccgcttccagcctgagtgtgagactgggacctagtggctctgcccagtgcctctcatctagcggaaaagcccatgtgccccgcgcccatccctag

SEQ ID NO: 194375 - DNA, 3378 bp, synthetic construct
  misc_feature 1..3378: note = Description of Artificial Sequence: Synthetic coding sequence
  source 1..3378: mol_type = other DNA
atgcggttctggctgcggaccgaggagatggccctggaggagatggtgcagcgcctcaatgccgtgagtaagcatactgacgagataatgcaccaggatattgtgcccttgtgcgcagcagacattcaggatcagttgaagaagcgctttgcgtatctgtccggcgggcgcggacaagacgggtcccctgtcataacatttcctgactaccctgcttttagtgagatacccgacaaggagttccagaatgtcatgacgtatctgacctctatcccttccctgcaagacgccggcattggctttatccttgtaattgatcgcagacgggataaatggacgtccgttaaggcctcagttctgcggatcgccgcaagctttcctgctaatctgcaactggttctggttcttcgtcctacagggttctttcagcgcactttgtcagatatcgcctttaaattcaatcgggacgatttcaagatgaaagtgccagtcattatgctaagttcggtccccgacttgcacggctacattgataaatctcaactcacggaggacctcggcggtactttggattattgtcacagtagatggctgtgccaaaggaccgctattgagtcttttgcactcatggtcaagcagaccgcacaaatgctgcagagcttcggaaccgaactcgcggaaactgaactacccaacgacgtacagtcaacttcgtccgtcctctgtgcacatactgagaagaaggataaagcaaaagaggacttgaggttagccctcaaagaaggccacagcgtgttagagagcctgagagagctgcaggctgaggggagcgaacctagcgtgaatcaagaccagctggacaatcaagctactgtgcaacgattgctggcccagctcaatgaaacagaagcagccttcgacgaattttgggcaaagcatcagcagaagctagagcaatgcctccaattacgccactttgagcagggattccgtgaggtgaaggccatactagacgcggcctcacaaaagatagccacctttaccgacatagggaattccttggctcatgtcgagcatctgcttcgggatcttgcttctttcgaagaaaagtctggcgtggccgtggagcgcgcccgggccctgtctctggatggcgaacagctgataggcaataaacactatgccgttgactccatccggcccaagtgccaggaactgaggcatctctgtgaccaatttagtgcagagattgccaggagaaggggcctcctgtctaagtcactcgaattacacaggagactcgaaacaagtatgaaatggtgcgacgagggcatctacctgctagcctcccagccagtcgacaagtgccagtcacaggatggcgcagaggccgcattgcaggagattgaaaagttcctggagacaggcgctgaaaataaaatccaggagctcaacgcgatctacaaagaatacgaatccatcctgaaccaagacttgatggagcacgtccggaaagtgtttcagaagcaagcctcaatggaagaagtctttcatcgcagacaggcaagcctcaagaagctcgccgcaagacaaacacgcccagtacagccagttgctccacgccccgaagccttggccaagtccccgtgcccatcccctggaatccgtcggggaagcgagaactcatcaagcgaagggggcgctctgagaaggggcccataccgccgcgcgaaatccgagatgtccgaatcccgccaaggacggggaagtgcaggcgaggaggaggaatctctggcaatactgcgcaggcacgtgatgagcgagttgctggacacggagcgcgcctacgtggaggagcttctatgcgtgctggaaggatacgccgcagagatggataatcccctgatggcacacctcctatctacaggcctgcacaataagaaagacgtgttgttcggtaacatggaggagatctaccacttccacaacagaatttttctgagggaactggaaaattatactgattgcccggaattggtcgggcggtgcttcctagagagaatggaagatttccaaatctacgagaagtattgccagaacaagccacgctctgaaagcctttggaggcagtgttcagactgccctttcttccaggagtgtcaacggaaactggaccacaagctgagtttggactcttacctgctcaaacctgtacaacgcatcaccaaataccagctgcttctgaaagagatgctgaagtactcccggaattgtgaaggcgcggaggatctgcaggaagctctaagcagcatacttgggatcctcaaagcggtcaatgattctatgcatctgatagccattaccggttatgacggtaacctaggtgacctcggcaagctgctaatgcagggttcattttctgtatggactgaccacaagaggggtcatacaaaggtgaaggaactggcccggtttaagcccatgcagaggcaccttttcctgcacgagaaggcagtccttttctgtaagaagcgggaggaaaacggcgagggttatgaaaaggcaccatcgtattcctataagcagtccctcaatatggcagccgttggaatcaccgagaatgttaagggagatgcaaagaaatttgaaatttggtataatgcaagggaggaagtgtatattgtgcaggcacccacccccgaaattaaggccgcgtgggttaatgaaatccgtaaagtgcttacatcacaacttcaggcatgtcgggaggccagtcaacatcgggctttggagcagtcccagtctttgcctcttcctgctcccacgagcaccagcccatcaagaggaaattcaagaaatattaagaagttagaggaaagaaagaccgaccccctgagtctcgaagggtatgtgtcaagtgccccgctcaccaagcccccagagaaggggaaaggatggtctaagacctcacactcactcgaggcccctgaagacgacggcggttggtcctccgccgaagagcagatcaattcttcagatgcagaggaagacgggggactgggccccaaaaagttggtacctggaaagtacacagtggtagccgatcacgagaaaggggggcctgacgctctgagagtccggagtggagatgtcgtggaattagtgcaagagggagatgaggggctctggtacgtgagagatccaacaacaggcaaggaggggtgggttccagctagcagtttgtctgtcagactgggcccgtccggcagcgcccagtgcctgagtagttccgagtcgtccccagggtcagccgtgctctcgaattcctcctcttgcagtgagggaggccaagcacccttcagtgacctgcaagggtag

SEQ ID NO: 194376 - DNA, 1713 bp, synthetic construct
  misc_feature 1..1713: note = Description of Artificial Sequence: Synthetic coding sequence
  source 1..1713: mol_type = other DNA
atgagccggctggaggccaagaagcccagcctgtgcaagagcgagcctctcactacagagagagtccgaactacactgagtgtgttgaaacggattgtgacatcttgttacggaccctctggccgcctgaaacaactgcataatggcttcggtggatatgtctgtaccacatcccagtcaagcgcattgctgtcacacctgttagtgacacaccccatcctcaagatattgaccgccagtattcagaatcacgttagttccttttctgattgtgggttatttacggcaatcctgtgttgcaacctgattgaaaacgtgcagcgactgggactcacgcccacgacagtaataaggctgaacaaacaccttctcagtctgtgtatctcatatctgaagtcggagacctgcgggtgcagaattcccgtggatttttcaagcactcagattctactatgtctggttcgctccattctcacctctaaaccagcctgcatgctcacaaggaaagagacagagcacgttagcgccttgatcctccgtgctttccttcttacaatccccgaaaacgctgagggacacataatactgggaaagagtcttatcgtgcccctaaaggggcaaagagtgatagattcaaccgtgctcccgggcatcctcatcgagatgtcagaagtccaattaatgaggctgctgcccatcaaaaaatccacagcacttaaagtggcccttttctgtacaactctgtctggcgacacatcagataccggcgaggggaccgtggttgtgagctatggtgtctccctagaaaatgcggtccttgaccagctgttgaacctggggcggcaactcatttcagatcacgtagacttggtgttgtgccagaaggtgatacatcccagcctcaaacagtttctaaatatgcatcgcatcatcgcaatagaccgcattggcgtcacactgatggagccgctcactaagatgacgggtacacagccaatcggatcacttgggtctatttgccccaactcctatggttccgttaaagatgtgtgcactgccaagttcggcagcaaacactttttccaccttatccccaatgaagctaccatctgctcgctgctgctctgtaatcgtaacgacaccgcctgggacgaacttaaactcacctgtcagaccgccctgcacgttctgcagttgacactgaaggaaccttgggccctgttagggggcgggtgtaccgagacacatctcgccgcatatattcgtcataagactcacaatgacccggaaagcatcttgaaagacgatgaatgcacacagacagagctgcaactgatcgctgaggcgttctgtagcgccctggaatccgtggttggatctctcgagcacgatgggggcgagatactaacagatatgaagtatggacacctctggagtgttcaggctgacagcccttgcgtagcaaattggccagacctgctctcccagtgcggatgcggcctatacaattctcaggaggagttgaattggtcttttctgcggtcaacaagaaggccattcgtgccgcagtcgtgcctgccgcacgaggccgtgggctcagcttcaaacctcaccctcgactgcctgacagcaaagctctcagggctgcaggtagccgtggagactgctaacctcatcctcgacctgtcatacgtcatcgaggataagaattag

SEQ ID NO: 194377 - DNA, 1713 bp, synthetic construct
  misc_feature 1..1713: note = Description of Artificial Sequence: Synthetic coding sequence
  source 1..1713: mol_type = other DNA
atgagccggctggaggccaagaagcccagcctgtgcaagagcgagccactcacaacggagagggtgcgcaccaccctgtcggtgttgaagcggatcgttaccagttgttacgggcctagcggccgcctgaagcaactgcacaacggttttggaggttacgtttgcaccacatcacagagctcggccttactgtcacatttactagtcactcatccgattctaaagattcttactgcttccatccagaaccatgtatctagcttcagcgactgcggcctgtttactgccattctgtgttgtaatttgattgaaaatgtacaacggcttggcctcacacccactaccgtgattcgattgaataaacacctcctctcgctgtgcatttcatatttaaagtccgagacctgcgggtgtaggatacccgtggatttttcttcgacccaaatactgctgtgcctcgtcaggtctatccttacctcgaaacccgcctgtatgttgactagaaaagaaacggagcacgtgtctgccctgatcctccgtgcatttctactgacaattcctgaaaatgctgaggggcatatcattttaggcaagagcctgatagtaccattgaaaggacagcgtgtcatcgactcaactgtactgccaggaatacttatcgagatgagcgaagtgcagttaatgcggcttctgcccattaaaaaatccactgctcttaaggtggctctgttttgcaccacactgtccggtgacacaagcgacaccggggagggaactgtggtggtgtcgtacggcgtgagtctggagaacgccgtcctcgaccagctgttaaacctgggcaggcagctgataagcgaccatgtggatctggtcttatgtcagaaagtgattcatcccagcctgaaacagttcctgaacatgcatcggatcatcgctattgatagaatcggtgtcacactgatggagcctcttaccaagatgaccgggactcaacccattggcagcttggggtccatctgtcctaactcctatgggtctgtcaaagatgtgtgtaccgccaaattcggctcgaagcacttttttcacctgattcccaacgaagcgacaatttgtagtctcctgctatgcaaccgaaacgatactgcctgggacgagctgaagctcacttgtcaaaccgcgctccacgtgctccagttgactttgaaggagccatgggcactcttgggcgggggttgcacggagacgcacttagccgcttatatcagacacaaaactcacaatgaccctgagagcatcctcaaggatgatgagtgcacacagaccgagctgcaactgattgctgaggcgttttgttctgctctcgaatctgttgttggctctctggagcacgacggcggcgaaattcttactgatatgaagtacggccacttgtggagtgttcaggcagacagcccctgtgtagcaaattggcctgatctgctgagccagtgcggctgtggcctgtataatagccaggaggagctgaattggtcatttcttcgatccaccaggcgaccgttcgtgccacaaagctgtctgcctcacgaggccgtcggctccgcttccaacctcacattggattgtctgacagccaagctcagcggcctgcaagtcgcggtagaaaccgcgaacttaattctcgacctctcatatgtgattgaagacaagaactag

SEQ ID NO: 194378 - DNA, 2145 bp, synthetic construct
  misc_feature 1..2145: note = Description of Artificial Sequence: Synthetic coding sequence
  source 1..2145: mol_type = other DNA
atgcccgtgcggttcaagggcctgagcgagtaccagcggaacttcctgtggaaaaagtcctacttgtccgaatcctgcaattcttccgtcgggaggaaatacccgtgggctggactgcgaagcgatcagctgggtataaccaaggagcccagcttcatatcaaagcgccgtgtcccctatcacgaccctcagatttccaagtctctggagtggaacggcgccatatcggaatctaacgtggtcgcctcacctgagccggaggcccctgaaacgccgaaatctcaggaagccgaacagaaagacgtgactcaagagcgcgtccattccttggaggcaagcagggttcccaaacggactcgatcccactccgcagattcgagagctgaaggtgccagcgacgtggagaataacgagggagtaactaatcatacgccagtgaatgagaacgttgaacttgaacactcaactaaagtgctaagcgagaatgtcgataacgggctcgaccgcctgctgcggaaaaaggctggactgacagtggtcccgagctacaatgcgctgaggaattcagagtaccaacgccagtttgtgtggaagacttctaaagaaaccgcccctgcattcgcggccaatcaagtctttcataacaagtcccagtttgtgccacctttcaaggggaacagcgtgattcacgaaacggagtacaagagaaattttaagggattatcgccggtaaaggaacctaaactgaggaacgatttgagagagaatcgtaacctcgaaacggtcagccctgagcgcaagagtaataaaatcgacgaccgccttaaactcgaggctgaaatggagctcaaggatctgcaccagccaaaaaggaagttaactccttggaaacaccaacgactcggtaaagtgaactctgagtaccgcgcgaagtttttaagtccggcacagtatttgtataaagcaggggcatggactcacgtgaaggggaacatgccaaatcaggtcaaagaactccgtgagaaggctgagttctatcgcaagcgggtgcagggaacccacttctcacgggaccacctgaatcagatcctatcagacagcaactgctgttgggatgttagtagtacgacaagcagcgagggaaccgtatccagtaatatccgagcacttgacctcgccggcgacccaacctctcataaaacccttcaaaaatgcccaagtactgagcccgaggaaaaaggcaacattgtggaagagcagccacagaagaataccacagagaagctgggtgtgtcagctcctaccattccagtcaggcgccgcttggcatgggatactgagaacacatcggaggatgtgcagaagcagccgggagagaaggaggaggaagatgataatgaagaagaaggagatcggaaaaccggtaagcaggcattcatgggagaacaggagaaactggacgtgagagagaagtctaaagctgacaaaatgaaagagggctccgactccagtgtgtcttccgaaaaaggagggcgcctgccaaccccaaaactgagagagctcgggggtatacagcgcacccatcacgatctgaccactcctgcagtagggggcgctgtactcgtgagtcctagtaagatgaaaccgcctgcgcctgaacagagaaagcggatgacctcacaggactgtctggaaactagtaagaacgacttcacaaagaaggagtctcgggccgtatccctcctgacaagccctgccgccgggatcaagacagtagacccacttccactgagggaggactccgaagacaatatccacaagtttgcagaagctactctgcctgtctcgaagatacctaagtaccccaccaaccctcccggtcagctcccgagtcccccccacgtccccagttactggcatccaagcagacgaattcaggggagcctccgcgatcctgagttccagcacaatgtgggaaaagctcgtatgaacaatctgcaactcccgcagcacgaggcctttaacgatgaagacgaagacaggctctcagagatctctgccaggtcagccgccagctcgctgagagccttccagaccctggcccgggcaaagaagagaaaggaaaacttctgggggaaaacgtag

SEQ ID NO: 194379 - DNA, 210 bp, synthetic construct
  misc_feature 1..210: note = Description of Artificial Sequence: Synthetic coding sequence
  source 1..210: mol_type = other DNA
atgcccgtgcggttcaagggcctgagcgagtaccagcggaacttcctatggaaaaaatcctacctcagcgaatcctgtaactcaagcgtgggtcgaaagtacccttgggcaggcctccgctccgaccagcttggcaaccagggtcgctgcaggactaaaattcaacatagcgatattagttctctgcttattttggtatgctcgacctag

SEQ ID NO: 194380 - DNA, 669 bp, synthetic construct
  misc_feature 1..669: note = Description of Artificial Sequence: Synthetic coding sequence
  source 1..669: mol_type = other DNA
atgcccgtgcggttcaagggcctgagcgagtaccagcggaacttcttgtggaagaagtcttacctgagtgagtcctgcaacagtagcgtgggacgcaaatacccttgggccggcttgcggagcgatcagctaggaatcaccaaggagccctctttcattagcaagcgacgcgtcccctaccatgacccccagataagcaagagtctggagtggaatggtgcgataagtgagagtaacgtagttgcctctcccgaaccagaggcgccagagacacctaagtctcaggaggctgagcagaaagacgtgacacaggaacgggtgcactctctggaagcaagccgggttccaaagagaacccgaagccacagcgccgactcacgggccgagggggcttcagacgtggaaaataacgaaggagtgactaaccatacgcccgtgaacgagaatgtggaactggagcactcaaccaaggtgctcagtgagaatgtagacaacggtgtgggaatcttcacagccttcctttttaagtccattgagttcttcattggctttatcgtcatctccgtaatcctgcattttgtgttccagaatttcccgttgctgttttcctgtctgatgagtatccgtattgtcgataaccgcttacttacactggtgattgtgaattag

SEQ ID NO: 194381 - DNA, 2040 bp, synthetic construct
  misc_feature 1..2040: note = Description of Artificial Sequence: Synthetic coding sequence
  source 1..2040: mol_type = other DNA
atgcccgtgcggttcaagggcctgagcgagtaccagcggaacttcctgtggaagaaatcctacctgagtgagtcatgcaattcatccgtgggccggaaatatccttgggccggactcaggtcagatcagctgggaataaccaaggagcccagctttatctcgaagcgaagagtgccctaccacgacccccagatttcaaagagtctcgagtggaacggggccatatctgagagcaacgttgttgcttcgcccgaaccagaagccccggagacaccaaaaagccaggaggcggaacagaaagacgtaacgcaggagagagtccattctttggaggccagccgtgttccaaaaagaacgaggagccatagcgcggatagccgcgctgaaggagcttctgatgttgaaaacaatgaaggcgtgacaaaccacacccctgtaaacgaaaatgtggagctcgagcattctacaaaggtcctgagcgaaaacgtcgataacggtgtgttccataataagagccagttcgtgccccccttcaagggaaactccgttatccatgagacagaatataaacgcaacttcaaggggctgagtccagtcaaggagcccaagctgcggaatgacctccgcgaaaataggaacttagagactgtatcccccgagagaaaatctaataaaattgacgatagactgaagctggaggccgagatggagctcaaggacctacaccaacctaaacgaaagttaaccccttggaaacatcagagacttggaaaggtgaactcagagtaccgggctaaattcctgtcacccgcccagtatctgtataaagccggcgcctggacacacgtgaaagggaacatgccaaaccagggaagccttaatgccatgtggtacgccgaggtgaaggagctgagagaaaaagccgagttctacaggaaacgggtccaggggactcattttagcagggaccacctgaatcaaattcttagcgactccaattgttgctgggacgtttcatcaacgacctcctccgaaggtacagtcagtagtaacatcagagcactggatctggccggggaccccactagtcataagaccctccagaaatgcccttctaccgaaccggaggagaagggcaatattgtggaagagcagccccaaaagaatacaacggagaagctgggcgtcagcgcccctacaattcctgtgaggagaaggttggcctgggacactgagaatacctctgaggatgtgcaaaagcagccaggtgagaaggaagaggaggatgacaatgaagaagagggtgacaggaagacaggcaagcaggcattcatgggtgagcaggagaaactggatgttcgcgaaaagtcaaaagccgacaaaatgaaagagggctctgactcttctgtctccagcgaaaagggcgggaggctaccgacgcccaaactccgggaacttggtgggatccagcggactcatcacgatctaaccacaccagccgtcggaggggcagtcctggtgtccccatctaaaatgaaacctcccgcccctgaacaaaggaagcggatgactagccaggactgtttggaaactagcaaaaatgacttcacaaagaaagaatccagggctgtgtctctcttaacatcccccgctgctggtattaaaacagtggatccactcccattaagggaggattcagaggacaacatacataagttcgctgaagccacgttgcctgtctccaagattccaaagtaccccacaaacccgccaggccagctgccatccccaccccatgtgcccagctactggcacccttctcggcgaattcaggggagcctccgggatccagaattccagcacaatgtcggcaaagcgcggatgaacaacctacagctgcctcaacacgaagcttttaacgacgaggacgaagataggctttcagaaatctcagctcgttctgccgcctcttccctgcgcgcattccagacattggccagggccaagaagcggaaggagaatttttgggggaagacttag

SEQ ID NO: 194382 - DNA, 2715 bp, synthetic construct
  misc_feature 1..2715: note = Description of Artificial Sequence: Synthetic coding sequence
  source 1..2715: mol_type = other DNA
atggaccggtacctgctgctggtgatctggggcgagggcaagttcccaagcgccgcttctcgagaagccgagcatgggccagaagtatcctccggtgagggtactgaaaatcagcccgattttaccgcggccaatgtttatcacctgctaaagcggtccatctcagcttccatcaatcccgaggacagcacgttccctgcatgtagtgtgggggggatccctggttcgaaaaagtggtttttcgcggtccaggctatttacgggttttatcagttctgtagcagcgactggcaggaaatccacttcgataccgaaaaggacaaaattgaggatgtactgcagactaacatcgaggagtgcctgggcgcagtggagtgcttcgaagaggaggactccaacagtagggagagcctgtccctcgctgacctgtacgaggaagctgccgagaacctccaccagctgtccgacaagctcccagccccagggcgcgcaatggtggatatcatccttcttctgtctgacaaggatcctcccaaactgaaggactaccttcctacagtgggcgccctaaaacatctgcgggaatggtactcagccaagatcacgatcgccggtaatcattgtgagatcaactgtcagaagatcgccgaatatttgtccgctaatgtggtgagtctggaagacctgcgcaacgtaatcgacagtaaagaactgtggagggggaagatacagatatgggagcgtaagttcgggttcgagatctccttcccagaattctgcctcaaaggcgtgaccctcaagaactttagcaccagtaatctcaacactgacttcctggctaagaaaataatcccgtccaaggataaaaatattctccctaaagtcttccattactacggcccggctctagaatttgtccagatgatcaagttgagtgatttgccttcctgttatatgtcagatatcgagttcgaactgggccttactaattccactaagcagaacagcgtgctgctgctggagcagatctcttcactatgctcaaaggtcggagccctgtttgtgctgccttgtaccatttctaatatcctcatccctccaccaaaccagctgagctctagaaagtggaaggagtatatcgctaagaagcccaagactatctccgtacccgacgtcgaggtgaaaggggagtgctctagttattacctgctgctgcaagggaacggaaaccgcaggtgtaaagccaccttgattcattccgctaatcagattaacggttccttcgctctgaacctcatccacggaaaaatgaagacgaaaacagaggaggccaagctaagtttcccatttgacctgctgagcctgcctcacttctctggcgagcagatagtgcagcgggagaagcaactagctaatgtgcaggttttagctttggaagaatgcctcaaacgcagaaaactcgccaagcagccagaaaccgtgtctgtcgcggagttaaagtctctgctggttcttacgcgcaagcattttctggactacttcgatgcggtaatccccaagatgatcttacgaaagatggataagattaagacctttaacatactcaacgatttcagcccagtagaaccaaatagtagcagcctaatggagaccaatccactcgagtggccggaacgacacgtactgcagaaccttgaaacctttgagaaaaccaagcaaaagatgcgaaccgggtcccttccacattccagcgagcagctgctcgggcacaaagaaggcccccgggactcgattacgctgttggacgccaaggaactgctcaagtactttacaagcgatggactgccaatcggggatctgcagcccctccctattcagaagggagaaaagacgtttgtgttgacacctgaactgtcacctgggaagctccaggtcctgccctttgaaaaggcgtcggtgtgccattaccatggaatagagtactgcttagacgataggaaggctttagaacgcgacggaggttttagcgagctgcagtctcgcctgattaggtatgaaacacaaacaacctgtacaagagagtcattccccgtaccaactgttctatcccctctcccgtcgccagtagttagctctgatcctggatctgtgcccgacggggaggtgctgcaaaatgaattgcggacagaagtgtccaggttgaagaggaggagtaaggatctcaactgcctctacccacggaagagactcgttaaaagcgagagtagtgagtctctcctctcccagaccacgggcaactctaaccattaccaccaccacgttacttctcggaaaccacagaccgagaggtccctacccgtgacgtgccctctcgtccccattccgtcttgcgagaccccaaagctcgccacaaagactagttccggacaaaaaagcatgcatgagagcaagacgagcaggcagatcaaagaatctagatcacagaaacatacccggattttgaaagaagtagtaacggagactttaaagaagcactccatcaccgagactcacgagtgcttcactgcctgtagccaaagattgttcgagattagcaagttttatctgaaagaccttaaaacatctcgaggattgttcgaggagatgaaaaaaactgccaacaacaacgctgtccaggtaatagattgggtcctcgagaaaaccagcaaaaaatag

SEQ ID NO: 194383 - DNA, 1374 bp, synthetic construct
  misc_feature 1..1374: note = Description of Artificial Sequence: Synthetic coding sequence
  source 1..1374: mol_type = other DNA
tgaatggccgagaccgtgtggagcaccgacaccggcgaggccgtgtataggtcaagagatccagtgaggaacctgcggctgcgtgtgcacttgcaaagaattacatcttctaacttcctccactaccagccggcggctgaacttggcaaggatctcatcgatctggcaacgttcaggcctcagccaaccgcttccggccacaggcccgaggaggatgaggaagaggaaatcgtaatcggatggcaggagaagcttttttcacagtttgaggtggacctgtaccagaacgaaacagcttgtcagtcgcccttggattatcagtaccgccaggaaatattgaagctggagaatagcggtggcaagaaaaataggcgcatcttcacatatactgacagcgaccggtacacaaacctggaggaacactgtcagagaatgacaacagccgcgtcagaggtgccaagcttccttgtagaacggatggccaatgttagacgccgcaggcaggaccgtagaggaatggaaggggggatcctgaaatcccgcatcgtgacttgggaaccatccgaggagtttgttcgcaacaaccacgtgattaacacaccgttacagacaatgcacatcatggccgaccttgggccatacaaaaagttgggatataaaaaatatgaacatgtcttgtgtaccctgaaggtcgattcaaacggtgtgatcacggtgaagcctgactttaccgggctcaagggcccttaccggattgagaccgaaggggagaaacaggaactttggaaatatactatcgataacgtgtccccacatgcacagccagaagaggaagaaagagaacgcagggtgtttaaggacctgtacggtagacataaggaatacctgtcctctcttgtgggaactgactttgagatgacggtgcctggggctctccggctgtttgttaacggcgaggtggtgtcggcgcagggctatgagtacgataatctctacgtgcatttctttgtagagttacctaccgcccactggagttcaccggcctttcagcagctgtctggagtgacacagacctgtacaaccaaatccttggccatggataaagtggctcacttttcgtatccatttacattcgaagccttcttcctgcatgaagatgaatcaagcgacgcgctaccggaatggccagtgctgtattgtgaggtattgagcctggatttctggcagaggtaccgcgtggagggctacggggcggtggtcctgcctgcgactcctggcccatcctggaaccgagcacctttcaggaaggggtgtggggtttgctggactgtgtggaaaggctccgcaagcagggtgcctttcacaatgtgctag

SEQ ID NO: 194384 - DNA, 1566 bp, synthetic construct
  misc_feature 1..1566: note = Description of Artificial Sequence: Synthetic coding sequence
  source 1..1566: mol_type = other DNA
atggccgagaccgtgtggagcaccgacaccggcgaggccgtgtaccgctcgcgggatcctgttcgcaacttacggctgagggttcacctgcagaggattacgtctagtaacttcttgcactaccaaccagcagccgagctgggaaaggatctaatcgatcttgcaacgtttagaccccagcctactgcctctggccaccgccccgaagaagatgaagaggaagaaattgtcatcggctggcaagaaaaattattttcacagtttgaggtagatttatatcaaaatgagaccgcttgtcaaagcccactcgattatcagtatagacaggagattctgaagttagaaaattccggcggcaagaaaaatcggagaatttttacctacacagactctgacaggtatactaacctagaggaacactgtcagaggatgactacggccgcctctgaggtgccgagttttttggtggaacggatggccaatgtgaggagacgccggcaagatcgacgcggtatggaaggaggtatcctgaaatcccgcatagtcacctgggagccctcggaggagttcgtgagaaacaatcacgttattaacaccccgctgcagacaatgcacataatggcggacctcgggccttacaagaaacttgggtacaagaagtatgaacacgtgttgtgtacactgaaggtggactcgaacggcgtgatcacggtgaagcctgactttactggacttaagggcccttacaggatcgaaactgaaggcgagaagcaggaactgtggaaatacacaatcgacaacgtcagccctcatgctcagccagaggaggaggagagagaaagacgggttttcaaggatctgtatgggagacacaaggagtacctgtcctccttggttggtacagactttgagatgaccgttcctggcgccttacggctattcgtcaacggtgaagtggtaagtgctcagggttacgagtacgataacctttatgtccatttcttcgtggagcttccgaccgctcactggagctcccccgcctttcagcaactgtctggagtgacacagacatgtaccaccaagagcctcgcaatggacaaggtcgcccatttctcatatccttttaccttcgaggcatttttcttgcacgaggacgagtcctccgatgcactgcccgagtggcccgtgctgtactgcgaggtgctgagtctggacttttggcagcgctacagagttgagggatatggcgccgtcgtgctgccagccactcctgggtcccacacacttactgtgtcaacttggagacccgtcgagctcggtacagtcgcggagctccgacgcttttttatcggaggttcattggagttggaggatctcagctacgtacgtatcccgggcagcttcaaggctcttctgtccagcagtaagacaaaagaaggccggaaggtcgatggggagagggttttgaatccccaacccgtaagtttgtcgctttttcccggcaagccacactctacagcatggggactactaaggcttcgctatgagttattcctaagcaagtag

SEQ ID NO: 194385 - DNA, 1680 bp, synthetic construct
  misc_feature 1..1680: note = Description of Artificial Sequence: Synthetic coding sequence
  source 1..1680: mol_type = other DNA
atggccgagaccgtgtggagcaccgacaccggcgaggccgtgtaccggtctagagacccagttaggaatttacgactacgcgtgcacctacagagaataacttcttctaactttctccactaccagcccgcagccgagcttggtaaagacctcattgacctcgccacctttcggcctcagcccacagcaagcggtcacaggccagaggaggacgaagaagaggaaattgtcattggttggcaggagaagttgtttagtcagtttgaagtcgacctgtaccagaatgagaccgcatgccagtcacccttggattatcagtaccggcaggagattctgaaactggaaaacagcggagggaagaaaaacaggcgaatattcacgtacacagacagcgaccggtacacgaacctggaagagcactgtcagcgtatgactaccgcagcttccgaggtccccagctttttggtcgagaggatggcgaatgtcagaagaagacggcaagatagacggggaatggaaggcggcatactaaaaagtagaattgtgacctgggagccaagtgaagagtttgtccgcaacaaccacgttataaacacaccactgcagactatgcacattatggcagacttgggcccttataagaagttagggtataaaaaatatgaacatgtgctttgcaccctcaaagtggacagcaatggtgtcatcactgttaaaccagactttacgggtcttaaaggcccgtaccggatagaaaccgagggcgagaagcaagaactttggaaatacaccatagataacgtgtctccccacgctcagcccgaggaggaggagcgcgaacgccgcgtctttaaagacctctatggtcgccacaaggagtatttatcatccctggtgggcacagatttcgaaatgaccgtgcctggggcactccgactcttcgttaacggcgaggtggtgagcgcgcagggctacgaatacgataatctgtacgtccattttttcgttgagctgcctaccgcccactggtcctcgccagcattccagcagctctctggtgtgacacagacgtgcaccacgaaaagtctggctatggacaaggtcgctcacttttcataccccttcacctttgaagccttctttctccacgaggatgagagcagcgacgcactccccgagtggccagtgctttactgtgaagtcctgagccttgacttctggcagagatacagagtagagggatacggagccgtggtcctgcccgcaactcccggttcacacaccctgaccgtgtcgacgtggcggcccgtggaactcgggacggtagctgagttgcgaagattttttatcggggggtccctggaactggaggacttaagctacgtgaggataccaggttcttttaaaggtgaaaggctaagccggtttggcctgcggaccgagacaacagggactgtcacattccgcctgcactgcttgcagcagtcacgcgcctttatggagtcaagttccttgcagaagagaatgcgtagcgtcctggaccggctggaaggcttttcccaacagtcaagcatccataacgttctggaggcattccgtagagcccgccggagaatgcaggaggctcgggagtccctcccccaggacctggtctcgcctagcggtactctcgtatcctag

SEQ ID NO: 194386 - DNA, 1563 bp, synthetic construct
  misc_feature 1..1563: note = Description of Artificial Sequence: Synthetic coding sequence
  source 1..1563: mol_type = other DNA
atggccgagaccgtgtggagcaccgacaccggcgaggccgtgtaccggtcacgcgacccagtgagaaatttgcgtctgagagtgcacttgcaacgtatcaccagctcgaactttttacattaccaacctgccgccgagttgggcaaggatctgattgaccttgccaccttccgcccacagcctaccgctagcggacatcgccctgaggaggatgaagaggaagagatcgtaattggatggcaagagaagctttttagtcagttcgaagttgacctgtatcaaaacgagactgcctgccaaagtcctctcgactaccagtacaggcaggagatcctaaaacttgaaaattctggtgggaagaaaaaccgccggatattcacctacacagatagtgaccggtacactaacctagaggagcactgccaaaggatgacaacagccgccagcgaagttccttcctttctagttgaacgcatggctaacgtgaggcggcgccggcaggaccgtcgcggtatggaggggggcatcctgaagagcagaatagtgacatgggaacctagtgaagagttcgtacggaacaatcatgtcatcaatacacccctgcagaccatgcatattatggctgacctaggaccatacaaaaaattgggatataagaagtacgaacatgtgctctgcacgctgaaggtcgacagcaacggtgtgatcactgttaagcccgacttcaccgggctgaaagggccttaccgcatcgaaaccgagggtgagaagcaagaactctggaagtatactatagacaatgtttccccacacgcacagccagaggaggaagaacgcgaaagaagggttttcaaggatctgtatggacgccataaagagtacctcagctccctcgtgggtacagatttcgaaatgacagtgccgggcgccctgcggctgtttgtgaacggggaggttgtttcggctcagggatacgagtatgataacctgtacgtgcactttttcgtcgagctgcccacagcacactggtcttctccagccttccagcagctttccggcgtgacccagacatgtaccacaaaaagcctcgccatggataaggtcgctcacttttcatacccctttactttcgaggcttttttcctgcatgaagatgagagttctgatgcgctgcccgagtggcccgtgctgtattgtgaggttctttctcttgacttctggcagaggtaccgcgtcgagggttatggggcagtcgtgttgccagctacacccggctctcacaccctgacggtctccacctggagacctgtcgagctaggcacagtggccgagttaagaagattttttattgggggtagtcttgaactggaggaccttagctacgtccgaatcccaggatcattcaaaggtctctcttcctcaaagacaaaagagggcagaaaagtggacggggaacgggtgctcaacccccaacccgtatctctgagcctcttccccggtaaaccacactccacggcctggggactgcttcgtctgaggtacgagctgttcctgtctaaatag

SEQ ID NO: 194387 - DNA, 1650 bp, synthetic construct
  misc_feature 1..1650: note = Description of Artificial Sequence: Synthetic coding sequence
  source 1..1650: mol_type = other DNA
atggccgtgcccgtgagcagcttcgcccagcggacccggagccggtttcgggtgcatctgcagaggattaccagttctaatttcttacattaccagccagccgctgaactggggaaagacctcattgatctcgcaacctttaggccacaaccaacagcctcaggacatagaccggaagaggatgaagaagaggaaatcgtgataggatggcaggagaagctgtttagtcagttcgaggtcgatctgtaccagaacgaaacagcttgtcagagtccactggactaccaatatcggcaggagattcttaaactcgagaacagcggagggaaaaagaacaggcggatctttacttacactgattccgacaggtacactaacctcgaagagcactgccagagaatgactacagctgcatctgaagtaccttcctttctggtggagaggatggcgaatgtccgccgccgcagacaggaccgacgagggatggaaggtggcatcctcaagagtaggattgtgacgtgggaaccatccgaagaattcgtacggaacaatcatgtaatcaatacccccttgcaaaccatgcacataatggccgaccttggtccttataagaaactcgggtataaaaagtacgagcacgtgctttgcacattaaaggtcgattccaatggtgtgattactgtcaaaccagatttcacaggcctcaagggaccatatcgcatcgagacggagggggagaagcaggaactgtggaagtatacaatcgacaatgtaagcccccatgcccagccagaagaagaggagcgcgagcgccgagtttttaaggatctttatggacgtcacaaggagtatctgtcatcacttgtggggacggacttcgaaatgacagtcccgggagcccttcggctgtttgtaaacggagaggtggttagcgcacaagggtacgagtatgataatctctatgtgcacttttttgtggaattgcctactgcgcattggagttctcccgcttttcagcagctgtctggagtcacacagacgtgtactactaagagcttagctatggataaggttgcccacttttcgtatccttttacttttgaggccttttttctccatgaggacgaatctagtgacgcactgcccgaatggccagttctatattgtgaggtgctttctttagacttttggcagcgctatagagtcgagggttacggcgccgttgtgctgcctgcgactcccggttctcataccctgaccgtgagcacttggcggcctgtggagttaggtacagtggcagagctgaggaggtttttcatcggaggttctctcgagctagaagaccttagctatgtgcgcattcccgggtcctttaaaggagagagactgagcagattcgggcttcgcaccgagactactgggaccgtgacattccggctgcactgtcttcagcagagtcgggctttcatggagtcttcttccctgcaaaaacgcatgcgaagtgtactcgacaggctggagggctttagtcagcagtcctccatccacaacgtgctggaagctttccggcgcgctagaagacggatgcaagaggcgagggagtccctaccccaggacctcgtcagtccctcaggcactctagtctcatag

SEQ ID NO: 194388 - DNA, 1071 bp, synthetic construct
  misc_feature 1..1071: note = Description of Artificial Sequence: Synthetic coding sequence
  source 1..1071: mol_type = other DNA
atgcacatcatggccgacctgggcccctacaagaagctgggctacaagaaatatgagcacgtcctgtgtacattgaaggtggactctaatggggttattaccgtaaaacccgactttactggactgaagggtccatatcggatcgagacagagggagagaagcaggaattgtggaaatatactatcgacaatgtgtctccccatgcacagccagaggaggaagagagggagagaagggtttttaaggatctttatgggcgccacaaggaatacttgtcttctctagtgggtaccgacttcgagatgacagtccccggcgcactccggctgttcgttaatggcgaagtagtgtccgctcagggctatgaatacgataacctctacgtgcacttctttgtcgagcttcccaccgcccattggagtagtcctgcgttccaacagctgagtggtgtcactcaaacctgtaccaccaagtcccttgcaatggacaaagtcgcgcatttttcatatccattcacatttgaggcgttttttctgcatgaagacgaatcatcagatgccctgcctgagtggccagtgctttattgcgaagtgctgtctttggacttctggcagagatatcgcgtcgaaggttacggcgccgtcgtcctccctgcaacccccggctctcataccctgaccgtctccacctggcgaccagtcgagctcggtaccgtcgccgagttgcggcgcttcttcatcggcgggtcactggagctcgaagatttgtcctatgtgcgcatccccggaagctttaaaggcgaaaggctgagcaggttcggtctgagaacggaaaccacaggtaccgtgacttttagactccattgtctgcagcagagccgggcatttatggagtctagctcacttcagaaacgtatgcgcagcgttcttgatcgcctggaaggattttcgcagcagagcagtatccacaacgtgctcgaggcctttcggcgcgcccgtcgccggatgcaagaggcccgcgaaagtttgccccaggatttagtgagtccgtcaggtacattagtctcttag

SEQ ID NO: 194389 - DNA, 4746 bp, synthetic construct
  misc_feature 1..4746: note = Description of Artificial Sequence: Synthetic coding sequence
  source 1..4746: mol_type = other DNA
atgaaggcccagggcgagaccgaggagagcgagaagctgagcaagatgtcctctctactcgaaaggctgcacgctaagttcaatcagaatcggccttggtcagaaaccatcaaactcgtgaggcaagtcatggagaagagggtagtgatgtcctccggagggcaccagcacctggttagctgtcttgaaactttacagaaggctctgaaagtgacctcactacctgcgatgactgacagactagagtccattgctagacagaacggattggggagccacctgagcgcctctggaactgagtgctatatcacgtcagatatgttttatgttgaggtgcagcttgatccagcaggtcaactctgtgacgtgaaggtggcccaccacggagaaaatcccgtgtcttgtcctgaacttgttcagcagctgcgggaaaagaacttcgatgagttctcaaagcatctaaaggggctcgtgaacttgtacaacttgccaggggataacaaactgaagacaaaaatgtatttggcgctgcaaagtctggagcaggatctgtctaagatggccatcatgtattggaaggcaaccaacgccggccccctggacaaaatcctgcatgggagcgtgggttatcttacccccagaagtggagggcacttgatgaacctgaaatactatgtttcgccttcagatctgctggacgacaaaacagcttctccaatcattctccatgaaaacaacgtgagccggagtctgggaatgaatgcctccgtgactatcgaaggcacttccgccgtttacaagctccccatagctcctctcataatgggctctcaccctgtagacaacaagtggaccccgtccttctcatcaatcacaagtgccaattctgttgacctgcccgcatgctttttcttgaagttcccacaacctattccggttagtagggccttcgttcagaagctgcaaaattgcactgggattccactgtttgaaacgcagcccacttatgcccccttgtacgagctcattactcagttcgagctcagtaaagaccccgaccctatacctctcaatcacaatatgaggttctatgccgctctgccaggccagcagcactgctatttcctgaacaaggacgcgcccctccccgacgggaggtctctgcaagggacactggttagcaagatcacgttccagcatcctggaagggtgccactgatactgaacctcattagacatcaggttgcttacaataccctcatcggttcgtgcgtgaagcgaacaattctaaaggaggatagcccaggtttgctgcagtttgaggtgtgcccgctgtcagaatcacgcttttctgtaagtttccagcatcccgtgaacgacagtctggtgtgcgtcgttatggatgtgcaagattctacgcatgtgtcttgcaagctctacaaaggcctttctgatgcactgatctgcaccgatgactttatcgctaaagttgtgcagcgctgcatgtccattcctgtgaccatgcgagccattcggcgaaaggccgagacgatccaagctgatactcctgcattgagcctgatcgctgagaccgttgaggacatggtcaaaaaaaatctcccccctgcctccagtccaggttacggcatgaccactgggaacaaccctatgtcaggaactacaactcccaccaatacctttcccgggggaccaattacgacacttttcaacatgtcaatgagcattaaagacaggcatgaaagcgtgggtcatggcgaagacttcagcaaggtgtcacagaatccaatacttacctccttgctgcagatcacggggaatgggggctcaacaattggatcctctcctacacccccccatcatacgcccccacctgtgagtagtatggccggtaacactaaaaaccaccccatgcttatgaacttgttaaaggacaaccccgcacaggactttagtaccctttacgggagcagccccctcgaacgtcaaaatagttcttccggctccccacgtatggaaatttgttctggcagcaacaagaccaaaaaaaaaaaatccagtcgcctacctccagagaaacccaaacatcagacagaggacgatttccagcgcgaactcttcagcatggacgttgatagccagaatcccattttcgacgttaacatgactgcagacaccttagatactcctcacattacacctgcgccatcccaatgcagcaccccacctactacatatccacagcctgtgcctcatccccagccatctattcagcgcatggttaggctgtcctcttctgacagcattggtccagacgtgacggatatccttagcgacatagccgaggaagcctctaaactgccttccaccagcgacgattgtcctgcgatcggtactcccctcagagactcatcttcgagcggccactcacagtcaaccctattcgatagcgatgtgtttcaaacaaacaataacgagaatccttacactgaccccgccgatctgatcgccgacgctgccgggtcccctagctcggattccccaacaaaccattttttccacgacggggtggattttaacccagatcttctgaactcccagagtcaaagcgggttcggcgaggagtactttgatgaatctagccagtccggggacaacgatgatttcaagggtttcgctagccaagctctcaacacccttggggtgcctatgctgggaggtgataacggcgagactaagtttaagggcaacaatcaggctgatacagtcgacttttccattatttcagtggccggtaaagcactcgcgccagcagaccttatggaacaccatagcgggagccaggggccactgttgacaactggagacctgggcaaggagaaaacgcaaaagagggttaaagaaggaaatgggacatctaattccaccctgtcaggtcccggtcttgatagcaaacctggcaagagaagccgtaccccaagtaatgatggcaagagcaaagacaagcctcctaaaagaaagaaggcggacacagaaggcaagtcaccctctcatagctctagcaacaggccttttacaccgcctactagtacaggaggatcaaagtcacccggatccgcaggtcgatctcagaccccccccggagtggcaactccaccaatccccaaaatcacaatacaaatcccgaaaggaactgtaatggtggggaaaccttcaagtcattcacaatataccagttccggcagcgtatcttcctcaggttcaaaaagtcaccattctcactcatccagcagcagcagctccgcctccacctcaggcaagatgaaatcgtccaaaagcgaagggagctcaagctccaagctgtcttctagtatgtattcctctcaaggcagcagcgggtcctcacagtcaaagaattcttcacagagcggaggtaaacctggaagtagccctattactaagcatggcctatcatctggcagcagctcaacaaaaatgaaaccccaaggcaagcccagctctctgatgaatccctcccttagcaaacccaatatttcaccttcccactcccgcccccccggtgggagtgacaagctggctagcccaatgaaacccgtgcctggtaccccaccatcctccaaagccaagtcaccaatctctagtggatcaggggggagccatatgtcaggtacctcttcctcaagtggtatgaagtcatcctcagggctaggatcatctggatcccttagccagaagacccccccttccagtaatagctgcactgcgtcctcaagcagctttagctcatccgggagttccatgtccagctcgcagaatcagcacggctctagcaagggaaagtccccttccaggaacaagaaaccatctctcacagccgtgattgacaagctgaagcacggagttgtaacatctggccccggcggcgaggatcccctcgatggacaaatgggcgtgagcactaatagctcttcacaccctatgtcatcaaagcataacatgagtgggggtgagttccagggaaagcgcgaaaagagcgacaaagacaaatctaaggtctcgactagcggaagttctgtggatagtagcaagaaaacaagtgaatcaaagaatgtgggatcaactggagtcgctaaaatcatcatatctaagcacgacggggggagcccatctatcaaggcaaaagtgaccctacaaaagccaggtgaaagcagcggtgaaggcttgcgcccccagatggcctccagcaaaaactatggttcacctttgatctcagggtccaccccaaagcacgaaagggggtctccatctcacagcaagagcccggcctacactccacagaacctcgatagcgaaagcgagagtggctctagtatcgctgaaaagtcttatcagaattcacctagcagcgacgacggcatcagacccctgcccgaatactcaacggaaaagcataaaaagcataaaaaggagaaaaagaaagttaaagataaagatcgcgatagagatcgggacaaagaccgggacaaaaagaagtcccactctataaagccagagagctggtccaaatcgccaatttcctctgaccaatctttatccatgacgtccaataccatattgtcagctgaccgaccctctaggctgtctcccgatttcatgatcggtgaagaggacgatgatctgatggacgtggccttgatcgggaattag

SEQ ID NO: 194390 - DNA, 1671 bp, synthetic construct
  misc_feature 1..1671: note = Description of Artificial Sequence: Synthetic coding sequence
  source 1..1671: mol_type = other DNA
atgaaggcccagggcgagaccgaggagagcgagaagctgagcaagatgtcttccttgttggaaagacttcatgcgaagtttaatcaaaaccgaccctggagcgaaactatcaagttggtgcgccaagttatggagaaaagagtcgtcatgtcttcgggcggccaccagcacctcgtctcatgtttggagacactgcagaaggctcttaaggtaactagccttcccgcgatgacagacagactggagagcattgctcgccagaacgggttgggaagccatctttcggcatctggcaccgagtgctatatcacctccgatatgttctacgtggaagtgcagctcgaccctgctggacagttatgcgatgtgaaagttgcgcaccacggggaaaatccagtcagctgccctgagcttgtgcaacagcttcgcgagaagaacttcgacgagttctctaagcacttgaagggactggtcaatctttacaacctgcctggagacaacaagcttaaaaccaaaatgtacttggcgctgcagtccttagagcaggaccttagcaagatggcaattatgtactggaaggcaaccaacgccgggcccctcgataaaatcctgcatgggagtgttggttatctgacacccaggtctggagggcacctcatgaacctgaaatactacgtgagccccagcgacctgctggatgacaaaacggcgtcgcccatcattcttcacgagaacaatgtgtccagatccctcggaatgaatgccagcgtgacaattgagggcacttctgcggtctacaagttgcccattgcacccctgatcatgggctcacaccccgtggacaacaagtggacaccttcattctcaagtataacatctgctaactctgtggacctgcctgcatgcttctttctgaagtttccacagcccatacccgtgtctcgtgccttcgttcagaagctgcagaactgtacaggtatccctctgttcgaaacacaacccacatatgcccctctctacgaacttattactcaatttgaactctcgaaagacccagaccccatacctctgaaccataacatgaggttttatgcagccctgccagggcagcagcactgttactttctaaacaaggacgccccattacctgacggaagaagcctgcagggaacactggtttctaagatcacctttcaacatcctggccgggtccccctgatactcaacctgattaggcatcaggtggcctataataccctgatcggctcgtgcgtaaagcgcactatcctcaaggaggactccccaggacttttgcagtttgaggtgtgccccctgagcgagtccagattctcagtctccttccagcaccccgtcaatgactcactggtgtgcgtggtaatggacgtgcaagacagcacacacgtgagctgcaaactttataaaggactctctgacgccctgatttgcacagacgatttcatcgctaaggttgtccagagatgcatgagtattccagtgacaatgcgagctatcaggagaaaggctgaaacgatccaggccgacacgccagcactgagcctcatcgcagagacagtcgaagacatggtcaaaaaaaacctcccgccagcaagttcccctgggtctaagaacccggagctgggcagcggttag

SEQ ID NO: 194391 - DNA, 408 bp, synthetic construct
  misc_feature 1..408: note = Description of Artificial Sequence: Synthetic coding sequence
  source 1..408: mol_type = other DNA
atggccgagaagttcgaccacctggaggagcacctggagaagttcgtggagaatatcagacagctcggtattatcgtctcggactttcagccctcgtcacaagccggcctgaaccagaagctgaacttcatcgtcaccgggctccaggacatagacaagtgtagacagcaattacacgacatcacagtaccacttgaggtgtttgaatatattgatcaaggtaggaaccctcagctgtatacaaaagaatgcctcgagagagccctggctaaaaacgagcaagttaagggcaagatcgacacaatgaagaaattcaagtcacttctgatccaggaactgtcaaaagtgtttcctgaagacatggccaaatatcggtctatccgcggcgaagatcacccacccagctag

SEQ ID NO: 194392 - DNA, 354 bp, synthetic construct
  misc_feature 1..354: note = Description of Artificial Sequence: Synthetic coding sequence
  source 1..354: mol_type = other DNA
atggccacctacagcctggccaacgagcggctgcgggccctggaggatattgagcgcgaaataggcgcaattctccagaatgcgggcaccgtcattttagagctctctaaggaaaaaactaacgagcggctcttggatcgccaggccgccgcgttcacagccagtgtccagcatgtagaagcggagctgagtgcgcagatacggtacctaacccaggttgcaacaggtcagcctcatgaaggatctagctactcctcacgcaaggactgccaaatggcactgaaaagggtggattacgccaggctaaagctgtccgatgttgctaggacctgtgagcagatgctggaaaactag

SEQ ID NO: 194393 - DNA, 6543 bp, synthetic construct
  misc_feature 1..6543: note = Description of Artificial Sequence: Synthetic coding sequence
  source 1..6543: mol_type = other DNA
atggccgccttcggcatcctgagctacgagcaccggcccctgaagcgacccagactgggccctccggacgtttacccacaggatccaaaacagaaagaagatgagctgacagctctcaatgtcaaacagggcttcaataatcagcccgccgtgtcgggcgatgagcacgggtctgccaagaatgtcagtttcaacccggctaagattagctccaacttttcctccattattgccgagaaactgaggtgcaacactctgcccgataccgggcgacggaaacctcaggtcaatcagaaggacaacttttggctggtgacagctaggtcccagagtgccataaacacctggtttactgatctagccgggacaaagccattgacacaactggcaaagaaagtacccatctttagtaaaaaagaggaagtttttggatatctggccaagtacaccgttccagtcatgagagccgcttggctcattaaaatgacttgcgcgtattacgccgccatatcggagacaaaagtcaagaaaagacacgtggacccattcatggaatggactcagattattactaaatacctgtgggaacagctgcagaagatggctgagtactaccgccccggacctgctggcagtggtggctgcggcagcaccatcggcccattgccccatgacgtggaagttgccatacgtcagtgggattatactgagaagcttgcaatgtttatgttccaggacgggatgctcgatcggcacgaatttctcacctgggtgctggagtgtttcgagaaaatccggccaggggaagacgaactgttgaagcttctgctcccactgctgcttcgttactccggagaatttgtccagagtgcatatctcagccggcgccttgcatatttttgtacacggcgattggctctccaactcgatggcgtcagttcccatagcagtcatgtgattagcgcacagtccacatctacattacctacaacgcctgccccccagcctccgacaagttctacacctagtacacccttcagtgatctgctcatgtgcccgcagcaccggccgttggtgttcggcctttcgtgtattctccagaccattctgctgtgttgtccaagcgctttggtctggcattacagcttgacagattctagaatcaagactggttcgcctcttgaccacttacccatcgctccatcaaacctcccaatgcctgaaggaaacagtgcctttactcaacaggtgagggcaaaattacgagagatagagcaacaaattaaagagcggggacaagctgtggaagttcgatggtccttcgataagtgtcaggaagctactgcagggttcaccataggtagggtcttgcacaccctggaggtgctggacagtcacagttttgagagatcagatttctcgaattccctggactctttgtgtaataggatcttcggattagggccctcaaaggacgggcatgaaatctcctcagatgacgacgcggtggttagcctcctatgtgagtgggccgtcagctgtaaacgctcaggaagacatcgcgccatggttgtggcaaagcttctcgaaaagagacaggcagagattgaagctgagagatgcggggagagtgaagctgccgatgagaagggttctatcgcttccgggagtctgtccgcgccttccgccccgatcttccaggatgtcctgttacagtttctagatacccaggcacctatgctgaccgaccccagatcagagtctgagcgggtagaattctttaatctggtgctgcttttctgcgagctgattcggcacgacgtcttctcccataacatgtacacctgcactctcatttcaagaggcgatctcgccttcggcgcgccggggcctaggccaccatctcctttcgacgaccccgcagatgaccccgagcacaaggaggctgaggggtcctccagtagcaagttggaagaccctggcctatcagaaagtatggatatcgatccatcttcttccgtcctgttcgaggacatggaaaagccagactttagcttattcagtccaaccatgccatgcgagggcaaagggtcgccatccccggaaaaacccgacgttgagaaggaagtcaaacctcctccgaaggagaagatagagggcactctgggggttctctacgatcaaccacgtcacgtgcagtatgccactcacttcccaattcctcaggaggagagttgttctcatgagtgtaaccaaaggttggttgtgctgttcggagtcggaaaacaacgggacgatgcccgacacgccatcaaaaaaattacaaaagatatcctcaaagttctcaaccggaagggcaccgctgaaacagatcagttggcccctatcgtcccactgaatcctggcgacttaacgttcttgggcggcgaggacggccaaaagcgtcgtcgtaaccgacctgaggcatttcctactgctgaagacatattcgccaaattccaacatctgtctcattatgatcagcaccaggtgactgcccaggtctccaggaatgttttggaacagattacctcttttgccttgggtatgtcctaccacctcccactggtacaacacgtgcagttcatctttgatcttatggagtattcgcttagcatctcaggcctcatcgatttcgccatccagctcctgaatgagctcagtgtcgttgaagctgagctattgctgaaatccagcgatcttgtaggtagctatactacctccttgtgtctttgcatcgtggccgtcttacgccactaccacgcctgcctgatcttgaatcaagatcagatggctcaagtgtttgaagggctgtgcggtgttgtgaagcacgggatgaaccggtctgacgggtcatctgccgaaaggtgtattctagcatatttatacgacctctatacctcatgctcccatctgaaaaacaagtttggggagttgtttagcgacttttgttcaaaggtgaagaacactatctattgcaacgtcgagccctcggaaagcaacatgcggtgggccccagaattcatgatagacaccttagagaacccagccgcacacactttcacctatacaggactcggaaagtcgctctctgaaaatcccgcaaatcggtactcttttgtgtgtaacgccctgatgcatgtgtgtgtgggccaccacgatcctgatcgggtcaacgatatcgctatactgtgcgccgaactcaccggctactgcaaaagcttgtcggcggagtggctgggggttttgaaagccctctgttgtagcagcaacaacggcacctgtggcttcaacgacttgctctgcaatgtcgacgtctccgacctgtcttttcacgactcactggccaccttcgtcgctatcctgatcgcccgccaatgcctgcttcttgaggacttgattaggtgcgccgctataccttctctgctcaatgcggcctgctctgagcaggatagcgagccaggcgcccgattaacttgcaggatattgctgcacctgtttaaaacaccgcagctgaatccttgccagtctgacggaaacaaacctaccgtgggaatccgctcttcctgcgacaggcacctgttagccgccagccaaaatcgtattgtcgatggcgccgtgtttgccgtgctcaaggccgtctttgtgttaggcgatgccgagctgaaagggtccggctttacggtaacaggcgggaccgaggagcttcccgaagaggagggcggtggcgggagcggggggaggagacaaggcgggagaaacatatctgtggagacagcctcactggatgtgtacgcaaagtacgttctccggagtatttgtcagcaggagtgggttggagagaggtgtctgaaaagcctgtgcgaagactctaatgatctacaggaccctgtgctcagctctgcacaggcacagaggctgatgcagcttatctgttatccgcacaggctactggacaacgaggacggggagaatccccagaggcagagaattaaaaggatcctgcagaacctggatcagtggaccatgcgacaatcatcactagagctgcagctgatgattaaacagacacccaacaacgaaatgaacagtctgctggagaacatcgccaaagcgactattgaggtcttccagcagtccgccgaaacggggtcatctagtggatcaacggcctccaatatgcctagcagcagcaagaccaagcctgtactcagcagcctggagagatctggagtctggctcgtggcaccactcatagccaaattgccaacctctgtgcaggggcacgttctcaaagcagcaggggaggaactcgaaaagggacagcacttgggctcatccagcaggaaagagagggatcggcagaagcagaagtccatgtctttgctgagtcagcagccctttttgtcccttgtgctcacatgcttgaaaggccaggatgagcagcgcgaagggctcctcacttcactgtactcgcaggtgcaccaaatcgtcaataactggcgcgatgatcaataccttgacgactgtaaacccaaacaacttatgcacgaggctctcaagctcagactgaatcttgtgggggggatgttcgacaccgtacagagatcaacacagcagactacagagtgggctatgctcttgctcgagatcatcatcagtggcacggttgatatgcagtccaataatgagctgttcactaccgtactggatatgctgtcagttttgataaacggtacattggctgcggacatgagcagtatctctcaagggagcatggaggagaataaaagggcatacatgaatctggccaaaaagcttcaaaaggagctaggagaacgccaaagtgactctctagaaaaagtacgccaactgctgccactgcccaagcaaacacgcgacgtgattacttgtgaaccgcagggctcattgatcgacacgaaagggaataagatcgctggctttgactctatcttcaaaaaagagggtctccaggtttcaactaagcagaagatctccccgtgggacctctttgaggggctgaagccaagtgcccctctttcatggggttggtttggcaccgtgagggtcgatcgccgagtggcgcggggtgaggaacagcagcgtctgctcctgtatcacacccatctacgccctcgcccgcgtgcgtactatctagaaccactgccattgcctcccgaagatgaggagcccccagcaccaaccctgttggaacctgaaaagaaagctccagaaccccccaaaaccgataaacctggcgccgccccaccttctacagaagagaggaagaaaaagagcacgaaaggcaagaagcgcagtcaaccggccactaagactgaggactatggaatgggcccggggaggagcggtccctacggggtaacggtgccccccgacctgttacatcaccccaaccccggcagcatcactcatcttaattataggcagggctcgatcggtctctacacccagaaccagccattgcccgcaggaggaccgcgcgtggatccctacagaccagtgaggctgcctatgcaaaaactgccgacccgcccgacctatccaggggttctaccaaccactatgactggagttatgggtctggaaccctcatcctacaaaacatctgtgtatcggcagcagcagcccgccgtgccgcagggacagcggttacggcagcagttgcaggccaagattcagtctcaaggtatgctgggccagtccagcgtgcaccagatgacaccgtcttcctcctacggcctgcagactagtcagggctacactccttatgtgtctcatgtagggctgcaacagcacaccggccctgctggcactatggtacccccttcctactcctcacaaccctaccaatctacccatccctcaaccaatcccacactggtcgatccaacacgccatctgcagcagaggccttctggttatgtgcaccagcaggctccaacttatggacatggtctgaccagcacacagcggtttagtcatcaaaccctgcagcagaccccaatgatcagcactatgacacctatgtccgcacaaggtgtccaggcaggcgttcgctccaccgccattctgcccgaacagcagcagcagcaacagcaacaacaacagcaacaacagcagcagcagcagcagcagcaacagcaacaacaacagcaataccatattcgccagcagcagcagcagcagatccttaggcagcagcagcagcagcagcagcaacaacagcaacagcaacagcagcaacagcaacagcagcagcagcagcagcagcagcaccaacagcagcaacaacagcaagctgccccgccacagcctcagcctcagtcacagccgcagttccagaggcaggggttacagcagactcagcagcagcagcagacggcagcactggtcagacaactgcagcagcagttaagcaatacacagccacagccatccactaacatattcggtcgttactag

SEQ ID NO: 194394 - DNA, 6534 bp, synthetic construct
  misc_feature 1..6534: note = Description of Artificial Sequence: Synthetic coding sequence
  source 1..6534: mol_type = other DNA
atggccgccttcggcatcctgagctacgagcaccggcccctgaagagaccacgtctggggcctccagacgtctatcctcaagaccccaaacagaaggaggatgagctgaccgcactgaacgtcaaacagggattcaataatcagcccgctgtctcgggcgacgagcacggaagcgcaaagaatgtgagctttaatccggccaaaatatcctctaatttctcctctattatcgcagagaagctccggtgtaacacgctacctgatacaggtagaagaaaacctcaggtgaatcagaaagataatttctggctggtgaccgcccggagtcagagcgccattaacacttggtttactgatctggcaggcacaaagccactaactcagctcgctaaaaaagttcctatattttctaagaaggaagaggtgtttgggtatcttgccaagtacactgtcccggtgatgcgcgcagcatggctcataaagatgacgtgcgcctactatgccgccatctcggaaacaaaagtgaagaagaggcacgtcgatcccttcatggaatggactcagataatcactaaatatttgtgggaacagctgcagaaaatggctgagtactataggcctggccctgctgggtctggggggtgtggctccacaattgggcctctgcctcacgatgtcgaagtcgctatacgccaatgggattacactgaaaagctcgccatgtttatgtttcaggatggtatgctggaccgacacgaattcctgacctgggtccttgaatgtttcgaaaaaataagacctggcgaggacgagctgcttaagttgcttctccctctcctcctccgctattccggcgagtttgtgcagagcgcctacctgtcacggcggttagcatatttctgcacgcgccggctggccctccagctcgacggcgtatcgagccatagctctcatgtgatctcagctcagagcacctctacactgccaaccacccctgcaccccagcctcctacctctagtactccgtccacaccattctcagatctactgatgtgccctcagcaccggccacttgtgttcggactgtcttgcatcttgcagactatattactctgttgtcctagcgcgttggtctggcattactccctaacagactctaggataaagaccggctctcctctggatcacctgcctatcgcgccatcaaatctgcccatgcctgaaggtaactcagctttcacacaacaggtacgagccaaactaagagaaatcgagcagcaaatcaaggaacgggggcaggctgttgaggttcgatggagctttgataagtgccaggaggccaccgctgggttcacgattggtcgagttttacacacactggaggtgctagatagccactcatttgagaggtcagacttctccaactccctggacagtctctgtaaccgaattttcggcttaggaccgagtaaagacgggcatgagatctcctctgatgatgatgccgttgttagcttgctgtgtgagtgggccgtttcgtgcaagaggagcgggcggcacagggctatggtggtcgccaagttacttgagaaacggcaagctgaaatagaggccgaaagatgcggcgaatccgaggccgccgacgagaaaggctcaattgcaagcggaagcttgtccgctccttccgctccaatctttcaagatgtgctgctgcagtttctggatacacaggcaccaatgctgactgatccaaggtccgagtcagagagagtcgaattttttaacctcgtcctgttattctgcgagttgatacgccatgacgtgttctctcacaatatgtacacgtgtacactcattagcaggggtgatctggcatttggcgcccctggacctaggcccccatccccattcgacgatcccgcagacgatcctgagcacaaggaagctgaggggtctagctccagtaagctggaggacccaggtttatcagaaagcatggacatcgatccaagttcctccgtcttgtttgaagacatggaaaagccggacttctccctcttctcccctaccatgccctgtgagggtaaggggtctccttcacctgaaaagccggatgtggaaaaggaagtcaagccacccccaaaagagaagatagaaggaacactgggagtcctgtatgatcagcccaggcacgttcagtacgcaactcattttcctatcccccaagaagagagctgctcacatgagtgtaatcagcgcctggtggtcctcttcggggtaggcaaacagcgggacgatgctaggcacgctatcaaaaagataactaaggacatattgaaagtgctgaacagaaagggaaccgctgagactgatcagcttgcaccgattgttcccctcaacccgggtgacttgacctttctcggaggcgaggatggtcagaaaaggcggaggaatcggcctgaagccttcccaactgccgaggacattttcgccaagtttcaacacctttcccattacgatcagcatcaggtaacagcccaagtgtccagaaatgttctggagcaaattacaagttttgctttgggtatgagctatcatctgccattagttcagcatgtgcaatttatttttgatttgatggaatatagcctgtctatttctggactgatcgacttcgccattcagctccttaatgagctttcagtggtggaggctgagctactgctgaagtcatccgacctggtgggcagctacacgactagtctgtgcttgtgcatcgttgccgttttgcggcattaccatgcttgcttgatcctgaatcaggatcaaatggcgcaggtattcgagggattgtgcggcgtcgtgaagcatgggatgaaccggtcagatgggtccagtgccgagaggtgtattctggcctacctgtacgacctatacacaagttgttctcacctcaaaaataagtttggagaattattttccgacttctgcagtaaggtaaagaacaccatctactgtaatgtcgaaccatcagagtctaatatgagatgggcgcccgagtttatgattgacactctggagaacccagcagcacatacattcacatacacggggctggggaaatcactctcagagaaccccgccaatcgctactcattcgtgtgcaacgcactgatgcacgtttgcgtggggcatcacgatcctgatagagtcaacgacatagctatactttgtgcagagttaacaggatattgcaaatctttgtcagccgagtggttgggcgtgctcaaagccttgtgctgcagctccaacaacgggacctgtgggttcaacgacctcctgtgcaatgtggacgtttcagacctgtcttttcacgactccctggccacttttgtggccattcttattgccagacaatgcctgctgctcgaggatttgattcgctgcgccgctatcccctccctcctcaatgcagcttgttctgagcaagactccgaacccggggctcgccttacatgcaggatcctgttacatctgttcaagaccccacagcttaatccgtgccaaagtgatggcaataaacctaccgttggcatccggtcttcctgtgaccggcaccttctggccgcgagccagaataggatcgtggacggcgcagtgtttgcagtgttgaaggcggtgtttgtgctaggcgacgctgaactgaagggctctggtttcactgtaacgggtggaacagaagagttgcctgaagaggagggagggggaggcagtgggggccgtagacagggaggcagaaatatatccgtcgagacggcctctcttgatgtgtatgccaaatacgtgctcaggtcaatttgtcagcaagagtgggtgggcgagaggtgtctgaaatcactctgtgaagactccaatgatctccaggacccggttctcagctcggcgcaggctcagaggttaatgcaactgatctgttatccccacagactacttgataacgaagatggcgaaaaccctcaacggcagcggatcaaacgcatactgcagaacttagatcagtggaccatgcgacaaagttcactggaactgcagctcatgattaaacagacccccaacaacgagatgaattcacttctcgagaatatagccaaggccaccatcgaggtcttccagcaaagtgccgagacaggctctagtagcggctcgactgcttccaacatgcctagtagttcaaagactaaaccggtcttgtcctccctggaacgctccggagtgtggctcgttgctccccttatcgccaagcttccaacgtccgtgcaggggcacgtacttaaagccgctggggaggaactcgagaaaggccagcatttgggttcatcctctcgtaaagaaagagaccgtcagaagcagaaatcgatgtctttgcttagccagcaaccgtttttatctttggtactgacttgtctgaaagggcaagacgaacagagagaagggctgctcacgagcctttattcacaggtgcaccaaatcgtgaataattggcgagatgatcagtacctggacgactgtaagccaaagcagctgatgcacgaagcactcaaattaagactgaacctggtgggcggcatgttcgacactgtccagagaagcacccagcagacgacggagtgggccatgctgttgcttgaaatcattattagcggcaccgtggacatgcagagcaacaacgagctgttcactactgtgctcgatatgctgtctgtgctcattaatggcacccttgccgccgacatgtcatcaatttcacagggttcaatggaagaaaacaaaagggcatacatgaatttggcaaaaaagcttcaaaaggagctgggtgaaaggcaatcggattcactggagaaggtgcggcagctgcttccactgcccaaacaaactagggatgtcattacttgtgaaccccagggaagtttaatcgacacgaagggcaataagatcgctggcttcgacagcatttttaaaaaggaaggccttcaagtttctaccaagcagaagatctctccatgggatctgttcgaagggctgaagccctctgcccccctgtcatggggatggttcggcactgtcagggtggaccgacgagttgccagaggtgaagagcagcaacgcctgctgttgtatcacacacaccttaggcctcgccccagagcatactacctagaacctctgccactcccccctgaagacgaggagccgccagctcctacattactggaaccagaaaaaaaagcaccggaaccacccaagacagataagccgggagccgctcccccctcaaccgaagaaagaaaaaaaaagagcacaaagggtaaaaagaggagtcaaccagcgaccaagacagaagactatgggatgggccctggtcggtccggaccctacggggtcactgtgccacctgatttgctgcaccaccccaatccaggatcgatcacgcacctgaactaccggcaaggcagcataggactatacacccagaaccagcccctgcccgccggaggacccagggtggacccataccgcccagtacggcttcctatgcagaaattgccaacccgtcctacctaccctggggtccttccgaccactatgaccggtgtgatgggactggagcccagtagctacaagacctctgtatacaggcaacaacagcctgctgtgccccaggggcagaggctgcgacagcagttgcagcaatcccagggcatgctgggacagtcttccgtacatcagatgacacccagctcctcgtatggactacagactagccagggctacacaccatatgtatcccacgttggactccagcagcacacgggcccagccgggaccatggtcccgccatcttattcctctcagccctatcaatccacacatccaagtaccaatccgaccctggtcgaccctacacgacaccttcagcagcggccatccgggtatgttcaccagcaagcccccacgtacggacacggactcactagcacacagagattttctcaccagaccctgcagcagacccctatgatctcaacaatgacaccaatgtctgcacagggcgtgcaggcaggggtacgttccactgccatcctgccggagcaacagcagcaacaacagcagcagcagcaacagcagcagcaacagcagcagcagcaacagcaacaacagcaacagcagtatcacattcgacaacagcagcagcagcaaatactacgccaacaacaacaacaacagcagcagcagcagcagcagcaacagcagcagcagcagcaacagcaacaacagcagcagcagcatcagcagcagcagcagcagcaggctgccccaccccagccccagccccagtctcaaccccaattccagaggcaaggtctgcaacagactcaacagcaacagcagaccgctgctctggttagacagctgcagcaacagttgagcaatacgcagccacagccctctaccaacattttcgggcgctattag

SEQ ID NO: 194395 - DNA, 6531 bp, synthetic construct
  misc_feature 1..6531: note = Description of Artificial Sequence: Synthetic coding sequence
  source 1..6531: mol_type = other DNA
atggccgccttcggcatcctgagctacgagcaccggcccctgaagaggcccaggctgggtcctcccgacgtctatccccaggaccctaagcaaaaggaagacgagctgactgcactgaacgttaagcagggcttcaataatcagcccgctgtgtccggggacgagcatggctccgccaagaacgtgtcattcaaccccgcaaagattagcagcaacttcagtagcatcatagcagagaagctgcggtgcaacacattgccggacacaggtcgccggaagccccaggtaaaccagaaggataacttctggcttgtcacagcccgcagtcagtcggcgattaatacgtggttcactgacctcgcaggcacgaagccgctgacccagttagccaagaaggtgccaattttttccaaaaaggaggaggtgtttggttatcttgcgaagtacacagtaccagtgatgcgcgctgcttggctgatcaaaatgacttgtgcctattatgccgccatcagtgaaacaaaagtcaagaagaggcatgttgacccgtttatggaatggactcagatcatcactaaatatctctgggagcagctacagaaaatggcagagtattaccgcccgggaccagcaggctccgggggctgtggatcgaccatcggcccacttccacatgacgtagaggtcgctataagacagtgggactacacagagaaactcgcgatgttcatgttccaggatggaatgttggaccgccacgagtttctgacctgggtcctcgaatgttttgagaagatcagacccggagaggacgaactactgaagctcttattaccactcctcctccgctatagcggagagttcgtgcagagtgcctatcttagccggagactcgcgtatttttgtacccgtaggctcgccctacagcttgacggcgtctcatcccacagttcacacgttatcagtgcgcagtccacgtctaccctgccaaccactccggccccacaaccccccaccagtagcacacccagcactccgttctctgatttactgatgtgcccacagcatcggcccctggtgttcgggttgtcctgtattttgcaaacaatcctgctgtgctgtccttccgcactggtgtggcattatagccttacagacagtcggattaagacaggtagccctctagatcacctccctattgcaccttctaacttgcctatgcctgaagggaactccgctttcacccagcaggtcagggcaaagctgcgcgaaatcgaacagcagattaaggaaagagggcaggcagtcgaagtacgctggtcatttgataaatgccaggaagctaccgctgggtttacgatcggcagagttctgcacacgctggaagtgctggactcccacagctttgagagaagcgatttctcgaatagcttggattccctctgtaaccgtattttcggactgggcccatcaaaagacggacacgagatcagtagtgatgatgatgctgtcgtgtcgttgctttgtgagtgggctgtgtcctgcaaaagatctggaagacaccgtgccatggttgttgcaaaactgttagaaaagaggcaggcagagatcgaggctgagaggtgcggggaaagcgaggcagccgacgaaaagggtagcattgcttctgggagcctgagcgccccatcggcccccatctttcaggacgttctcctccaattcctggacacccaggcccctatgctcaccgatcccaggtctgagagtgaacgggtcgagttctttaacctcgtcttgctgttctgcgagctgatcaggcacgacgtcttcagtcacaacatgtacacatgtacacttattagtcgcggtgacctagccttcggagcgccaggcccccgaccaccgagtccctttgacgaccctgctgacgatccagagcataaggaagcagaaggcagctcctcttcgaaacttgaagacccaggacttagtgagtcaatggatattgatccctcgtccagcgttctgttcgaagatatggagaaacctgatttctccctgttttccccaaccatgccatgtgaggggaaaggtagtccatcgcctgagaaacccgatgttgaaaaagaagtcaagcctccccccaaggagaagattgaaggaactctaggcgtgttgtacgatcagcctagacatgtccagtatgctacccattttcccataccgcaggaagaatcctgctcccacgagtgcaaccaaaggctggtggtgctcttcggagtcgggaagcagagggacgacgctcggcacgctattaaaaagatcaccaaagatattctcaaagtcttaaacagaaagggcacggccgagacagatcagttagcaccaatcgtgccccttaatcctggtgatctgacttttttgggcggcgaggatggccaaaaacgccgccgtaaccggcctgaggcattccctactgcggaggatatcttcgccaaattccagcatctgagtcactacgatcagcaccaagtgactgcccaggtatcccgcaacgtgctggagcagataaccagcttcgctcttggaatgtcctatcacctccctctggtgcaacacgtgcaatttattttcgatttaatggagtacagcctgtctatcagcggactgattgacttcgccatccagttgttaaacgaattgtctgtcgtggaagccgagctgctactgaaaagctctgatctcgtggggagctacaccacctctctgtgtctgtgtatagtggccgtccttagacactatcatgcttgcctcatcctgaatcaggaccaaatggcgcaggtgtttgagggtctatgcggggtggtgaagcacgggatgaatcgatccgacggctcctcggcagagcgatgcattctggcatacctatatgacttgtatacctcctgctcccatcttaagaacaaattcggggagcttttctccgatttttgctccaaggtcaagaatacaatctactgtaatgtagagccttctgaatccaacatgcgatgggctccagagttcatgattgatacactggagaatccagcagcccataccttcacctataccgggttagggaaaagcctgtctgagaaccccgctaatcggtacagctttgtgtgtaatgccctcatgcatgtctgcgtgggacatcacgaccctgatagggtcaatgacattgccatcctgtgcgctgagctgactggctattgtaagagtctgagtgcggagtggctgggagtcctgaaagctctctgctgcagtagcaataacggtacatgtggatttaacgacctgctgtgtaatgtggacgtgtccgacctcagtttccacgattcactcgccaccttcgttgcaatcttaatagcccgacagtgtcttctgctggaagacctgatcaggtgcgccgccatcccgtctctgttgaatgctgcttgcagcgagcaggactcagaaccgggcgctcgccttacttgcagaatcctgctgcacctgtttaagacccctcagctgaacccttgtcagagcgatggcaacaagcctacggttggcattaggtccagctgcgaccgtcatctgctggctgcaagtcagaacaggattgtggacggggcagtgttcgccgtgcttaaggcagtgtttgtgttaggagacgccgagcttaaagggtctggttttacagttactggcgggaccgaagagctacccgaagaggaaggcgggggcggttcgggagggcgtaggcaaggcggaaggaacatcagcgtcgagactgcttccctggatgtatacgccaagtacgtgctgagaagcatctgccagcaggagtgggtcggcgagaggtgcctgaagagtttgtgcgaggattccaacgaccttcaggatcctgtgctgtcctctgcacaagcccagcgattaatgcagctcatctgctacccccatagactcttggataacgaggatggggagaaccctcagcgtcaacgcattaaacgcattcttcagaatctggaccaatggacgatgcgtcaaagctctctagagttgcaactgatgattaaacagaccccaaataacgaaatgaactccctcctggaaaacattgccaaagcaacaattgaagtttttcagcagtcagccgaaacagggtccagtagcgggtcgactgccagcaatatgccgtcatcttcgaagactaagccggtgctctcatcccttgaaaggtcaggcgtatggttggtcgctcctttgattgctaaattgcctacctccgtgcagggccacgtgcttaaagcagcaggagaggaactcgaaaagggtcagcacctggggtctagcagtcgaaaggaaagagatcgtcagaagcagaaatctatgagcctgctgagccagcagcccttcctgagccttgtcttgacgtgcctgaaaggccaggacgagcagagagaaggactgctgacaagcttatacagtcaggtccaccagattgtgaacaactggagagacgaccagtatctcgacgactgcaaacccaaacagctgatgcatgaggcgcttaaacttcggttaaacctggtggggggcatgttcgacacagtgcagcgctccacccaacaaaccactgaatgggcaatgttgctgttggaaattataatctcaggaactgtggatatgcagagcaataacgaactctttacaacagtcctagacatgttatctgtgcttatcaacggaactctggctgccgacatgagctctatcagccaggggtccatggaggaaaataagagagcctatatgaatctggccaaaaagctgcaaaaagaactcggcgaaaggcaatctgacagccttgagaaagtcagacagctactccccctgcctaaacaaactcgggatgtgatcacctgcgaacctcagggcagcctcattgacactaaaggtaacaagatcgccgggtttgactcaatcttcaaaaaagaggggctgcaggtaagtaccaaacagaagatctctccctgggaccttttcgagggcctgaagccatcggcccctctctcctggggctggttcgggacggtccgcgtagacagaagagttgcgaggggtgaggagcagcaacggctgttgttataccatacccacctccggccacgtccacgtgcttactatttggaacccctgcctctgcctcccgaagacgaggagcccccagccccaactctgctcgaaccagagaagaaggcccccgaaccacccaagaccgataagcctggagccgctccaccctctaccgaagaacgaaagaagaaatccacaaaggggaagaaaagatcacagcccgcaaccaagacggaggactatggtatgggccccggaagaagcggcccttatggagtcacggttccccctgatttgttgcaccacccaaatcccggatctatcacgcacctaaactaccgccagggttccatcggactttatactcagaatcagcctctcccagctggaggaccgagagtcgacccatatcgccctgtccgcctgcctatgcagaaactacctactcgtccaacttacccaggagtcttgcctaccaccatgaccggtgtcatgggccttgagccctcttcgtataaaacgtcagtttatcggcagcagcagccagctgtgccacagggtcagagactgcgtcagcagctgcagagccagggcatgctcggccaaagcagtgtgcatcagatgactccctcatcttcctacggcctccagacctcccaggggtacaccccctacgtgagtcacgttgggctacagcagcatacagggcccgccggcacaatggttccaccatcctattcatcgcagccttaccagtctacacatccctccaccaaccccacactggtagatcccacaagacacctgcaacaacgccccagcggttacgtacaccagcaggcccctacctacggccacggcctgacctctacgcaaaggtttagtcatcagaccctgcagcagaccccgatgatatcaacaatgacaccaatgtccgcacaaggtgtgcaggcaggtgtccgcagcaccgccattctccccgaacagcagcagcagcagcaacagcagcagcagcagcagcaacagcagcaacagcaacagcagcagcagcaacagcagcagtatcatatccgtcaacagcagcagcagcagatattacgccaacagcagcagcagcagcagcagcaacagcagcaacagcagcaacagcagcagcagcagcagcagcagcagcaacagcatcagcagcagcaacagcaacaggcggccccccctcagccacaaccacagtcccagccccagttccagcgccaaggtttgcagcagacccagcagcagcagcaaacagcagcactcgtgcggcaactgcagcaacagctcagcaacacccagccccagcctagcacaaatatatttgggcggtattag

SEQ ID NO: 194396 - DNA, 393 bp, synthetic construct
  misc_feature 1..393: note = Description of Artificial Sequence: Synthetic coding sequence
  source 1..393: mol_type = other DNA
tgaacccccaaccggcggcggaagaagcagctgaacgccgccttccttccccaggatgaactgacagccctgaacgtgaagcagggatttaacaatcagccagccgtgtccggggacgaacacggcagcgccaagaacgtgagtttcaatcccgctaagatctcttctaatttctcttctattatcgctgaaaagcttagatgcaacactcttccagacaccggaaggcgtaaacctcaggtaaaccagaaggataatttttggctggtcacggcccgcagccagtctgctataaacacgtggtttacagacttagcaggcactaagccacttacccagctggcaaagaaagtgccaatcttcagtaaaaaggaggaggtcttcgggtactag

SEQ ID NO: 194397 - DNA, 6384 bp, synthetic construct
  misc_feature 1..6384: note = Description of Artificial Sequence: Synthetic coding sequence
  source 1..6384: mol_type = other DNA
gaggacgagctgaccgccctgaacgtgaagcagggcttcaacaaccaaccagctgtctctggagatgagcatggttcggctaagaatgtaagcttcaaccctgccaagattagtagcaatttttctagtatcatcgccgaaaaactccggtgcaatacattgcctgacactggccgcaggaagcctcaggttaatcagaaggataacttctggcttgtgaccgctcggtcgcagtccgccatcaatacatggtttacagacctggccggcaccaaaccgcttacccagctcgcaaaaaaagtccctattttctcaaagaaggaggaggtgtttgggtacctagctaaatacacagtcccggtcatgcgagcggcttggctgattaagatgacttgtgcttattacgcagccatttctgagactaaagtcaagaaacggcacgtagatccatttatggaatggacgcagataatcacaaagtatctctgggagcagctccaaaaaatggccgagtattacaggccagggcctgccgggagtggaggctgtggcagcaccatcggacccctgccacacgacgtggaagtggccattcgccagtgggattatacggagaaactggccatgttcatgttccaggacgggatgctggatcgccacgagtttctgacctgggtgttggaatgtttcgaaaagattcgtcctggtgaggatgaacttcttaagttgctcctccccctgctcctgcgctacagcggggagttcgtccagagtgcataccttagccgtcggttggcctacttttgcaccaggaggctggccctgcaactggatggtgtgtcgtctcacagctcacatgtgatttcagctcagtcgacctctacactaccgactactcccgcgcctcagccccctacatcgagtacaccctctactcccttttccgatctcttgatgtgtccacaacatcgcccccttgtgttcggcctctcctgtattttgcagacaatcctgctgtgctgtccttcagcacttgtgtggcattatagtctgactgattccagaattaaaaccggctcacccctcgaccatcttcccattgcccctagtaatctgccaatgccagagggtaactctgctttcacccagcaagtgagagccaaactgagggaaatagaacagcagataaaagaaaggggccaagccgttgaagttcggtggtctttcgataagtgccaagaggcgaccgctggattcaccataggccgtgtgttgcatactctggaggtgctggactcacattcctttgagcggtctgactttagcaactctctggactccctatgcaaccggatctttggacttggtccatccaaagacggtcacgagatcagctccgacgatgatgccgtcgtttcactgctgtgcgaatgggccgtgagctgtaagcgctcgggccggcacagagctatggtcgttgccaagttactggagaaaaggcaggcagagattgaggctgaaaggtgcggggagagcgaggcggccgatgaaaaggggagcattgcatctggaagtctgagcgccccatccgccccaattttccaagatgtcctgctgcagttcctggatacacaggcaccaatgcttacagaccctcgtagcgagtcagaacgggtggaattcttcaacctcgtcctgctgttttgcgagttaattaggcatgacgtcttttcccacaacatgtatacatgtaccctgatctcccggggggacctggcctttggcgctcccggcccccgaccaccatcacctttcgacgaccctgctgatgacccggaacataaagaggccgaagggtccagcagctccaaactggaggatcctggactgtccgaaagtatggacattgacccctcttcttcagtgctgtttgaggatatggagaagccagacttttccttgttttcccccaccatgccctgcgaagggaaaggatcaccctcacctgaaaagccggatgtcgaaaaagaggtgaagccgccaccaaaggagaaaatcgagggcacactgggtgtgctgtatgaccagccccggcatgttcaatacgccactcactttcctattccgcaggaagaaagctgttctcacgagtgcaaccagagactcgtagttctgttcggcgtgggcaaacagagggacgatgcacgccatgctatcaagaaaattaccaaagatattctgaaagtcttgaatcgcaaggggacagcggagaccgatcagcttgcccccatagtaccgttgaatccgggcgaccttaccttcttggggggcgaggacggtcagaagcgcagacggaaccgacctgaggcctttccaaccgctgaagatattttcgcaaaattccagcacctctcccactacgatcagcaccaggtgacggcccaggtatctcggaacgtgcttgaacagatcacctccttcgccctgggcatgtcttaccacctaccacttgttcagcatgtccaattcatttttgatttaatggagtattctttgagcatctccggacttattgacttcgccattcagctgcttaatgagctgagcgttgtagaagccgaattacttctgaagtctagtgacttggttggctcctacaccacttctctgtgcctgtgcattgttgcggtgctgagacactaccacgcatgcctgatccttaatcaggaccagatggctcaagtcttcgaaggcctctgcggggtggtgaagcatggaatgaacagatcggatggaagtagcgccgagcggtgtattctcgcttatctttatgacctctatacaagttgctcccacttgaaaaacaaattcggggagctcttcagtgacttctgctcaaaagtgaagaacactatttattgcaatgttgaaccctccgagagcaacatgaggtgggctccagaattcatgattgacacactggaaaatcctgcggcacatactttcacatatactggcctcggaaagtcattgagcgagaaccctgccaatcgctattccttcgtctgcaacgcgctgatgcatgtgtgtgtgggccaccatgacccagacagagtaaatgacatcgccattctgtgtgcggagcttactgggtactgtaagtccctatcggccgagtggttgggcgtattaaaagccctctgctgctcctctaacaacggcacttgtggcttcaacgatctgctatgtaatgtggatgtctcggatctctcctttcacgacagcttagccacatttgttgcaattctaatagcccggcagtgcttattacttgaagacttaattagatgcgcagctatccctagcctgctgaatgcagcctgctccgagcaagatagcgaacccggggcccgattgacatgtcgtattctcttacaccttttcaagacaccccaactaaatccctgtcagagtgacggaaacaaacctacagtgggcattaggtcatcttgtgaccgacacctgctcgccgcgagccagaaccgcatagtggacggcgccgtattcgccgtccttaaggctgtgttcgtgctgggcgatgccgaactcaagggaagcggattcactgtaaccggcggaactgaagagcttccggaagaggagggcggggggggtagcggcgggcgacggcaggggggccgtaatatctcagtggagacagctagcttagatgtctacgcaaaatacgtcctgaggtctatctgtcaacaggaatgggtgggcgagcgatgtctgaagagcttgtgtgaggattctaatgacttacaagatcccgtgctgtctagtgctcaggcccagagattgatgcagctcatttgctatcctcacaggctcttggataacgaagacggtgaaaacccccagaggcaacggatcaaaagaatactccagaacttggaccaatggacaatgcgccagtcctcactcgaactccagcttatgatcaagcagacacctaataatgagatgaactctttgttagaaaacatcgccaaggctacgattgaagtgtttcagcagagtgccgaaactggctccagctcaggctctacagcgagcaacatgcccagttcgtccaaaaccaaacccgtcttaagcagcctggagcgatccggcgtatggctagtggcacctctgatcgcgaagctgcctactagcgtccagggtcacgtgctcaaggcggctggtgaagaactggaaaaggggcagcatttgggatccagctccaggaaggagagggataggcagaaacagaagtccatgagtctcctctcccagcaacctttcttgagtctggtattaacctgcttaaagggacaagatgagcaaagagaggggctgctgacgtcgctctactcacaggtgcaccagatagtcaacaattggagggacgatcaatatctggatgattgtaagccaaagcagcttatgcacgaggcgctgaaactccgcctcaacctggtgggtggcatgttcgatacagtgcagcggtcaacacaacagaccaccgagtgggctatgctgttgctggagatcattattagtggcacagtcgatatgcaaagtaacaacgaactgttcaccacagtactggatatgctctcagttctgatcaatggaactctcgccgcggatatgtctagcatatcacagggctctatggaagagaacaagagagcttatatgaatttggctaagaaactacagaaagaactcggggaacgccagagcgattctttggagaaagtacggcagctactgccgctaccaaagcagacccgggatgtcattacctgtgagccacaggggtccctgattgacacgaagggcaacaaaatcgcgggattcgattcaatctttaaaaaggagggccttcaggtgagcaccaagcagaaaattagtccttgggaccttttcgaggggcttaagccctcagctcccctttcctggggctggtttggaaccgttagagtggaccggcgagtcgctcgaggagaggagcagcaaagactgctcttatatcatacgcatcttaggccacgcccccgcgcgtactatctggagcccctcccactgccacccgaagacgaggaaccacccgcccccacgctcttggagcccgagaaaaaagcaccagaacccccaaaaacagataaacccggagctgcccccccctccacagaggagcgcaagaagaagtctaccaaagggaaaaaaaggagccaaccagctactaaaactgaggattacggcatgggacccggccggtcggggccttatggcgtgacagttccaccagacctgctgcaccacccgaaccccggatcaatcacccatctgaactatagacagggttcaatcggtctgtatacccagaatcagccactccccgccggtggtcctcgtgtggacccttatagaccggtacgtttgccgatgcagaagctgcctacccggcccacctaccccggggtactgccaacaaccatgacgggagtgatgggcttggagccgagctcgtataagacatctgtctaccgccaacagcaaccagccgtacctcaaggccagagactgaggcagcagctgcagcagtcacaaggtatgttaggccagtccagcgtgcaccaaatgacacccagctctagctacgggcttcagacttcacagctctccccaagcagtctgcagggatacaccccctacgtgagtcatgttgggctgcagcaacatacaggcccagctgaccctacgcgccacctgcaacagagaccatccgggtatgtccatcagcaggcacccacttatggccatggtttaacttccactcagcgcttcagccaccagacgttgcaacaaacaccaatgattagtacgatgaccccgatgtctgcccaaggagtacaggccggggttcgaagcaccgcaatactgcccgaacaacagcagcagcaacagcaacagcagcagcagcagcagcagcagcaacagcagcagcagcagcagcaacagcaacaataccatattcggcagcagcagcagcagcaaatcctgcgtcagcagcagcaacagcagcaacagcaacagcagcagcagcaacaacagcagcagcaacagcagcagcagcaacagcagcatcaacagcagcagcaacagcaggcagccccaccccagccacagccacagtcccagccccagttccaacgccaggggttgcagcaaacacagcagcagcagcagaccgccgctctggttcgccagctccaacaacagctgtccaacacgcagccacaacccagtacaaacatttttggaaggtactag

SEQ ID NO: 194398 - DNA, 2778 bp, synthetic construct
  misc_feature 1..2778: note = Description of Artificial Sequence: Synthetic coding sequence
  source 1..2778: mol_type = other DNA
ggcggcagcggcggccggcggcagggcggccggaacatcagcgtggagaccgcgtccctcgatgtttacgccaaatacgtgctccgaagcatttgccagcaggagtgggttggtgaacgctgcttaaaaagcctgtgcgaggactccaatgacttacaggatccagtcttatcatctgcgcaagcccagcgactcatgcagctcatatgctatccccatagactgttagacaatgaagatggagaaaatcctcagcggcaacgaatcaagagaattctacagaatctggatcagtggacaatgcgccagtcttccctggaactacagttgatgatcaagcagacccctaataacgaaatgaactccctgttggagaacattgctaaggctacgatcgaggtgtttcagcaaagcgccgagactgggagtagcagcgggagtaccgcctcaaatatgcctagttcatctaagacgaaacctgtcctgtcttccctggaacgttcaggagtgtggctagtagcacccctgatcgccaagctgccgacttctgttcaaggacacgtgcttaaggcggctggtgaggagttggagaaagggcagcacctgggttcttcatcccgtaaagaacgcgataggcaaaaacaaaaaagtatgagtctgcttagtcagcagccttttctgagcctcgtcctgacctgtttgaaaggacaggacgagcagcgcgagggtcttctgacctcgttgtactctcaggtacaccagatcgtgaataactggagggacgaccagtatctggacgattgcaagcctaagcagctcatgcacgaagcattgaagctccggctgaacctggtcggcgggatgtttgacactgtacagcgcagtacccaacaaaccacagagtgggctatgctcctgctagaaataattataagcggaacagttgatatgcaatctaacaatgagttgttcaccacagtccttgacatgctttccgtgctgattaatggtactctggctgctgatatgtctagcatcagtcagggctctatggaagaaaacaaaagggcgtacatgaatctagctaaaaagcttcagaaagagttgggcgaacgccagagtgatagcctagagaaggtcaggcagcttctgcctcttccaaaacagacccgggacgtgatcacgtgtgaaccccaggggtctctgatcgacactaagggcaacaaaatagccgggttcgattcaatcttcaaaaaagagggcctgcaggtctcaacgaagcaaaaaatttcgccctgggatctcttcgagggcctgaagccttctgctccactttcgtgggggtggttcggaacagttagggtcgaccgccgagtggccagaggcgaggaacagcagaggctgctgttgtatcacacccatcttaggcccaggcctagggcctactatctagaacctttaccactgcctcccgaagacgaagagcctcctgcaccgactttactcgagcccgaaaaaaaagctccagagccacctaaaacagacaagccaggagctgcaccacccagtaccgaagagagaaagaaaaagagtactaagggaaagaaacgcagccagcctgccactaagaccgaagattacgggatgggacctggaagaagtggcccctatggggtaactgtacctcctgatttactgcatcaccctaatccaggcagtatcacgcacctgaattatcgccaaggatcaatcggcctttatacacagaaccagcccctcccagcgggcggcccaagagtcgacccctacaggccagtaaggctgcctatgcaaaagctccctacccgccctacttaccccggcgtgctcccaacaactatgacaggagtgatgggcctggagcccagctcctataagacgtccgtgtatcgacaacagcagcccgctgttccacagggacagcgactgcggcagcagctgcaagcaaagattcagagccagggtatgttagggcaatcaagcgtgcatcagatgacgccctcaagctcttacggcctccagacttcccagggatatacaccatacgtgagtcatgtcgggctccagcagcataccggacctgcggggacgatggtgccgccttcctactcttcccaaccctaccagtctactcaccctagcactaatccaaccctggtggacccgaccaggcatctgcaacagcgcccaagtggctacgtgcaccaacaagcgcccacttatggacatggactaaccagtacccagcgtttttcacatcaaacgctgcagcagacgcccatgatttctacgatgacgccaatgtcagcccagggcgtccaggccggggtcaggtctacagccatcttacctgagcagcagcaacagcagcagcaacagcagcagcaacaacaacagcaacagcagcagcagcaacagcaacaacaacagcagtaccatataagacaacaacaacaacaacagatcctccgccagcaacagcaacaacagcagcagcaacagcaacagcagcaacagcaacaacaacagcagcagcagcagcagcagcagcaccaacagcaacaacaacagcaggctgctccaccccagccccagccccagagccagcctcagtttcagagacaggggcttcaacagacccagcagcagcagcaaacagccgctctggtgcgtcagctgcagcagcagctcagcaatacccagccccagccaagtacgaatatatttggaagatattag

SEQ ID NO: 194399 - DNA, 756 bp, synthetic construct
  misc_feature 1..756: note = Description of Artificial Sequence: Synthetic coding sequence
  source 1..756: mol_type = other DNA
tgagagcggaagaagaagagcaccaagggcaagaagcggagccagcccgcaacaaagacagaggattacggtatgggcccaggcagatcaggcccctacggcgtcaccgtaccccctgatctcttacatcatcccaacccaggaagcataacccacctgaattatcgccagggctcaatcggactgtatacacagaatcagccgctgccagcaggcggccctcgggtggatccttataggcccgttcgcctgcccatgcagaagctcccaacgagacctacatatccaggggttttacccaccaccatgacaggggtaatgggcctcgagccttcatcatataagaccagtgtctaccgccagcagcagccagccgtaccacagggccagagactaaggcaacaactccagcagtctcagggcatgcttggtcagtcgtccgttcaccagatgaccccttcatcgagttacggtcttcagacaagtcaaggctacacaccctatgtgtctcatgttggactacagcagcacaccggcccagccgatcccacacggcatctgcagcagaggccatcaggatacgtccatcaacaggcacctacctatgggcacggtcttacatcaactcagcgatttagtcatcagactctgcaacaaacccccatgataagcacgatgaccccgatgtcggcgcaaggcgtacaggccggtgttcggagtacagcaatactgcccgagcagcagcaacagcagtag

SEQ ID NO: 194400 - DNA, 6003 bp, synthetic construct
  misc_feature 1..6003: note = Description of Artificial Sequence: Synthetic coding sequence
  source 1..6003: mol_type = other DNA
atggccgccttcggcatcctgagctacgagcaccggcccctgaagaggccccggttaggtcctccagacgtgtacccacaagaccccaagcaaaaggaggatgagctgaccgctttaaatgtgaaacagggcttcaataaccagcctgccgtgtcaggcgacgagcatggtagtgcaaaaaatgtgtcttttaacccagccaaaattagtagtaacttttctagcattattgccgagaaactgcgttgtaacacattgcctgacacgggcaggcgcaagcctcaggtgaaccagaaggacaatttttggctggtgacggcaaggtcccagtctgcaatcaatacttggtttaccgacctggctggcacaaagcccctgacgcagctggccaagaaagtgcccatctttagtaaaaaggaggaggtgttcggatacttggccaagtacactgtgccagtcatgagagctgcctggctgatcaaaatgacgtgtgcttactatgccgctatctctgagactaaagtcaagaaaaggcacgtcgatcccttcatggagtggacccagatcatcactaaatatctgtgggagcagctgcagaagatggccgagtactaccgcccagggccggccggctctggcggatgcgggagcacaatcggtcccctccctcatgacgttgaggtggccattcggcagtgggactatacggaaaaacttgccatgttcatgtttcaagacgggatgcttgaccgccatgaattcctgacttgggtgctcgaatgttttgagaaaattagacccggagaagacgaactactgaaactgctcctccctctccttctgcgctattccggggagttcgtgcagtcggcctacctgtctaggagactcgcctatttttgcacaagaaggttggccctgcagctcgacggcgtgagctcacacagtagtcacgtcatttctgcccagagtacgtcaacacttcccactactcctgcaccccagccaccaacgtcgtcgacaccaagtactcccttctcagatctactcatgtgccctcagcaccggccccttgtctttggactgtcctgcatcttgcaaactatcctcctctgttgtcccagcgcgctcgtctggcattacagcctaacagactccaggatcaagaccggaagccccttggatcacctgccaatcgcacccagcaatctgcctatgcccgaagggaattctgctttcacccagcaggtgagagctaaactgagagaaattgagcagcaaataaaggaacgcggtcaagctgtagaagttagatggtcatttgataaatgccaggaggccactgccgggtttacaatcggtagggtactgcacaccctggaagtgcttgattcccattctttcgaacgtagcgatttttccaatagtctcgattccctgtgcaaccggattttcggacttgggccgagcaaggatggacacgagatatcaagtgacgacgacgccgtagtgtcactgctatgtgaatgggccgtgtcctgcaagaggtccggtcgacacagggccatggttgtggctaaactgctcgagaagcgtcaggcagagatcgaggctgagcgctgtggtgagagcgaagcggcagacgagaagggaagtattgcctcaggctccttatctgccccctcagcacccatcttccaggatgtgcttctccagtttcttgacactcaggccccaatgctgactgatccccgcagcgaatccgaaagagttgagttttttaacctcgttcttctgttttgtgagctcatccgtcacgacgtttttagccacaacatgtatacctgcaccctcatatccaggggggatctcgcctttggcgctcctggacctcgaccaccctctccattcgatgatcctgccgatgaccctgagcataaagaggcagaggggagtagctcctctaagctggaagatcctggactgagcgaaagcatggatattgacccgagtagttccgtacttttcgaggacatggaaaaacctgacttttctctgttcagtcccaccatgccatgtgaggggaagggatccccaagccccgaaaagccagatgttgaaaaagaagtcaaacctcctccaaaagaaaaaatcgaaggcactcttggggttttgtacgatcaaccacgccacgtccaatacgccacgcacttccccattccgcaggaggagtcatgttcccatgagtgcaatcaaagactggtggtcctgttcggggttgggaagcaacgggacgatgctcgccatgccattaagaagattactaaggatattctgaaggtgttaaaccgtaaggggacagccgagaccgatcagcttgctcccatagtaccgctgaacccgggggacctgaccttcctgggcggcgaggatggacagaaacgacgaaggaatagaccagaagcattccccactgcagaggatatctttgctaaattccagcatctcagccactatgaccagcatcaggttacagcccaggtctcaaggaacgtcctggagcagatcacatccttcgcacttggcatgagctatcatctcccactggtgcaacacgtgcagtttatctttgatcttatggaatatagtctttctatcagcggcctgatcgattttgccatccagctgctcaatgaactgtctgtggtggaggctgagctgctgctcaagtcaagcgaccttgtgggatcctacacgacaagtttgtgcctgtgtatcgtcgctgttctaagacactatcacgcatgtctgattctgaaccaggatcagatggctcaggttttcgagggcctgtgcggcgtggtgaaacatggcatgaatagatctgacggatctagcgccgagcgatgcattcttgcttatctgtacgacctgtacaccagctgctctcacttgaagaataagtttggggaactgttctccgacttctgctccaaagtcaagaataccatctattgcaacgtcgaacctagtgaatccaacatgcgttgggcgccagagttcatgatcgacaccctcgaaaatccagctgcccatacttttacctacactggcctggggaagtctctgtccgaaaacccagccaatcgttacagctttgtatgtaacgctctaatgcacgtttgcgtgggacatcatgatcctgaccgtgtcaatgatattgcgatactatgcgccgagctcacgggttactgcaagagtctctcagccgagtggctgggcgtcctaaaagctctgtgctgttcctctaacaatggcacttgtggatttaatgaccttctgtgcaacgtcgacgtttctgatctctcattccatgactccctggctacctttgtagctattctgattgcaaggcagtgcctgctgctggaggacttgattcgttgcgccgctattcctagcctgctaaacgccgcgtgctccgaacaggactccgaaccaggagctaggctcacttgtcgtatcctgctgcatcttttcaaaacccctcaactgaacccctgccagagcgacggtaacaaacccaccgtggggattaggtcatcatgtgacaggcatttattagccgcctcccagaaccgaatcgtggacggcgctgttttcgccgtgttaaaggccgtcttcgtgttgggggatgcagagctgaaaggtagtggattcacggtgacgggtggcacagaagaactccctgaagaggagggaggggggggctctgggggccggcgacagggtggcagaaatatatctgtagagacggcaagtctcgatgtgtatgctaaatacgtcctgcgcagcatttgccagcaggaatgggtgggcgagagatgcctcaaatccctgtgtgaagactcaaacgacctgcaggaccctgtgctctcttcagcccaggcacaacggttgatgcagttgatctgctacccccaccgcctgttagacaacgaggacggtgaaaatccacaacgccaaagaatcaagaggattctgcagaacctcgatcaatggaccatgcgccagtcttctctggagttgcagctcatgattaagcagacgccgaacaatgagatgaactccctcctagagaatatcgcaaaagctaccattgaggtatttcaacagagtgcagagaccggtagcagctctggcagtaccgcaagtaacatgccatcatcatccaaaaccaagccagtgctgtcatccctggaacgaagcggcgtgtggctggtggcacccctgatcgctaaattgcctacatccgtacagggtcacgtcttaaaggcagcaggggaggagctggagaagggccagcatctgggcagttcatctagaaaggaacgggacagacagaaacagaagtcaatgagcttactgtcccagcagccctttctcagtctggtgctgacctgcctaaaaggccaggacgagcagagagagggtctgcttacttctctttactcgcaggtgcaccagatcgttaataactggcgggacgaccaatacctcgacgactgtaaacctaaacagctcatgcacgaagcactgaagctgcggctgaatttggtcggcggaatgttcgatactgtgcagcggtcgactcagcagaccactgaatgggccatgctcttactggagataataatatccggcactgttgacatgcagtctaacaatgaactgttcactaccgtactggacatgctatcagtgctcatcaatgggacattagccgcggacatgtcatcgatcagccagggaagcatggaggaaaataaacgggcatacatgaatctcgctaaaaaactgcagaaagagctgggcgaacgccaaagcgacagcttggagaaagtgcgccaacttctgccactccccaagcaaactcgcgatgttatcacttgtgagccccagggcagtctgatcgacacaaaaggcaacaagatcgctgggtttgattctatctttaagaaagaaggactgcaggtttctaccaaacaaaagatctccccctgggacctctttgagggtttgaagccatccgctcccctatcttggggatggttcgggactgtccgagtggacaggagagtggccaggggggaggagcagcaacggctccttctgtaccacactcacttgaggcctaggccgagggcctattacctcgaaccccttccactgccccctgaagatgaggagccacccgctcccaccctcctggaacctgagaaaaaggctcctgagcctcctaaaaccgacaaacctggagctgcaccaccatccacggaagaacgaaagaaaaaatccacgaagggcaaaaaaaggtctcagcccgctactaagaccgaagattatggaatgggccccggcagatctggcccgtatggagtgaccgtccctccagatctcctgcaccatcccaatccgggctcaatcacccacctcaactaccggcaggggtcaataggattatacacgcaaaatcagccgcttccagccgggggtcctagagtagatccttaccggccagtgagattgccaatgcagaagttgcccactcggccgacctatccaggggttctccccacaacaatgaccggagtgatggggctggaaccttcttcctacaaaactagtgtgtatcggcaacagcagccagctgtaccccagggtcagagactgaggcagcagcttcaacagtcacagggcatgctggggcagtcaagcgtgcaccagatgacccccagttcttcctatggtttgcagacatctcaggggtacacaccttacgtgtcacatgttggcttacaacagcatacaggtcctgcagaccccactaggcacctccagcagcgcccttccggatatgtccatcaacaagccccgacatatggtcatggtctgacctctacccaaagtttccacacccgccactgttcaagacacccatag

SEQ ID NO: 194401 - DNA, 2271 bp, synthetic construct
  misc_feature 1..2271: note = Description of Artificial Sequence: Synthetic coding sequence
  source 1..2271: mol_type = other DNA
atggccgccttcggcctgctgagctacgagcagcggcccctgaagagacctaggctgggaccgcctgacgtttacccccaggatcctaagcagaaggaagatgagctgacagctgtgaatgtgaaacagggcttcaataaccaaccagcgtttacgggggacgagcatggcagcgcgcggaatattgtgatcaacccaagtaaaattggggcttacttcagtagcattctggctgagaagctgaaactaaatacctttcaagacaccgggaagaagaaaccccaggtaaacgctaaagacaactactggctggtgaccgcccgcagccaatccgccattcatagctggttcagcgacctggctgggaataagcccttatccatcctggccaaaaaagtacccatcctgtccaagaaagaggacgtgttcgcctacttagctaaatattccgtccccatggttagggcgacatggctgataaaaatgacatgcgcgtactacagtgcaatatctgaagcgaagatcaagaagcgtcaggcacctgacccaaatttagagtggacgcagatttctacaaggtaccttagggaacaactcgccaagatctcagacttctatcatatggcatccagcacaggagatggtcctgtacctgtgccccctgaggtcgaacaagcaatgaaacagtgggaatacaatgaaaaattagcttttcatatgttccaggagggcatgctcgaaaagcatgagtatctcacctggatcctggacgtgttggaaaagataaggcccatggatgatgatcttctgaaactgctcctcccattaatgttacagtacagcgacgaattcgttcagagtgcatatctgagccgacggctagcttatttttgtgctaggcgcctgtctctgttactctctgatagcccaaacctgcttgcggctcactctccccacatgatgatcggtccgaataacagttccattggggcaccatcccctggcccccctgggccagggatgtcacccgttcaactagcctttagcgactttctcagctgtgctcagcatggaccactggtgtacggtctatcatgtatgttacagacagtcacactgtgttgccctagcgcattggtatggaactattcgacgaatgagaacaaatcagccaatcccggctcccctcttgatttgctgcaggtagcccccagcagtctcccaatgccaggcggtaatactgctttcaatcaacaggtacgggcgaggatctacgaggtggaacagcaaatcaaacagcgcggccgggcggtcgaagtcaggtggtcattcgataaatgtcaggagagcaccgcaggcgtgacaatatcgcgcgttctgcacacgctagaggtgttagacagacactgttttgaccgaacagactcctctaactctatggagactctatatcataaaatattctgggcaaaccaaaataaggacaaccaagaagtagccccaaatgatgaggctgttgtaacccttttgtgtgagtgggctgtcagctgtaagcgctctggcaagcatcgagccatggctgtggcaaagttgctggaaaagcgccaggctgagattgaggccgagcggtgcggggaatctgaggtccttgacgagaaggagagtatatcctcttcttcgcttgcaggctcaagcttgccggtcttccaaaacgtgctccttaggtttcttgacactcaggcaccttccttgtccgatcctaactccgagtgtgagaaggttgaattcgttaacctggtgttgctcttttgcgagttcataaggcacgatgtgttctcccatgatgcgtatatgtgcaccctgatctctcgcggagatctgagcgtgaccgcgtcgacacgcccccggagtcccgtgggagaaaacgctgacgagcactattctaaagatcatgacgtaaagatggaggagcagtccattatggctcatatgggaattgactctggaaccacaaacatttttgatgaagtcgataaaagtgacttcaagactgacttcggtagcgagttccctatttttagccccatgccaggtgagagctgtgaaaacgccaacacaagtctgggtaggagaatgagcgtcaactgtgagaagctggtcaagcgggagaaaccccgcgagctgatctttccatcgaactacgaccttctgaggcacctgcagtatgctactcattttccgatcccgctggtttctcattgcttctcttag

SEQ ID NO: 194402 - DNA, 2166 bp, synthetic construct
  misc_feature 1..2166: note = Description of Artificial Sequence: Synthetic coding sequence
  source 1..2166: mol_type = other DNA
atggccgccttcggcctgctgagctacgagcagcggcccctgaagcgccctagactgggccctcccgacgtttatccacaggaccctaagcagaaagaggacgagcttacagcagtaaatgtgaaacaaggctttaataatcagcctgccttcacaggagacgaacatgggtctgctcgcaatatcgtaattaacccttcaaagatcggcgcctacttctcctcaattctggccgaaaaacttaaacttaatacgttccaggataccggaaagaagaagccccaggtcaatgccaaggacaactattggctcgtcacagccagatctcagagtgcgattcattcgtggtttagcgacctggccgggaacaagccacttagtatcttagcaaagaaagtgcccattttgtccaaaaaagaggatgtgtttgcgtatttggccaaatactcagtgccaatggtgagggcaacatggttgatcaaaatgacctgtgcctattacagcgccatttccgaggccaaaatcaagaagcgtcaggcaccagacccaaatctggaatggacacaaatcagcactcgttacttgcgcgagcagctggctaagatttccgacttttatcacatggcatctagcacaggagacggtccagtgcccgtccctccagaagtggagcaggccatgaaacagtgggagtacaatgaaaagttggcctttcatatgttccaagagggtatgttagagaagcacgaatatctgacttggattctcgatgtgctggagaagattcgacctatggacgatgatctcctcaagcttctgctcccactaatgttacagtatagcgacgaatttgtccagtctgcttacctgtcaaggcggttagcgtacttttgcgctcgcaggctgagcctcctactgagtgactcccctaatttactggccgctcactcccctcatatgatgatcggcccaaataattcatcaattggggccccctcaccggggccccctgggccagggatgtctcctgtccagttagcgtttagcgactttctttcatgcgcccaacacggacccctcgtctatggcctgagttgtatgctccaaaccgtcaccctgtgctgtcccagcgcgctagtttggaattatagcactaacgagaataaaagtgccaatcccggatcccccttggatctgctccaggtggcgcccagctcccttcctatgcctggtggaaataccgccttcaaccaacaggtgcgcgcaaggatctatgaggtggaacagcagatcaaacagcgaggcagggccgtcgaggttcgatggtcattcgataagtgtcaggagtctacagctggtgtgacaatttccagagttctgcatactttggaggtgctcgacagacactgctttgacagaacagattcttccaactcaatggagacgctctatcacaagatcttctgggcgaatcagaataaagataaccaggaagtcgccccaaatgacgaggcagttgtgacacttctgtgcgaatgggcagtgtcttgcaagcggagcgggaagcaccgcgccatggcagtggctaaactgttggagaaaagacaggcggaaatagaggcagagcgctgcggcgaatcagaagtactcgacgaaaaggagtctatctcctcttccagtctggccggctccagtctgcctgtctttcagaatgtccttctgagattcctggatacccaggcgcctagcctgagtgatcccaactctgaatgcgagaaggtggagtttgtcaatctcgtcctgctgttttgcgaatttattcgtcacgacgtgttctcccatgatgcatatatgtgcactctcatctctcgcggtgacctgtctgttacagcttcaacccgccccagatccccggtaggggagaatgcggatgaacactattcgaaggatcatgacgtaaagatggaaatcttctctcctatgccaggagaatcctgcgagaatgctaacacctcgctcggacggcgtatgtctgtcaactgcgaaaaattagttaagcgcgaaaaaccaagagaactcattttccctagcaactatgacttattacgacatctgcagtatgctactcactttcccatacctctggtgtcccactgtttctcctag

SEQ ID NO: 194403 - DNA, 6438 bp, synthetic construct
  misc_feature 1..6438: note = Description of Artificial Sequence: Synthetic coding sequence
  source 1..6438: mol_type = other DNA
atggccgccttcggcctgctgagctacgagcagcggcccctgaagcgaccacgcttaggcccacccgatgtctacccacaagaccccaaacagaaggaagacgagctgaccgcggttaacgtcaaacagggattcaataaccaaccagctttcacaggcgacgaacacgggagtgctcgtaatatcgtcattaatccttctaagattggcgcttactttagttctatcctagccgaaaagctgaagctcaatacctttcaggatacaggcaagaaaaagccacaggtgaatgcaaaggataattactggcttgttactgcccggagccaatctgctattcatagttggttctcggatctggcagggaacaaacctctatctattctggcaaagaaggtacccatactctctaaaaaagaggatgtctttgcctaccttgctaaatactctgtccctatggtgcgcgccacatggttgatcaaaatgacatgcgcgtactacagcgcaatatccgaggctaaaatcaaaaaaagacaagctcctgatcccaacttggaatggactcagatctccacccggtatctgcgtgaacagttggcaaaaatctcagacttctaccatatggcgagctcaaccggagatgggcctgtgccggttccacctgaggtcgagcaggctatgaagcaatgggagtataatgaaaaactggcgttccatatgtttcaggaaggtatgttggaaaaacacgaatatctgacttggattctcgacgtgctcgaaaagataaggcccatggacgacgacctcctgaagctgctgttgcctctgatgctccagtacagcgatgagtttgttcagtcagcatacttaagcaggaggcttgcctatttttgcgcccgtaggctttcacttctactctccgactcgcctaacctccttgctgcccatagcccccatatgatgattggtccaaacaatagctccattggcgcaccatcgccagggccaccaggccccggaatgtcacctgtacaattggccttctccgacttcctgagctgtgcccagcatggtccactggtctacggactgtcatgcatgctgcaaacagtaaccctttgctgccctagtgccctggtctggaactacagcacaaacgagaacaagtccgccaatcctggcagccctttggacctactgcaggtcgcccctagctctctccctatgccgggtggtaatacagcgtttaaccagcaggtgagggcaagaatctatgaggtcgagcagcagattaaacagcggggccgagctgtggaagtgcgatggagttttgacaagtgtcaagagagtacagcaggcgtcacaatatctagagtcctccacaccctggaggtcttagatcggcactgctttgacagaaccgacagtagcaattccatggaaacactataccataaaatcttttgggcaaatcagaataaagacaatcaggaagttgctccaaacgacgaagcagtcgtgaccttgctctgcgagtgggcagtgtcttgtaagcggtctgggaaacaccgtgctatggctgtagctaagttgctagagaagcgacaagccgaaatcgaagcagagcgatgtggcgagagcgaggtgttggacgagaaggagtctatatcttcttcctctcttgcgggctcttcactgcctgtgtttcagaacgtgctgctgagattcctcgacacacaggccccgtctctgtcagatcccaattccgagtgtgagaaagtcgaatttgtcaatctcgtcttgctcttctgtgagttcattcgacacgatgtcttctctcacgatgcctatatgtgtactctgatttctcgaggcgatctgagcgtgaccgcttccacccgaccgaggtcaccggttggagaaaatgccgacgaacattattccaaggaccacgacgtcaaaatggagattttttcccctatgcctggtgaaagctgtgaaaatgccaatacaagcctaggacgccgtatgtcagtgaactgtgagaagttggttaaacgtgaaaagcccagagagttaatcttcccctctaattacgacctgttgagacacctgcagtacgctacccattttccgatccctcttgacgagtccagcagtcacgaatgtaatcaaaggacaatccttctgtatggtgttggcaaagagagagacgaggctcggcatcagttgaagaagatcacaaaggacatcttaaagatcctgaacaagaagagcactactgaaacaggtgtgggcgacgagggtcagaaagccaggaaaaacaagcaggaaaccttcccgaccctggaaaccgtttttaccaaactccagttgttaagctactttgatcagcaccaagtgacatcgcagatcagtaacaacgtgttggaacagatcacaagcttcgcgtccgggactagctaccacctgcctctggctcaccatatccagctcatctttgatctaatggaacccgcacttaatatcaatgggcttatcgacttcgccatacaactgttaaacgaacttagtgtggtagaagctgagcttttgctgaagagctctagcctagccggctcttacacgaccggactctgtgtttgtatcgtcgccgtgttaagacgctatcacagctgcctgatcctaaaccccgaccaaactgcacaggtgtttgaggggctgtgtggcgtggtgaagcacgtggtaaaccctagtgagtgctcttcacctgaaaggtgtatcttggcatatctgtacgacttatacgtcagctgttcccacctgcgatctaagttcggggacttgtttagctccgcctgctcgaaggtgaaacagacaatctacaacaatgtcatgcctgctaatagcaacttacgctgggacccagacttcatgatggacttcatagaaaacccctcggcccggtccattaactactccatgttgggtaaaattctctctgacaacgcggctaatagatacagtttcgtctgcaacactctaatgaatgtgtgcatgggtcaccaggacgcgggccggatcaacgatatcgccaatttctccagcgagttgactgcttgctgtactgtcctgtcaagcgagtggctcggagtgctgaaggctctttgctgttccagtaatcacgtgtggggattcaacgatgtgctttgcactgtggacgttagcgacttgtcctttcatgattcacttgctactttcatcgccatactcatcgctcgacagtgcttcagtctggaagatgtcgtgcagcacgtcgcgctcccaagcctcctggcagctgcttgtggtgatgccgatgccgagcccggtgctcggatgacttgccggctcctgctgcacctgttccgcgcaccccaggcatgcttcttaccgcaagcaacagggaaacccttcccaggcattaggagctcatgtgatcgccatctgcttgccgctgcccacaatagtatcgaggtgggagccgtcttcgccgtgttgaaagccatcatgatgttaggggatgctaaaataggtaacaattcagttagttctcttaagaatgacgacttcaccatgagaggcctacgctgtgacggcaatgccgatgatatctggaccgcaagccagaacccaaagtcgtgcggcaagagcatctccatagagactgccaacctgagggaatatgcccgttacgtcctgagaaccatctgccaacaggaatgggtcggggaacattgtctaaaggagcccgagcggttgtgcacggacaaggagcttattctcgaccccgtgctgtccaatatgcaggcgcagaagctcctgcagctgatctgctatcctcacggtatcaaggagtgcaccgagggggacaatctgcagaggcagcatatcaaacggatacttcaaaacttggaacagtggaccttgcggcagagctggctggaactacagcttatgattaaacaatgtttgaaagaccccggatccggcagcgtcgccgaaatgaacaacctgttggataacatagcaaaagcaacaatcgaggtatttcagcagtccgccgatctcaataatagtagtaatagcggcatgagcttgttcaatccgaactcaattggttccgctgatacctcttccaccagacagaatgggatcaagacgttccttagttcgtccgagagaagaggggtctggttagttgcccccctgatagctcggctgcctacctccgttcagggccgggtgttgaaagccgctggagaggagctggagaagggccagcacctgggaagctcctcaaaaaaggagagagaccggcagaagcagaagagcatgagtctgctctcccaacagccgtttttatccttggtgctgacttgtctcaaaggccaggatgagcaacgtgaaggactcctgacctccctgcagaatcaggtgaaccagattttatctaactggcgggaggagagatatcaggatgacatcaaagcccgccaaatgatgcacgaagccctccagctgcggctgaacttggtgggcggaatgttcgataccgtgcagcgatctacccaatggacaacagattgggcattgctgctactccaaatcatcacttctggaactgtggatatgcacaccaacaacgagctgtttactacagttctcgacatgctgggagtgcttataaacgggaccttagccagtgacctttcaaatgcttcacctggtgggagcgaggaaaacaaaagggcatacatgaacctagttaaaaaactgaaaaaggagttgggcgataagcggtccgagtcaatagataaggttcgtcagctgttacccttgccaaagcaaacttgtgacgtcattacttgtgagccaatgggctcactaatagacaccaaaggcaacaaaattgccggattcgactctatcgacaagaaacagggtctgcaagtatccactaaacagaaagtcagtccgtgggacctcttcgagggccagaagaatcctgctcctctctcctgggcctggtttggaaccgtccgcgtggacaggcgagtgattaagtatgaggagcagcatcacttactgctctaccatactcatcctatgcccaaacctcgcagttactatctccaaccactccccctaccacccgaggaagaggaagaagaacctacgtcacccgtgagccaggagcctgaacggaagagcgccgaactctctgaccagggaaagactactacggacgaggagaaaaaaacaaagggtcggaaacggaaaactaaatcctcaagcagggtggatgagtaccctcagtcgaacatctacagggttcccccaaactacagccctatcagctcccagatgatgcatcatccccagtccacactctggggatacaatttggtcggtcaaccccagcagccggggttcttcctgcaaaaccagagcctgacacccggcggctctcggctggatcctgctggcagctttgtccccactaatacaaagcaggccctgagcaatatgctccaaaggaggtcgggcgctatgatgcagcctccctctctgcacgcaattacatctcaacagcagttgatccaaatgaaactgcttcaacagcagcagcaacaacgactgctcagacaagcccagacgagacctttccaacagggacaaccgggggatcaagccgccctattcgctgctcaggcccgaccctccccacagcttccccaataccctgggctgcagcaagctcagaccatgcctcagggatataccatgtacggaacacaaatgcccttgcaacagaccagtcagcagcaggcaggctccgtggtccttagcccaagttataactctcgcgcttatccagcggctcactcgaatcctgttctgatggagcgccttagacagatccaacagcaaccttccggatacgtccagcagcaagccagcccttatttgcaacccctgactggatcccagcgacttaaccaccaggcccttcagcaaagtcccctcgtgggagggggcatcgatgcagtgttaacatcagctcaccccaatcttccttctgtccccctgcctcaggatcctatgcggcctagacagcctcaggttaggcagcaacagagactgttgcagatgcagcagcctcagcaacctcagccacaacagccaccacagcctcagcaatcgtcccagagccagagccaaactctgggtcttcaggccatgcagcctcagcaacctctgttcccccgtcagggactgcagcagacacagcagcagcagcagaccgcggctcttgtccgacagctccagaagcaattgtcaagcaatcagcctcagcagggagtcacaccatatggacatcccagtcatttttag

SEQ ID NO: 194404 - DNA, 6522 bp, synthetic construct
  misc_feature 1..6522: note = Description of Artificial Sequence: Synthetic coding sequence
  source 1..6522: mol_type = other DNA
atgagcgccagcttcgtgcccaacggcgccagcctggaggactgccactgcaacctgttctgcctcgccgacttaactggaatcaaatggaaaaaatatgtgtggcaaggacccacctctgcaccaatactctttccagtcactgaggaagatcccatattaagctcctttagcaggtgtctcaaggctgatgtgctgggggtttggcggcgggaccagcgacccggacggagagaactctggattttctggtggggagaagatccagttttgctgacccttttcacaatgacctatcaaaagaagaaaatggaatgtggcagaatggactttcctatgaatgccgtgctgtgctttcaggctgtccacaaccttctcgaaaggtgtttgatgaataggaatttcgtccggatcggaaagtggttcgtgaagccatatgagaaagacgagaagcccatcaataagtcagaacacctatcctgctctttcacattttttttgcacggagactcaaacgtctgtacctctgtggaaattaatcagcaccagcccgtgtacctcctaagtgaagagcacatcaccttagcacaacagagtaattcaccctttcaggttattctgtgcccatttggcctgaatggaactcttaccgggcaggcattcaaaatgagcgactcggctacaaaaaagcttatcggagaatggaagcagttctacccaattagttgttgcctgaaggagatgagcgaagaaaagcaggaggacatggactgggaggatgactctctcgccgctgtggaggttttggtggcaggggttaggatgatctacccagcttgcttcgtcctggtccctcagagcgatatccccaccccgtctcccgtaggcagtacccactgtagtagtagctgcttgggcgtccaccaggtgccagcttcgacccgggaccctgctatgagcagtgtgaccctgacacctccaacttcgcctgaggaagttcagaccgttgacccccagtctgtccagaaatgggtgaaattttctagtgtttcagatggtttcaacagcgacagtactagtcaccatggcggcaaaatccctcggaaactggccaaccacgtggtggaccgggtgtggcaggaatgtaatatgaatcgggctcagaacaagcgtaagtattctgcgtcctcaggaggattgtgtgaagaagcaacagccgcgaaggtcgcaagttgggactttgtggaggcaactcagcgaactaattgcagctgtttacggcacaagaacctgaaatcaaggaatgcaggtcagcagggacaagctccaagccttgggcagcaacaacagatcctgcctaagcacaagactaacgagaaacaggaaaagtctgaaaaaccccaaaaaaggcctctcacgcccttccatcaccgggtgagcgtcagtgatgacgtcggaatggacgctgatagtgccagccaacgcctcgtgatctctgcgcctgatagccaggtcagattctctaacataaggactaatgatgtggccaaaaccccgcagatgcatggcactgaaatggctaatagcccacagccacccccactcagcccccacccctgcgacgtggtggacgaaggtgtgaccaagactccttccactccacagtctcaacatttctatcaaatgcccacacctgatccactggttcccagcaaacccatggaggaccggatcgattccctgagtcagtccttccccccccagtaccaggaggccgtagaacccaccgtgtatgtcggcactgctgtcaatctagaagaggatgaggcgaacattgcttggaagtattacaagtttccaaagaagaaggacgtggaatttctgcccccgcagcttccaagtgataaatttaaggacgatcccgtaggaccctttggccaggagtccgtgacgtcggtcaccgagttaatggtgcagtgtaaaaaacccctgaaggtatccgacgaattggtgcagcaataccagataaagaaccaatgcctgtcagctatcgctagtgacgccgaacaggagcccaagattgacccatatgcattcgttgagggcgatgaggagttcttgtttcctgataagaaggaccgtcagaacagtgaaagggaggccgggaagaagcataaagtcgaggacgggacaagctctgtgaccgtactgtcgcatgaagaggatgctatgtctcttttctcacccagtattaaacaagatgccccacgccctacttcacacgctagacctccgagtacaagtctcatatacgattccgatttagccgtcagctacacagatttagataatctcttcaatagtgatgaagatgaattgacccccgggagcaagaagagcgctaatggcagtgacgacaaagcttcatgtaaagagtccaaaaccggcaatctcgacccactgtcctgcatcagcaccgctgacctgcacaaaatgtatcccactccacccagcctggagcaacacataatgggcttctcccctatgaatatgaataacaaggagtacggttctatggacacgactcctgggggcactgtgctcgagggaaactctagcagtatcggcgcacagttcaaaatcgaggtcgatgaaggattttgcagccccaaaccctcagagattaaggattttagctatgtctataagcccgagaattgccagattctcgtggggtgtagcatgtttgctccgctcaaaaccctgccatcacaatatttgcctcctatcaaactgccagaggagtgtatctacaggcagagctggacggttggcaagcttgagctgctgtcaagcggtccatccatgccctttatcaaggagggtgatggctcaaatatggatcaagaatacggaactgcctatactcctcagacacacacttcttttgggatgccgccttcatctgctcctccttctaatagcggcgctgggatactcccctccccttccaccccccgtttccctactcctagaacaccgcgcacaccacggacaccaagaggcgcaggcggtccggcctctgcccagggaagcgttaagtatgaaaactccgatttatactccccagctagtacaccctctacgtgtcgacccctgaacagcgtggagccggctacagtcccaagcatacctgaggcccactccctgtatgtgaatctgatactgagtgagagtgttatgaatctttttaaagattgcaattttgattcctgttgcatctgcgtgtgcaacatgaacatcaaaggagcggatgtgggtgtctatatcccagatcctactcaggaggctcaataccggtgtacttgtggcttcagcgctgttatgaacagaaagtttggcaataattccggactcttcctagaagacgagttggacattatcgggcgcaacactgactgcggaaaagaagctgagaagaggttcgaggccttgagagcgaccagtgcagagcacgtgaatggagggttgaaagagagcgagaagcttagtgacgatctgatcctccttctgcaagatcagtgtacaaatctgttcagcccttttggagctgctgaccaggacccgttccccaagagtggagtcatctccaattgggtgagagtagaggaacgggattgctgcaatgactgctatctggctctcgaacatggaagacaatttatggataatatgtccggagggaaggtggatgaggcccttgttaaatctagctgcctgcatccttggagcaaaagaaacgatgtaagcatgcagtgttcccaagatatcctccgtatgctgctcagcctgcagcccgtgctgcaggacgccatccagaaaaaacgcactgttcggccttggggcgtgcaaggccccctgacctggcagcaatttcacaaaatggctggtagaggtagttatgggaccgacgagtcgcctgaacctttgcctattccaacctttctcttgggatacgattatgattacctagtgctgtcacccttcgccctcccctactgggagaggttaatgctggaaccttacggctctcagcgggatatagcttacgtagttctgtgccctgagaatgaggccctcctaaatggggccaaaagtttttttcgagatttaacagctatctacgagtcctgccgtctgggtcagcaccgtcctgtgagccgcctcctcacagacgggatcatgcgggtgggttcgacagccagtaagaaactaagcgagaaactcgtggctgagtggttttcccaagcagccgacggaaacaatgaggccttctcaaaactgaaactttacgcacaggtgtgcaggtatgacttaggaccctacctcgccagcttgcctctcgactcgtctttgttgagtcagcctaacttggtggcccccacttcccagagcttaatcacaccaccacagatgaccaatactgggaacgccaacacgccgtcagctaccctcgccagcgccgcaagctctacaatgactgtgacaagcggcgtcgcaatttccacgtccgtggcgactgccaactccactctgacaacagcaagcaccagttcttcatcgtcctctaacttgaattcaggagtgagcagcaataagctgccatcttttccccccttcgggtcaatgaactctaacgccgccggaagcatgagcacccaggcaaataccgtgcaaagcggccagctcgggggccagcaaacctctgcccttcagactgccgggatctctggagagtctagctctctccctacacagccgcacccagatgtgtccgaatcaactatggatagggataaagtaggaatccctactgacggcgatagccatgctgtcacatacccacctgctattgtggtgtatatcatcgatccatttacctatgagaacaccgacgagagcaccaattcttcgtctgtctggaccctgggactgctgcggtgctttcttgaaatggtgcagactttgcctcctcacatcaagtccaccgtatcggtgcagatcatcccctgtcagtatctgctccaaccagtcaagcatgaggatcgggagatctacccgcagcaccttaagtccctggcattctccgcattcacacagtgccgccgccccctccccacaagcaccaacgtgaaaaccctcaccggtttcggacctggcctggccatggaaacagcactccggagcccagatagacccgaatgtatacggctgtacgccccaccctttattctcgcccccgttaaagacaagcaaactgaactcggtgagaccttcggagaggccggccaaaagtataatgtgctgtttgtggggtattgtctgtcgcacgatcagcggtggattctggcaagctgtacggatctgtatggtgagctactggagacctgtatcatcaatatcgacgtgccaaaccgagctcgcagaaagaagtcatcagcccggaagtttggcctccagaaactttgggaatggtgtctgggtttggtacagatgagctcgttaccatggagagtggtcatcggacgtctgggcaggatcgggcatggagaattgaaagactggagttgcctgctgtctcggaggaaccttcagtcgctttctaagaggctaaaggacatgtgtcgtatgtgcggtatctctgccgccgatagccctagcatactgtccgcatgcttggttgcgatggagccacaggggtcatttgtcattatgcccgactccgtttctacgggttctgtgttcggtagatctaccacactgaatatgcagacatctcagctgaacaccccgcaggatacaagttgcacccacattttggtttttcccacatcagcctcagtacaggtggctagcgccacatacacgacagagaatcttgatctggccttcaaccctaacaatgatggagcagacggcatggggatcttcgacttgctggataccggcgatgatttagacccagacatcatcaacatcctgccggcctcacccaccggaagccccgtccattccccgggcagtcactatcctcacgggggggacgctggaaaaggccagagtacagaccgcctactcagcactgagccccatgaagaggtgccaaacatcctccagcagcctctcgcattggggtactttgttagcacggcaaaagcaggtccattgcccgactggttttggtctgcctgcccacaggcacaatatcagtgtcctttgttccttaaagcctcattgcacctgcacgtcccatcagtccaatcagacgaactgctacactcaaagcactcccaccctctggatagcaaccagactagcgacgtgttgagattcgttctggagcagtacaatgctctcagctggcttacttgtgaccctgctacccaagaccgcaggtcatgcctgccaatccactttgtcgtgttgaatcagctatacaacttcattatgaacatgctttag

SEQ ID NO: 194405 - DNA, 6525 bp, synthetic construct
  misc_feature 1..6525: note = Description of Artificial Sequence: Synthetic coding sequence
  source 1..6525: mol_type = other DNA
atgagcgccagcttcgtgcccaacggcgccagcctggaggactgccactgcaacctcttttgtcttgctgacctcacaggtatcaagtggaaaaagtacgtgtggcaaggaccaactagcgcccctattctgtttccagttactgaggaagatcctatactcagttcattttctcggtgtctcaaggccgacgtcctaggcgtctggcgccgggatcagcgcccaggtagaagggaactgtggatcttctggtggggggaagacccgtcatttgcggacctgatacatcacgacttaagcgaggaggaggatggagtgtgggaaaacgggctgtcttacgaatgtcgaaccctcctattcaaagccgtccacaatcttctagaaaggtgtcttatgaatcgaaacttcgtgcgcatcggaaaatggtttgtgaagccatacgaaaaagatgaaaagcctatcaacaagagtgaacacttaagctgcagctttacctttttcctgcatggcgactctaacgtgtgcacatctgtggaaataaaccaacatcaaccagtctatttactgtccgaggaacatatcacattagctcagcagtccaacagtccatttcaggtgattctgtgtccttttgggctgaatggtacgctcaccggccaagcgttcaaaatgtccgactctgcaactaagaagctcatcggtgagtggaaacagttctaccccattagctgttgcctcaaagaaatgtcggaagagaagcaggaggatatggattgggaggatgacagcctggccgctgtagaagtgctggtcgccggcgtccggatgatttacccagcttgctttgtcctggtgcctcagtccgacattcccacaccatctcccgtgggatctacccattgttcatcttcctgcctgggcgtgcaccaggtaccagcaagcacccgggatcccgccatgtcctctgtcacactgacaccccccacttctcctgaagaagtccagacagtcgatcctcagagcgtgcagaagtgggttaagttctcctccgtgtccgatgggttcaactctgactctacctcacatcacggcggaaagattcctaggaaattggcgaatcatgtcgtcgatcgtgtatggcaggagtgcaacatgaacagagctcagaataaacgaaaatatagtgccagtagtggaggtttgtgtgaagaggccaccgccgccaaagtggcctcttgggacttcgttgaagccactcagcggacaaattgcagctgtctgcggcacaagaacttgaaaagtcggaacgccggtcagcaggggcaagccccttctctcggccaacagcagcagatattgcctaagcataagacaaatgagaaacaggaaaaatcagagaaacctcagaagaggcctcttactccttttcatcatagggtgtccgtgtctgacgatgtgggaatggatgccgactctgcctctcagcggttggtgatcagcgcacctgattctcaagtgagattttccaatatcaggaccaacgatgttgctaaaacccctcagatgcacgggactgagatggctaattcacctcaaccacccccgctgagccctcacccatgcgatgtggttgacgaaggggtcactaagacaccgtcgacacctcagagtcagcacttttaccagatgcccacacccgacccgctagttccgagcaagcccatggaggacaggattgattctctgtcccagtcattcccaccgcagtatcaggaagccgttgagcccactgtatatgttgggactgcagtgaatctggaagaagacgaggctaacatcgcatggaagtattataaatttcctaaaaaaaaagacgtagaattcttacctcctcaacttccgagcgacaagttcaaagatgatcccgtcggtccattcggtcaggagtcagtcacttccgtgaccgaactgatggtccaatgcaaaaagccactgaaagtatcggatgagctggtgcagcagtatcagattaagaatcagtgtctgtctgccatagccagtgatgcagagcaggaacccaagattgacccctacgctttcgtggaaggcgacgaggaattcctgttccccgacaaaaaagaccggcagaactcagagcgcgaagctggcaagaaacataaagtcgaagatggcaccagcagtgtcactgtcctgtcccacgaggaggacgcaatgagtctattcagcccatccataaagcaggacgcgcctcgacccacctcccatgcacgacctccttccacctcgctgatttatgactccgatctcgcagtttcctacacagacctggacaatctttttaattccgacgaagacgagctgacaccgggatccaagaagtccgcaaacggctctgatgacaaggcctcttgtaaggaatccaagaccgggaacctggaccctctgtcctgtatcagcacagccgacctgcacaagatgtacccgactccgccaagcctggaacaacacataatggggttctccccaatgaatatgaacaacaaggaatatggctcaatggacaccaccccagggggcaccgtgctggaagggaattcatcctccatcggcgcacaatttaagatcgaggtggatgagggtttctgcagtccaaagccttccgagattaaggacttttcctacgtgtataagcctgagaactgccagatacttgtgggatgtagtatgttcgcgccattaaagacactgccctctcagtacctgcccccaatcaagctaccggaggagtgtatctatcgccaaagctggactgtgggcaagttggagctgctatcttctggcccatccatgcctttcattaaagaaggcgatgggtctaatatggaccaggagtacggcactgcatataccccacagactcatacgtcattcgggatgcctccttccagcgcccctccgagcaactctggggccggaatactgcctagcccaagtaccccaagatttcccacccccaggactccccggacccccaggacgccccgaggcgccggaggcccggcatcagcacagggcagcgtcaaatacgaaaatagtgacctctattccccagcgagtaccccatccacatgccgcccgttgaattctgtggagcctgcgactgtcccaagcattcccgaagctcatagcctctatgtgaacctgatcctttctgagagcgtcatgaatctgttcaaagattgtaatttcgactcatgctgtatctgcgtgtgtaacatgaatattaagggggcagacgtcggcgtctacattccagacccaacacaggaggcccaataccgctgcacatgtggtttcagtgctgttatgaaccggaaattcggaaataattctggcctgtttttggaggacgagctggatattatcggaaggaatacagattgtgggaaggaggccgagaagcgctttgaagccttgagggccacatctgccgagcacgtgaatggtgggctgaaggagagcgaaaagctgtccgatgacctcattttactgctgcaagaccagtgtactaacctcttcagcccattcggggccgccgatcaggatccattccctaagtccggcgtaatcagcaactgggtgcgagtggaggagagggattgctgcaacgactgctaccttgctctggagcatgggagacagttcatggacaatatgtcagggggtaaggtggacgaggcactggtgaaaagttcttgtctgcacccctggtccaagagaaacgatgtgagcatgcagtgctctcaggacatcttgagaatgctgctgtctttacagcctgtgctgcaagatgccatccagaagaaaaggactgttcggccgtggggggtgcaaggccccctgacctggcagcagttccataagatggctgggagaggatcttatggaacagatgaatctcccgagcccctgcctattcccaccttcctcctaggctatgattacgactacctcgtgctcagtcccttcgccctgccttattgggaacgactgatgctggaaccatatggctcacagagagacattgcctacgttgtcctatgtcccgagaacgaggctctgctgaacggcgctaagtcatttttccgagacctgacggccatctatgagagttgccgactgggccagcaccggccagtgtcacggctcttaaccgacggaattatgcgggtgggaagcaccgcctctaagaagttgtccgagaaattggtggctgaatggtttagtcaggcggcagacggtaacaacgaggcttttagcaaactgaagctttacgcccaggtctgccgatatgacctcggcccatacctggcaagcctgccactggacagttctctcctatctcagcctaatctggtggcacctacgagccagagccttatcacgccaccccagatgaccaacacaggaaacgcaaatactccatctgctacgctcgcatcggccgcatccagcaccatgacagtgacttcgggagtggcaatcagtacatccgtggcgacagccaacagcaccctgaccaccgcctctacgtcatcaagtagttccagcaatttgaattcaggggtgtctagcaataaattaccatctttcccgcccttcggcagcatgaactcaaacgccgccgggagcatgagcacccaggccaacacagtacagtcaggacaactcggcggccagcagacatcggcacttcagactgccggaatctccggtgaaagctcaagcctgccaacccagccccaccctgatgtgagtgagagtacgatggaccgcgacaaagtggggattcccactgatggtgattcccatgccgtgacttacccccctgctattgtagtgtatatcatcgacccatttacttatgagaataccgatgaaagtaccaactcctcttcggtgtggacactggggttgctgcgttgcttcctggaaatggtgcaaacgcttcccccacatatcaagtcaacagtcagcgtgcagatcatcccatgccagtatctgctgcagcctgtgaaacacgaggatagggaaatttacccccagcacttgaaaagcctcgccttttctgcctttactcagtgtcgaagaccattgcctacttcaacaaatgtcaagaccctgaccggcttcgggcccggacttgccatggagactgctctacgcagtcccgatcgacccgagtgtataaggctgtacgccccgcccttcattctggcccccgttaaggataagcagactgaactaggcgagacctttggcgaggccgggcaaaagtataatgttctcttcgttggctattgcctctctcatgaccagagatggatcctggccagctgtactgacctttacggcgaactcctcgaaacgtgtattatcaacatcgatgtaccaaacagagccagacggaagaagtcatcagcccgcaaatttgggttacagaagctgtgggagtggtgtctgggactggtccaaatgagctcgctgccctggagagtcgtaatcgggaggttagggcggattgggcatggtgagctaaaggattggagttgcctgctatcgaggcggaacctacagtctctgagtaagagacttaaggatatgtgccggatgtgcgggatctcagccgctgatagtccctcaattctgtctgcctgtctggtggccatggaacctcagggatcgttcgttatcatgccagactccgtaagtaccgggtccgtgttcggccgctccacaacacttaatatgcagacttctcaattgaatacccctcaggatacgtcatgcacccatatcttagtgttccccacttcggccagtgttcaggttgctagtgccacatacacgacggagaatctggatcttgcatttaaccctaacaatgatggagctgatggcatgggcatcttcgacctactggacacaggggatgacctggaccccgacataatcaacatcctgcccgcctccccaaccggaagtcccgtacactcgcccggttctcattacccacacggaggagatgctgggaagggtcagtcaaccgaccgattactgtccacagaaccccatgaggaagtgcccaacatcctgcaacagcccctggccctcggttattttgttagtaccgccaaagctgggcctctacccgactggttttggtccgcctgcccacaggcccaataccagtgtccattgttcttaaaggctagccttcacctgcacgtgccttctgtgcagagtgacgagctcttacactccaagcattctcatccgctggattccaaccagacctctgacgtcctcagattcgtcctcgagcaatataatgcactgtcatggctgacgtgcgacccagctacacaggaccgccgttcctgccttcccatccattttgtggtccttaatcagctgtataacttcataatgaatatgttatag

SEQ ID NO: 194406 - DNA, 6633 bp, synthetic construct
  misc_feature 1..6633: note = Description of Artificial Sequence: Synthetic coding sequence
  source 1..6633: mol_type = other DNA
atgaccgccgccgccaactgggtggccaacggcgccagcctggaggattgccactcaaatttgttctctttggctgagcttacggggatcaagtggaggcgctataactttggtggccacggggattgcggacccattatctccgcccctgcccaggatgaccccatcctcctgtctttcattcggtgtttacaggctaacttgctgtgtgtgtggcggcgtgacgtgaaaccggactgcaaggagctttggatattctggtggggcgacgagcctaacctcgtgggggtcattcatcacgagctgcaagtggtcgaggaggggttgtgggagaacggcctgagctatgagtgccgcactttactttttaaggctattcacaacttgctggagcgatgcctaatggacaagaattttgtgcggattggaaaatggttcgtgcgcccgtacgagaaggacgaaaagccagtgaataagagtgaacatctctcatgcgcctttacctttttcctacatggcgagtcgaacgtgtgcacctccgtcgaaattgcacagcatcagcccatctacctcattaatgaagagcatattcatatggcacaatcttctccggcacctttccaggtacttgtctcaccttacggactcaacggcaccctgactggccaagcatacaagatgagcgaccctgccacacgaaagctcattgaggaatggcagtacttctatccaatggtgttaaagaagaaggaagagagtaaagaggaagatgagctgggctatgacgatgacttccctgtggctgtggaagtaattgtggggggcgtgcgaatggtgtacccctccgccttcgtactgatctctcagaatgacatcccagtgccacagagcgtggcctctgccgggggacacatcgcagttggtcaacagggcctcggctcagtcaaagatcctagtaactgtggcatgccccttactcctcccaccagtccggagcaggccattctcggagagtctggtgggatgcaatccgccgccagtcacctggtgtcccaggacggaggcatgatcactatgcatagccccaaacgctctggcaaaattccccctaaactgcacaatcacatggtccatagagtgtggaaagagtgtatcctgaatcgtactcagtccaagaggagccagatgtcgacacccacattggaagaagagccggcaagcaatcctgccacctgggatttcgttgaccctacacagcgtgtttcatgctcatgctcgcgacacaaactcctgaagcgatgcgccgtggggcccaatagaccaccaaccgtaagtcagccaggtttcagcgctggaccgtccagttcttccagccttcctcctccagcctctagcaagcataaaaccgctgaaagacaggagaagggagataaattgcagaagcgcccactcatcccattccatcacaggccgtccgtagccgaagagctttgtatggagcaggatactcccggacagaagttgggactcgccggtatcgacagcagtttagaggtgagctcatcccgcaaatatgacaagcaaatggcagttccctctaggaataccagtaaacaaatgaacttaaaccctatggacagcccccacagccccatttcccccctcccaccaactctgtcgccccagcctaggggccaggagaccgagagtctcgatcctcctagcgtgcccgtcaatcctgccctctatgggaatggcctggaactgcagcagctttccacccttgatgatcgaacagttctagtgggccagaggcttccactcatggccgaggtgagcgagactgccctgtactgtggcattagaccaagtaatccagagagttctgagaaatggtggcactcctataggctacccccctccgacgacgcagaattccgcccccctgagttgcagggggaacgttgcgatgctaagatggaggttaatagcgaatcaaccgcactgcagagactactcgcccagccgaacaaaaggttcaaaatttggcaggataagcagccgcaactccagcccctacactttctcgaccctttgccactctcgcagcaaccaggcgatagcctaggagaggttaacgacccttatacatttgaggatggggatatcaaatatattttcacagccaataaaaagtgcaagcagggcactgagaaagatagtttgaaaaagaataaaagcgaggacggcttcggaactaaggacgtaactacgcccggccactccacccctgtgccagatggaaaaaatgccatgagtattttttcttcagctacaaaaaccgatgtcagacaggataatgcagcggggcgagctggctccagttcattgacacaggttaccgatttggccccttcattacatgacctggacaacattttcgacaactctgacgatgatgaactcggcgctgtttcacccgccttgcgcagtagcaagatgcccgctgttggcactgaggataggccattaggaaaggatgggagggcagcagtgccttatcctccaaccgtcgccgatctgcagagaatgtttcccacccccccttcactggagcagcaccctgccttttcccctgtgatgaactataaggacgggatctcttcagagaccgtgactgctctgggaatgatggagagtccaatggttagcatggtttcaacgcaactgacggagtttaagatggaagtggaggatggactgggttcccctaagcccgaagagatcaaagacttcagttacgtgcacaaggttccgagcttccagcccttcgtcggtagctccatgtttgctcctctgaaaatgttacccagccattgcctgctgcctctaaagatccctgacgcctgcctgtttcgcccctcatgggctatcccaccgaagatcgagcagctgcctatgccgccagccgcaacttttatcagggacgggtataataatgttccatccgtgggaagtctcgccgaccccgattatcttaacaccccccagatgaatacacccgtcacattgaactccgccgcaccagctagcaacagcggcgcgggggtgttgcctagtcccgctactccacgcttttcagtccccacgcctagaacacccaggactccccgcactcctagagggggcggcacagctagcggtcagggatccgttaagtatgattctaccgatcagggctctcccgcctccacaccaagtacaactagaccgttaaattctgtagaacctgcaacgatgcagcccatccctgaggcccattccctatacgttaccctgattctctcagattccgtgatgaatatcttcaaagatcggaactttgattcctgctgcatttgtgcctgtaatatgaatattaaaggcgcagatgttggtctctacatccctgacagctcgaatgaggaccagtaccgatgtacatgtggcttcagtgcaattatgaacaggaaactgggttataattctggactattcctagaggacgaactggacatattcggcaagaattcagatattggccaggctgcagagaggcggctgatgatgtgtcagagcaccttcctgccacaagtggagggaactaagaaacctcaggagccaccaatcagcctgcttttgttgctgcagaaccagcacacccagcccttcgctagcttaaacttcctggactacatttccagcaacaatcggcagacattgccttgtgtgagctggagttacgaccgcgtacaggctgacaataatgactactggacagaatgttttaatgctctggaacagggcagacaatacgtggataacccaactggagggaaggtggatgaagctttggtccggtcggcaaccgttcacagttggccccatagcaacgtgcttgatatcagcatgctctccagccaagatgtggttagaatgctcttgagcctccagccctttctccaggacgccattcagaagaaaagaaccggccggacttgggaaaatattcagcacgtgcaggggcccctgacctggcagcagttccacaaaatggccggaaggggcacatatggcagcgaggaatccccagaaccacttccaatccccactcttctggtgggctatgacaaggacttccttactatctcccccttcagccttccgttttgggagagattactcctggatccctacggaggccatagagatgtggcatatatcgtggtgtgcccagagaatgaagccctcctggaaggcgcaaaaacattttttagagaccttagcgccgtatacgaaatgtgcaggctgggccagcacaagcctatttgcaaggtactgcgggacgggataatgagagtggggaaaacagtggcacagaagttgactgacgaactcgtttccgagtggttcaaccagccctggagtggcgaggagaacgacaatcatagccgtctcaagctgtatgcacaggtgtgccgacaccatcttgcaccctatttggctaccctgcagttggattcttcacttctgatccccccgaaataccagacccctcctgctgccgcacaaggacaggcaacacccggaaatgcgggtcccctggctccaaatggatcagccgcaccccccgcgggctctgcgtttaaccccacttccaatagctccagcaccaatcctgccgcaagctcaagtgcctcaggctcatctgtcccgccagtctctagcagcgcgtctgcgccggggattagccagatcagcacgaccagttcttcaggcttttctggctcagtgggaggtcagaacccatctacagggggcatctccgctgaccggacccaggggaacatcgggtgcggaggagatacagaccctggtcagtcttcatctcagcctagccaggatggacaggagtctgtgaccgagcgcgaacggatcggcattcccacagaacctgattccgcagacagccatgctcacccaccagctgtggttatctatatggtggatccctttacatacgccgctgaggaagactccaccagcggcaacttctggctcttgtcactaatgaggtgttatacagaaatgctcgacaatctgcccgagcacatgcgcaattctttcatactgcagattgtaccgtgtcagtacatgctgcagactatgaaagatgaacaggtgttttacattcaatatttaaagtccatggcattttctgtgtattgccagtgcaggcgaccgttgcccacgcagattcatattaaaagcctcacaggcttcggccccgccgcctccattgaaatgacactgaagaatccagaacgtccatcccccatacagttgtacagtccgccattcatcctagccccgataaaggacaagcagacggaactcggggagacattcggggaggcctcccagaagtataatgttctcttcgtcggctactgcttgtcacacgaccaacgatggctcctagcctcttgcacagacttacatggcgaattgttggaaacttgcgtggtaaacatcgccctcccgaacagaagtaggagatcgaaggtgtccgccagaaaaatcgggcttcagaagctctgggagtggtgcatcgggatcgtacagatgacatctttgccctggagggtcgtcatcggccgcttaggtcggctgggacatggggaactgaaagactggagcatattactgggggaatgttctctgcagacaatatctaaaaagcttaaagatgtctgcaggatgtgcgggataagcgcagcagattcccccagtattttgagcgcctgtcttgtcgctatggagcctcaagggtctttcgtcgtgatgcctgacgcagttacaatgggttcagtgttcggcagatcaactgccctcaacatgcaaagcagccagctgaatactccacaggatgcttcctgcacgcatatattagtgtttcccaccagtagcactatacaggtggctcctgcaaattatcctaacgaagacggattcagccctaacaacgatgacatgtttgtggatttgccttttcctgatgatatggacaacgacatcggcattctcatgaccggaaaccttcactcctccccaaactcttctcccgttcctagcccagggagtccgtctgggataggggttggctcccactttcagcattcgcggagccagggggagcgcctcctctctcgcgaggcccctgaagagctcaagcagcagcctctcgccctggggtatttcgtcagcaccgcaaaagcggaaaatctaccacagtggttctggagttcatgtccccaggcccagaaccagtgcccccttttcctcaaagcttccctacatcaccacatttctgttgcccagacagacgagttgctcccagcccggaacagccagcgcgtcccccaccccctggatagcaagactacctcggacgtgctcagatttgtgctggaacagtacaacgctctgagctggctgacctgtaaccccgccacccaggacaggacaagctgtctgccggtgcactttgtggtcctgacccaattgtacaacgcaatcatgaatatcctgtag

SEQ ID NO: 194407 - DNA, 4365 bp, synthetic construct
  misc_feature 1..4365: note = Description of Artificial Sequence: Synthetic coding sequence
  source 1..4365: mol_type = other DNA
atggcccccgtgcagctggagaaccaccagctggtgccccccggcggcggaggaggcggttcaggtggccctccttccgcccccgctccccccccccccggtgctgccgtggccgccgccgctgccgccgcagctagccccggctaccgcctgtccactctcatagaattcttgcttcaccgtgcatacagcgagcttatggtcctgaccgatcttctccccaggaagtccgacgttgaacgtaagatagaaatcgtgcagttcgcctcccgcacaaggcaacttttcgtgcgactcttggccctggtcaaatgggctaataacgcagggaaagttgagaaatgtgctatgatctcgtctttcctcgaccagcaggcaatcctgtttgtcgacaccgccgatcggctggcctctttggctagggacgcactcgtccacgctcgcctgccttcatttgcgattccctatgcaatagacgtgctcacaacaggaagctatcctagactgcctacctgtatacgagacaagatcatccccccagatcctatcaccaaaatcgaaaagcaggccaccctccatcagttaaatcaaatcctgagacatcggctagtcactacagacctgcccccccaactcgccaatctcacagttgcgaatgggcgagtcaagttccgagttgagggagaatttgaggccacgcttactgtaatgggcgacgatccagatgtcccatggaggctgctgaagcttgagattctggttgaggacaaggagactggggacggacgcgcgcttgtccattcaatgcaaatctcgttcatccaccaattagtgcaatcacgtctgtttgcagacgaaaaaccccttcaggacatgtacaattgcctacactccttctgcctctccttgcagctcgaggtactgcattctcagacattgatgctgatccgagagaggtggggggacttggtccaggtggaacggtaccacgccggaaaatgcttatcattatctgtatggaaccagcaagtcctggggcggaagacgggaacagcgtcagtgcataaagtgaccattaagatcgacgaaaacgatgtttcaaaacccctccaaatcttccacgaccctcccctcccagcttcagactccaagctggtcgaaagagcaatgaaaatcgaccacttgagcattgaaaagctgttgatcgattccgtgcatgcacgggcccaccagaagctccaggagttaaaggccattttgagaggattcaatgctaacgagaattccagtattgagacagcattacctgcactggttgtcccaatactcgaaccttgtggtaactccgagtgtcttcatatttttgttgacctgcactcaggaatgttccagctaatgctgtacggcctggaccaggcaaccctggacgatatggaaaaatccgtcaacgatgacatgaagagaatcattccatggatccaacaactaaagttctggctcgggcagcagagatgtaaacagagcatcaaacatcttcctaccatttcgtcagaaactttgcagctgtctaactactccactcatccaattggcaatctcagtaagaacaaactgtttatcaaactaactagactgccgcagtactatattgtggtagagatgttggaagtgccaaataagcctacccagttgtcctacaaatattactttatgagtgtaaatgccgccgaccgcgaagacagtcctgcaatggccctccttctccagcagttcaaagaaaacatccaggacttggtattcaggaccaagactggtaaacaaacgcgaacaaacgcaaagaggaaactctcagacgacccctgccctgtggaaagtaaaaaaactaagagggctggtgaaatgtgtgcctttaacaaggtgctggctcactttgtcgccatgtgcgacacgaatatgcctttcgtgggcttgaggcttgagctgtcgaatctggaaattccccatcagggggtacaggtggagggagacggcttcagtcatgccattagactgctgaaaattcccccttgtaaaggaattactgaggaaacccaaaaggcgcttgacagatccctgttagattgtacttttcgtcttcaggggcggaacaatcggacttgggttgcagagctggtgttcgccaattgtccactgaatggcactagtactagagagcaagggccttcaagacacgtgtatcttacctatgaaaacctgctaagcgaaccagtgggcggccggaaagtcgttgaaatgtttttaaatgactggaactctatcgcgcgtttgtatgagtgtgtgcttgagtttgcaagatccctccccgatattccagcacatttaaacatcttcagtgaagtccgggtgtacaattacagaaaactcatcctctgttatggtacgacaaagggctcttcgatctcgatccagtggaatagtattcaccagaagtttcatatctctttagggacagtgggacccaactcaggctgcagcaactgccacaacaccatcttacaccaactccaagaaatgtttaataagacacccaatgtcgtgcagttactacaggtgctatttgacacgcaggcccccctgaatgccatcaacaagctgcctacagtgcctatgctcgggttgactcaaaggaccaacaccgcatatcagtgcttcagtattctgccccagtcttctacacatatcaggctggcattccgaaacatgtattgtattgatatttattgtcgttcacggggagttgtagcaatccgggacggcgcctacagtctttttgacaacagtaagctagttgagggcttctaccctgccccagggttaaaaacctttctgaacatgtttgtggacagcaaccaagacgctaggaggaggagcgttaacgaagatgacaaccccccctctccgatcggaggagacatgatggactcactgatttctcagctgcaaccaccccctcagcagcagccctttcctaagcagcctggaacttcgggagcctatcccttaacgtcaccaccaacgtcataccactcgaccgtcaatcagagcccctcaatgatgcatactcagtctccaggaaacctgcatgctgcctcctccccctcaggtgccctgcgagcgccgtccccggcttcattcgtcccaaccccgcccccatccagccatggcatcagtatcggcccaggcgcctcatttgcatcgccacacggcactcttgatccttcctcaccgtataccatggtgtccccttcgggacgggccggaaactggcctgggagtccacaggtgtctgggccctcccctgctgcaaggatgcctggtatgtcacccgccaacccttccctgcactctccggtaccagacgcaagccactcacctagagcgggcacgtctagccagactatgcctacaaacatgccaccccctcggaagcttccgcagcgctcttgggctgctagtatcccgaccatcctgacacattcggcacttaatattctgctactgccctccccgacaccaggccttgtgcccggactcgccggctcctacctgtgctcacccttggaacgcttcctcgggtccgtcattatgcggcggcatctccagagaattattcagcaggagacactacagctgattaattctaatgagccgggcgtgatcatgttcaagaccgacgcccttaagtgcagagtggcgctttctcccaagacaaaccagaccttacagttgaaagtgacccccgagaatgccggccagtggaagcccgacgagctgcaggtgctcgagaagttcttcgagactcgtgtggcaggcccaccatttaaggccaacacattaatcgcctttaccaagttactgggagcccccacacatatcttgagagattgcgtccatataatgaagctcgagctttttccagaccaggccactcagcttaaatggaatgtgcaattctgtctcacaattccccccagtgctccacccattgccccacctgggacacctgccgtcgtgctgaaaagcaagatgttatttttcctccagctcacgcagaagacctcagtgccacctcaggagccagtatcaattatcgtgccgatcatctatgatatggcttccggtactacccagcaagcggacataccacgtcagcagaactcctccgtcgcagctccaatgatggtgagtaatattttaaaacgcttcgctgagatgaatcctccccggcagggcgaatgtacaatctttgccgcagtccgcgacctcatggccaatctgaccctaccccccgggggcaggccctag

SEQ ID NO: 194408 - DNA, 468 bp, synthetic construct
  misc_feature 1..468: note = Description of Artificial Sequence: Synthetic coding sequence
  source 1..468: mol_type = other DNA
gtggccggcccccccttcaaggccaacaccctgatcgccttcaccaagctgctgggggcccctacacacattcttagggactgcgttcatatcatgaaacttgaactttttccggatcaggccacacagctgaaatggaatgtgcaattctgtctcactatccctccatccgctccgcctattgcaccccctggcacacccgccgtggtgctaaaaagcaaaatgttgtttttcttacagctgacccagaagacttcagtacccccacaggagccggtcagtattattgttcctatcatctatgacatggcctctggaacgacccagcaggctgacatcccccgccaacaaaattcctcagtcgccgcacccatgatggtcagcaatattctaaagcggtttgccgagatgaatcctcccagacagggcagcattaaaggaactggctgtccctccgactttctttag

SEQ ID NO: 194409 - DNA, 996 bp, synthetic construct
  misc_feature 1..996: note = Description of Artificial Sequence: Synthetic coding sequence
  source 1..996: mol_type = other DNA
cccagcggccgggccggcaactggcccggcagcccccaggtgagcggccccagtccggcagcccgcatgccggggatgagcccagctaatccttcattgcacagccccgttcctgatgcctctcactccccccgtgccggaacctcatcccagacaatgcctacaaacatgccgccgccaagaaaattgcctcagcgaagctgggcagcatctatccctaccatcctgacacattcagccctcaacattctgctcctccccagcccaaccccaggcctggtacctggactggccggatcatatctgtgctcgccactggagagatttctcggctctgtaattatgagaaggcatctacagcgtattatacaacaggagacactgcagctgatcaacagtaacgagccaggggttatcatgttcaaaacagacgctctgaaatgtagggttgctttgagccctaagactaaccaaactctacagcttaaagtcactcccgaaaacgcaggacagtggaaacctgatgagttgcaggttctggaaaagttctttgaaaccagggttgccggcccccccttcaaagctaatacactgattgcttttacgaaattgctaggcgcaccaacacacatcttgcgggattgcgttcatattatgaaactagaactgttccctgatcaggcgacccagctgaagtggaacgttcagttctgcctgactattcctcctagcgctcccccaatcgcaccacccggcacgcccgcggtggtgctcaaatccaagatgctgttcttcttgcagcttacccagaagacttccgtgcccccccaagaacctgtatcaattatcgtgcccatcatttacgacatggcttccggaaccacacagcaagccgatatacccagacagcagaacagcagtgttgccgctcccatgatggtatcgaacatcctcaagaggttcgctgagatgaacccacctaggcagggcacttag

SEQ ID NO: 194410 - DNA, 2367 bp, synthetic construct
  misc_feature 1..2367: note = Description of Artificial Sequence: Synthetic coding sequence
  source 1..2367: mol_type = other DNA
atggacgtgagcggccaggagaccgactggcggagcaccgccttccgtcagaagctcgtttcacagattgaggatgcaatgagaaaggccggagtggcccattcgaagtcaagtaaggacatggaatctcacgtcttcctgaaggctaagacacgcgatgagtatttgagtctggtcgcacgccttattattcatttccgagatatccataataaaaaatcccaggcaagtgtctccgacccaatgaacgccttacagtcgttgacaggggggcctgccgctggcgcagctggcattgggatgcctcctcgcggtccaggacagagcctcgggggtatgggatcactaggcgctatgggacagccaatgagtctgtcgggacagccccctccgggaacctcgggtatggcacctcattccatggccgtagtgtctactgctaccccacagacacagcttcagctccagcaagtcgctctccagcagcagcagcaacagcagcaattccagcagcagcagcaagccgccttacaacaacagcaacagcagcaacagcagcaacaattccaggcccagcagagcgctatgcagcagcaattccaagcagtcgttcagcaacaacaacagttgcagcagcaacagcagcagcagcagcacttaataaagctccaccaccaaaatcaacagcagatacagcagcaacaacaacagctccagcgaattgcacagctacagctacagcaacagcagcagcaacagcagcagcagcagcaacagcaacagcaggccctgcaggcacagccgcctatccagcagcctcccatgcagcaaccccaaccacctccatcccaggcactcccccaacagctgcagcaaatgcatcacacgcagcaccaccaaccaccccctcagccccagcagcctcccgtcgcacagaatcaaccgtcgcagctccccccacagtcccagacacagcctctggtgtctcaagcgcaggcgctgcctggtcagatgctgtatacccagccgccgctcaagttcgtccgagcccccatggttgtgcaacagccccccgttcagccccaggtgcagcaacagcagacagccgttcagactgcgcaagctgcccagatggtggcacctggtgtgcaaatgattaccgaggccctggctcaaggcgggatgcacatccgcgcaaggtttcctcctacgactgccgtgtctgccatcccttcatcttctatccctcttggccgccaaccgatggcccaggtgagccaatcctcccttcccatgctaagctcccctagccctggtcagcaagtgcaaactccccagtccatgcccccgcccccccagccaagcccacagcccggccagcccagtagccaacctaatagcaacgtctctagcggtccagcaccatctcccagctccttcctcccctcccctagtccacagccctcacagtcgcctgtaactgcacgcacaccccaaaacttctccgtgccctctccaggcccattgaacaccccagttaatccctcaagtgtgatgtcacccgcaggtagttcccaggccgaggagcagcaatatcttgacaagttgaaacagctgtccaagtacatcgagccacttagaagaatgattaacaaaatagacaagaacgaggatcggaaaaaggatctaagcaagatgaagtctttactcgacatcctgactgatccctctaaacgctgcccactgaagactctccagaaatgtgagattgccctcgagaagcttaaaaacgacatggctgtgccaaccccaccacctcctccagtgcctcccaccaagcagcaatatctgtgccagcccctccttgatgcagtactcgctaacatccggtcgccagtgttcaatcactctctctacaggaccttcgtgcccgcaatgaccgcgatccatggcccccccattacggccccggtggtatgcaccaggaagaggcgcctagaggacgacgaacggcagtccatccctagtgttctccagggtgaggtcgccaggctggatcctaaatttctggtcaatctggatcctagtcactgcagtaacaatgggactgtgcacctcatctgtaagctggatgacaaggacctgccttcagtccccccactggaactgagcgttcctgctgattaccccgctcagtcaccactctggattgaccggcaatggcagtatgatgcaaatccattcctgcagtctgtccaccgctgcatgacatccagactcctccagctcccagacaagcactcagtgacagccttgttgaatacttgggcacagtctgtccaccaggcatgcttgagtgccgcatag

SEQ ID NO: 194411 - DNA, 2247 bp, synthetic construct
  misc_feature 1..2247: note = Description of Artificial Sequence: Synthetic coding sequence
  source 1..2247: mol_type = other DNA
atggacgtgagcggccaggagaccgactggcggagcaccgccttccggcagaaactagtgtctcaaatagaagatgccatgaggaaggctggggtggcacactctaaatcgtctaaggacatggagtcacatgtattccttaaagctaaaacccgcgatgaatacctgtcactggtggcccggctgataatccactttagggatattcataacaaaaaatcccaggcaagcgtcagtgatcccatgaatgcactgcaaagtctgacgggcggacccgccgcaggggccgctgggattggcatgcccccaaggggcccagggcagtcactgggcggcatgggcagcctgggtgctatgggtcagcccatgtcgctgagcggccagccccccccaggcacctccgggatggcacctcactccatggcagttgtgagtactgccacaccacagacacagcttcagcttcaacaagttgcacttcagcagcagcaacagcagcagcagtttcagcagcagcagcaggccgccttgcagcagcaacaacagcagcagcagcagcagcagtttcaggcccagcaatcagctatgcaacagcaattccaggctgttgtccaacagcagcagcaattgcagcagcaacagcagcagcagcagcacctgatcaaacttcatcatcaaaatcagcagcagattcaacagcaacaacagcagctccagcggatcgctcagctacagttgcagcagcagcagcagcagcagcaacagcagcagcagcagcagcaacaagccttgcaggctcagcccccaatccagcagcccccaatgcaacagccccaacccccaccatcgcaggcacttcctcagcagctccagcaaatgcatcacactcaacatcaccagccaccccctcagcctcagcagccacctgttgctcaaaatcagccgagtcagctccctccccagtcccaaactcagccgttagtcagccaagcccaagccctccctggacagatgctctacactcagccacctctcaaattcgttcgggcacccatggttgtgcagcagcctccggtgcaacctcaggtgcaacagcagcagactgctgtgcagactgcccaagcggctcaaatggtggcacccggggtgcaagtgtcacagagctctctgcctatgctgtctagtccctcccccgggcagcaggtgcagactccccagagcatgccaccacccccacagccgtcccctcagcccggacagcccagttcccagccaaacagcaacgttagttctggacctgcgccttctccatcaagtttcttgccaagtccatcaccacagccttcgcagtcgccagttacagcacgaactccgcagaacttcagcgtcccttccccgggacccctgaacacgccagtcaacccttcgtccgtgatgtcacccgcgggctcatctcaggccgaagagcagcaatacctggacaaacttaagcagttgtccaagtatattgagcccttgcggaggatgatcaataaaattgataagaacgaagatagaaaaaaggacctgtctaaaatgaagtccctcctggacatccttacagacccctctaagcgatgcccactgaaaaccttacagaaatgtgaaatcgccctcgagaagttgaagaacgatatggctgtcccgacgccaccccctcccccagttccacccactaagcaacagtacctttgtcagccactcctagatgccgtgctcgccaatatacgttcgccggtgttcaatcattccttgtatagaacctttgtgcctgctatgacagctattcacgggcctccgattactgcccccgtagtttgtaccaggaaacggcgcctggaggatgacgagcggcagagcattccctcggtcctacaaggagaggttgccaggctggacccaaagttcctggtaaatttagatccttctcactgctccaataacggcacagtccacctcatttgcaaactcgacgacaaagaccttccctctgtgcctccactcgaactcagcgtgcctgcggattatccagcccagagtcccctttggattgatcggcagtggcagtacgatgccaatccatttctgcagagcgtccaccgatgcatgacttctcgcctcctgcagttacctgataaacatagtgtgacggccttgctgaacacctgggcccaaagcgtacatcaggcctgcctgagcgcggcctag

SEQ ID NO: 194412 - DNA, 2034 bp, synthetic construct
  misc_feature 1..2034: note = Description of Artificial Sequence: Synthetic coding sequence
  source 1..2034: mol_type = other DNA
atggacgtgagcggccaggagaccgactggcggagcaccgccttccggcagaaactagtttcccaaatcgaggatgcaatgcggaaggccggcgtagcccactcaaagtcgagcaaggacatggagagccacgtctttctgaaggccaaaacgcgagatgagtacctctcattggtagcccgcctcatcatccactttcgcgatatccacaacaagaagtcgcaagctagcgtatccgctcaacttcagctgcagcaggtggctttacagcagcagcagcaacagcagcagtttcagcaacaacagcaggcggccttacaacagcaacagcaacaacagcagcagcagcagtttcaggcgcaacagtcagccatgcagcagcaattccaggccgttgtgcaacagcaacaacaactgcagcagcagcagcagcagcagcaacatctgatcaaactgcaccatcaaaatcagcagcagatccagcaacaacagcagcagcttcagcggatagcgcagctccagctacagcagcagcaacagcagcaacaacaacagcagcagcaacagcaacaggctctccaggcccagccccctatccaacagcctccaatgcagcagccccaacctcctcccagccaagctctgccccagcaattgcagcagatgcatcacacacagcatcaccagcccccgcctcagcctcagcagcctcctgtcgcacagaaccaaccttctcagttgccaccccagtcacagactcagcctctggtgtcccaggcgcaggctctaccagggcagatgctgtacacacagcctcctctgaagtttgtcagagctcctatggtggtgcagcagccacccgtccagccccaggtccaacagcagcagacggctgttcaaaccgcacaagctgctcaaatggtggcccctggtgttcaggtctcgcaatcctccctacccatgcttagcagcccatctccgggccagcaggtgcagaccccacagtctatgcctccacctccgcagccttccccgcagcccggccagccatcctcccagcccaactccaatgtatcctcaggtcccgccccctcacctagctcttttcttccatcacctagcccccagccatcccagtcacccgtcactgcgcggacccctcagaacttcagcgtacctagcccagggcctctgaacaccccggtcaatccatctagtgtgatgtcaccagccggaagttctcaggccgaagaacaacagtacctagataaattgaaacaattatccaagtacattgagcccctgaggcgaatgattaataagatagataaaaacgaggaccggaaaaaggacctgagtaaaatgaagagtctcctagacatcctcacagacccctctaagaggtgcccactcaagactctccaaaagtgcgaaatagccctggagaaactaaagaacgacatggcagtgcccaccccccccccgccacccgtgcctccgactaaacagcagtacctgtgccagccactgctagatgcagtcctcgccaacatccgctcaccggtgttcaatcacagcttgtaccgaactttcgtgcctgccatgactgctattcacggtcctccgatcacagcccctgtggtgtgtaccaggaagaggcggcttgaggacgacgagagacagagtatacccagcgtattacagggcgaggtagcccggctggatccaaagttccttgtaaaccttgatccaagccattgctctaacaatggtacagtgcacctcatctgtaaactcgatgacaaagacctgcccagtgtgcctccattggaactgtctgtgcccgctgattaccctgcccaaagccctctgtggatcgaccgccaatggcaatacgacgctaacccatttttgcagagtgtacacaggtgtatgacaagccgcctcctccagctacctgacaagcattccgtcacagctctgctcaacacatgggcccaatccgtccaccaagcatgtcttagcgcggcctag

SEQ ID NO: 194413 - DNA, 2169 bp, synthetic construct
  misc_feature 1..2169: note = Description of Artificial Sequence: Synthetic coding sequence
  source 1..2169: mol_type = other DNA
atgcggaaggccggcgtggcccacagcaagagcagcaaggacatggagtcccatgttttcttgaaagcgaaaactcgtgacgagtatctaagcttagtagctagacttatcatccacttcagagatattcacaataaaaaatcccaggcctctgtctcagacccaatgaacgctctgcaatctctgaccggagggccagcagccggagccgccggcattggcatgcctccacggggacccggccaaagtctaggtggcatgggctctctaggggcaatgggccaacccatgtcattaagcggccagccgccccccggtacctccgggatggctccacactccatggccgtggtgagcacagctacacctcaaacacaactacaattacagcaagtcgccctgcagcagcagcaacaacagcagcagttccagcagcagcagcaggctgcgttgcaacaacagcagcagcagcagcagcaacaacagttccaggcccagcagagcgcaatgcaacagcagttccaggctgtggttcagcagcaacagcagctgcagcagcagcagcagcagcaacagcatcttatcaagctgcaccaccagaatcaacagcagatacagcagcaacagcaacagctccagcgcatagcccagttgcagctccagcagcagcagcagcagcagcagcagcaacagcagcaacagcagcaggctctgcaagctcagcccccaattcagcagccacctatgcaacaaccacaaccgccaccatcacaagcccttccgcagcagctacagcaaatgcaccatacccaacatcaccagccccctcctcagccacagcaacccccagttgcccagaaccagccttctcagttgccccctcagtcacagacacaacccctggtgtcacaggcacaggcactgcctggccagatgctgtacacccagcctccacttaagtttgtacgcgccccaatggttgtgcagcagccccccgtgcagccccaagtccagcagcaacagacagcggtccagacggcccaagctgcccagatggtggctcctggcgtgcaagtgagtcagtcctctttaccaatgctgtctagtcctagtcctggacagcaggtgcagaccccccagtctatgccacccccaccccagccaagtccacagccgggccaaccctccagccagcccaatagtaacgtctctagcggccccgctccatccccgtcctcattcctgcccagtccttccccacagcccagtcagagccccgtgacagcacgaacacctcagaatttttcagtgcccagccctggacctctaaacacaccggtgaatccctccagtgtgatgagccctgccggatcgtcacaggccgaggagcagcaatacctcgacaagctgaagcagctgtccaagtatatagagcctctgaggcgcatgattaataagatcgataagaatgaggaccgcaagaaagacctgagtaagatgaaatcgttgctggacatcttgaccgatccaagtaagcggtgtccactcaagaccctacagaaatgtgaaatagctctagagaagctgaagaacgatatggcggtacctactccccctcccccacccgtccctccaacaaaacaacaatacttatgtcaacccttgctggatgccgtcctggctaacatcagatccccagtgttcaaccacagcctatatagaaccttcgtgcctgccatgacagccatacacgggccgccaattacagcccctgttgtgtgcacccggaagcgacgcctggaagacgacgagcggcagtcgataccatccgtcctacaaggcgaggtggccaggttagaccccaagtttctggtcaatctggacccttcccactgcagtaacaacggcactgtgcatctcatatgtaagctggacgacaaggacctcccatccgtgccaccgctggaactgagtgttcccgctgactaccccgcacaatcacctctgtggatcgaccggcagtggcaatatgatgccaacccttttctgcagtctgttcatcgctgtatgacatctcgcctgctgcagcttccagataaacactcagtcaccgcgcttctaaacacatgggcgcagtctgtacatcaggcttgtctctccgctgcctag

SEQ ID NO: 194414 - DNA, 1914 bp, synthetic construct
  misc_feature 1..1914: note = Description of Artificial Sequence: Synthetic coding sequence
  source 1..1914: mol_type = other DNA
atggagagccacgtgttcctgaaggccaagacccgggacgagtacctgtctctggtagcacggctgattatacacttccgcgatatccacaacaagaagtctcaggcatccgttagcgcccagctacagttacagcaagtagctctgcagcagcagcaacagcagcagcagttccaacaacagcagcaggcggccctgcagcagcaacaacagcagcagcaacaacagcaattccaggcacaacaaagtgctatgcagcagcagttccaggcggtggttcagcagcagcaacaactgcagcaacagcaacaacagcaacaacacctgataaagctgcatcatcaaaaccagcagcaaatccagcagcagcaacaacagctccagcgtattgctcagcttcagttgcagcaacagcaacagcagcagcagcaacaacagcagcagcagcagcaggcactgcaagctcagccccccatccagcaaccccccatgcagcagccacagccccccccctcgcaggcactcccccagcagctgcaacagatgcaccacacacagcaccaccagcctccaccccagccccaacagcctccggtggcgcagaatcagccctctcagctccccccacagtctcaaacgcaacccctagtgtcacaggctcaggccctaccaggacagatgctctacacccagccccctctgaaatttgtccgagcgcccatggtagtgcagcagcccccagttcagccacaagtgcagcagcagcagaccgctgtccagacagcccaggcggctcagatggtggctccgggagtgcaggtctcacagagttccctgcccatgttgagctccccctcccccgggcagcaggtgcagactcctcagtcaatgccacctccacctcagccctcaccacagcccggccagcctagctcacaacctaatagcaatgtgagctcagggccagcaccctcaccttcatccttcttgccatcaccgtcacctcagccctcccaatcacctgtgacagcccggaccccccagaacttttcagtgccctctcccggccccctgaatacccccgtgaaccccagctccgttatgtcaccggccggctcttctcaggcggaggagcagcagtacctcgacaagctgaaacaactctctaagtacatcgagccccttcggcggatgattaataagatcgataagaacgaagataggaagaaggatcttagcaagatgaaatccctcctggacattttgactgacccatccaagcgttgccccctgaagactctgcagaaatgcgaaattgccctcgagaagctcaagaacgacatggcggtaccaacgccaccaccaccccctgtgcctcccactaaacagcagtacttgtgccagcctttgctggatgcggtgctggcgaatattcgctctccagtcttcaaccatagcctctatcgcacatttgttccagccatgacagctatacacggaccacctataactgcacccgttgtgtgtacaagaaaacggcgccttgaagacgatgagaggcagagcattccatccgtgctgcagggggaagttgcccggctagaccccaaatttctagtgaatctcgaccctagtcactgctccaacaatggcactgttcacctgatctgcaaattagatgataaggatttaccatctgtgcctccacttgagctgagcgtgccggctgattatcccgcccaaagcccattatggatagacagacagtggcagtatgatgctaacccctttctccagagtgttcaccgttgtatgacctcccgcctgctgcagctgcctgataagcactccgtgacagccctcctgaatacatgggcccagtcagtgcaccaggcctgcctgtcagccgcctag

SEQ ID NO: 194415 - DNA, 2169 bp, synthetic construct
  misc_feature 1..2169: note = Description of Artificial Sequence: Synthetic coding sequence
  source 1..2169: mol_type = other DNA
atgcggaaggccggcgtggcccacagcaagagcagcaaggacatggagtcccatgtttttctgaaagcaaaaaccagggacgaatatctttctcttgtggcaaggctgatcattcactttcgtgacatccacaataagaaatctcaggcatcagtctcagacccgatgaacgccctccagtccctgacggggggtcccgctgctggtgcagcaggcattggcatgccccccaggggacccggccaatccttaggtggaatggggtcccttggcgcgatggggcagcccatgagtctgagtggccaacccccaccgggcacatctggcatggctccccattcaatggcggtggttagcacagcgacaccacagactcaactgcagctgcagcaggtggcgctccagcagcagcaacagcaacagcagtttcagcagcagcaacaggctgcactccagcagcagcaacagcagcagcaacagcagcagttccaggcacagcagtccgccatgcagcagcaattccaggcggtggttcagcaacaacaacaactgcagcagcagcaacagcagcagcagcatcttataaagctccatcatcagaaccaacagcagattcagcagcagcagcagcaattgcaaagaatagcccaactgcagcttcaacagcagcagcagcagcagcagcagcagcaacagcagcagcaacaggctctccaggctcagccaccaattcagcagccaccaatgcagcagccccagcctcccccttctcaggccttgccacaacaactgcagcagatgcatcatacacagcatcaccagccccctccacagccacagcaacccccggtagcacagaaccaaccatcgcaattgcctccacaatcacagacacagccacttgttagccaggctcaggctctccctggtcagatgttatacacacagccgcccctcaagtttgtacgagccccaatggtggtccagcagcctcccgtccagccacaggtgcaacagcagcagaccgctgtccagactgcccaagctgcacagatggtggcaccgggggtgcaggtatcacagtcctctctgccaatgctgtccagcccatcgccaggacagcaggttcaaacaccacagtcaatgccccctcccccacagcccagccctcagcccggccagccatctagtcagcccaactctaatgtgtcctccggcccagcaccatcaccatccagtttccttccatcacccagcccccagcccagtcaaagcccggtgaccgcccgcaccccacagaactttagcgtgccctccccgggaccactcaatacaccagtgaatcctagttctgttatgtcgcccgccggcagtagccaggctgaagaacagcagtatcttgataaactcaagcagttgtccaagtacattgagcctttacgccgcatgatcaacaaaattgacaaaaatgaagacaggaagaaagacctcagcaagatgaaatctctgctagacatcctcaccgacccctcaaaaaggtgccctctcaaaacccttcagaagtgcgaaatcgctctggaaaagttaaagaacgacatggccgtgcccacccctccacctcccccagtcccgccaaccaagcagcaatatctctgtcagccattactcgatgctgtcctggctaatatcagatcaccagtgttcaaccactcactttaccgaacattcgttccagctatgacagcaatccatggccctcccattaccgccccagtcgtttgtaccaggaagaggaggctcgaggacgatgagcgacagtcgatccctagcgtcctgcagggggaggtggctaggttggaccctaaatttctggtgaatctggatcccagccactgcagtaacaacgggacagtgcatttgatatgtaagctcgacgacaaggatctcccttctgtgccaccccttgaattgtctgtgccagccgattatcctgcacagagcccactgtggattgaccgtcagtggcagtatgacgccaaccccttcctgcaatcagtgcatcggtgcatgacgtccagacttctgcagctcccagacaagcacagtgtgacagccctgttaaacacctgggcccagtcagttcatcaggcatgcctttcagccgcctag

SEQ ID NO: 194416 - DNA, 2157 bp, synthetic construct
  misc_feature 1..2157: note = Description of Artificial Sequence: Synthetic coding sequence
  source 1..2157: mol_type = other DNA
atgcggaaggccggcgtggcccacagcaagagcagcaaggacatggaatctcacgtgttcctgaaggcgaaaacaagagatgaatacctgtcgctggtagcccggttgatcatacactttcgtgatattcacaacaaaaagtcccaggccagcgtgtccgatccaatgaatgccctgcagagcttgactgggggccccgcggccggcgcagctggcatcggtatgccgccccgcggtccagggcagagcctcggcgggatgggaagtctcggagcgatgggacagccgatgtccctgtctggccagcccccaccagggacgagtgggatggctcctcacagtatggccgttgtgagcacagccaccccacagactcagctgcagctgcagcaggtggcgcttcagcagcagcagcagcagcagcagtttcagcagcagcagcaagcagccctgcagcagcagcaacaacaacagcagcaacagcaatttcaggctcaacagtccgccatgcagcagcagttccaagcggtcgtacaacagcagcagcagctgcaacagcagcaacagcagcagcagcatctgatcaagttgcaccaccaaaaccagcagcagcagcagcaacaggctctgcaggcccaacctccaattcagcagccccccatgcagcaacctcagccaccgccgtcacaggccctccctcaacaattacagcagatgcaccatacacagcaccaccagccccccccgcaaccccagcaaccgccggtggcccagaatcagccaagtcaactgcccccccagagccagacccagcccctagttagccaagcccaggccctgcctggccagatgctctatactcagccacctttaaaattcgttagagcccccatggtggtacagcaaccacccgtgcagccccaggtgcagcagcaacagacagcagttcaaacagcccaagcagcgcaaatggtggcccccggcgtccagatgatcaccgaggcattggcccaaggaggcatgcacataagagcacgcttccccccaaccaccgccgtcagtgcgattccttcatccagtatccccctgggccgacagcccatggcgcaacaggtgcagacaccccaaagcatgccacccccaccccagccatctccccagcccggtcagccatcaagtcagcctaactcgaatgtcagcagcggaccagcaccgtctccatccagctttttacctagtccatcgccccaacccagtcaatctccagttacagccagaactccacagaatttttccgtcccgtctccaggtccactcaacactccagttaaccccagttcagtgatgtctcctgccggctctagtcaggctgaggagcagcagtacctggacaaacttaagcaactgtccaagtatatcgagccgctcaggaggatgatcaataaaattgacaaaaatgaggatagaaaaaaggatctttctaaaatgaaatcattgctggatattttaaccgatcctagcaagagatgcccgctcaagaccttacagaagtgcgagatcgccctggagaagctgaagaacgacatggccgttccaacacccccccccccccccgttccccctaccaagcagcaatacctctgtcaaccactattggacgccgtcctggctaatatacgatctcctgttttcaaccactccttgtacaggacattcgttcccgccatgaccgcaatccacgggccacctatcaccgcccctgtggtatgcacccggaaaagacgtctggaagacgatgaacggcagtcgatcccgtctgtacttcagggagaggttgcacgccttgatccgaaattcctggtgaacttggacccctcacactgtagcaataacggaactgttcacctaatttgtaagttagacgataaggacctaccctcagttcctccactcgagctttccgtcccggcagattaccccgcccagagccctctgtggattgacaggcagtggcagtacgacgccaaccccttcctccagagtgtacacaggtgtatgactagtagactcctgcaactccctgataagcatagcgttacagccttactgaatacatgggcccagagtgtgcaccaggcttgtttgtctgcggcgtag

SEQ ID NO: 194417 - DNA, 570 bp, synthetic construct
  misc_feature 1..570: note = Description of Artificial Sequence: Synthetic coding sequence
  source 1..570: mol_type = other DNA
atgcagcagcagttccaggccgtggtgcagcagcagcagcagctgcaacagcagcagcagcagcagcagcacctcatcaaactgcatcatcagaaccagcagcagatccaacagcagcagcagcagctgcagcgcattgcccaactgcagctacagcagcaacagcagcagcagcaacagcagcagcagcagcagcagcaagctctgcaggctcagccccctatccagcagcctccgatgcagcaaccccagccccctccttcacaagctctgccccagcaactccagcagatgcatcacacccagcatcaccagccacccccccaaccccaacagcctccagtagctcaaaaccagccctctcagctgccgcctcagtcgcagactcagccgctggtgagtcaagctcaagctctgcccggtcagatgctgtacactcagccacctctgaagttcgttcgcgcccctatggtggttcagcagccccccgttcagcctcaggtgcagcagcagcagaccgcagttcaaaccgcccaggcagcgcaaatggttgctcccggcgtgcaatag

SEQ ID NO: 194418 - DNA, 1956 bp, synthetic construct
  misc_feature 1..1956: note = Description of Artificial Sequence: Synthetic coding sequence
  source 1..1956: mol_type = other DNA
atgagcggcgtgcgggccgtgcggatcagcatcgagagcgcctgcgaaaagcaggtgcatgaggtagggttagatggcaccgaaacatatctgcctcctctgagtatgtctcagaacctggctcgccttgcacaacgtattgatttttctcagggtagcggctccgaggaggaggaggccgcagggaccgaaggcgacgcacaggagtggccgggcgcaggctcctccgcagatcaggacgatgaggaaggcgttgtgaagtttcagccgagcctgtggccatgggatagcgtccggaataacttgagatccgcattgactgagatgtgcgtcctatacgacgttctctctattgtcagagataaaaagtttatgacactggacccagtttctcaagacgcccttcccccaaagcagaaccctcagacattgcaactaatctccaagaaaaaaagtctcgccggggccgctcagatactccttaagggcgctgagcgtttgactaagagcgtgactgagaaccaagagaataaacttcaacgagatttcaactccgagctgctgaggctgagacaacattggaaacttcgtaaagtgggagacaaaattctgggcgacttgtcttatcggagtgctggatccctatttccacaccatggtaccttcgaagtgatcaagaatacagatctggatctggataagaaaattccagaggactattgtcctctggacgtgcagattccttccgatctggaaggaagcgcctacattaaagtttctattcagaagcaagccccagatattggagacttagggactgtgaacctgtttaagcgccccttgcccaagtctaagccagggagccctcattggcaaacaaaattggaagccgcgcagaacgtcctgctgtgcaaggaaattttcgctcagctgtctcgggaagccgtgcagataaagagccaggtgccccatatcgtggtgaagaatcagatcatcagccaacccttcccctccctacagctttctattagcctgtgtcactcctctaacgacaagaaaagtcaaaagttcgccaccgagaaacagtgccctgaagatcatctttacgtgttggaacacaaccttcacctgctcatccgggaattccacaagcagactctctctagcataatgatgccccaccccgcctcagctccattcggccacaaaaggatgcggctcagtggccctcaggccttcgataaaaatgagattaactcactgcagtcttcagaagggctgctagaaaagattatcaaacaggccaaacatatcttcttacggagcagggctgcagcgaccatagactcattggcttccagaattgaagatcctcagattcaggcccactggtcaaacattaatgacgtgtacgaatcttcagtgaaagtgctgatcacatcccagggctatgagcagatatgcaaatctatccagttacagctgaatattggagtggagcaaattcgagtggtgcatcgggacggtagagttattacgctgagctatcaggaacaggagctgcaggatttcctgctctcgcagatgagccagcaccaggtacacgcggtgcagcagctcgcaaaggttatggggtggcaggtactgtcttttagcaaccatgtcgggcttggtccgatagaatcaatcggcaatgcttctgccatcaccgtcgcaagtccgagcggagactacgccataagcgtaagaaatgggcctgagtctgggtctaagatcatggtgcagtttcctaggaaccagtgtaaagatttgcccaaaagtgatgttctccaggacaacaagtggtcgcatctgaggggcccttttaaggaagtccagtggaacaagatggaggggcgcaacttcgtgtataaaatggagttgttaatgtccgcattgagcccgtgcctcctctag

SEQ ID NO: 194419 - DNA, 1866 bp, synthetic construct
  misc_feature 1..1866: note = Description of Artificial Sequence: Synthetic coding sequence
  source 1..1866: mol_type = other DNA
atgagcggcgtgcgggccgtgcggatcagcatcgagagcgcctgcgagaagcaggttcacgaagtcggcctggatggcaccgagacataccttcccccgctgtcaatgtcccaagagtggcccggcgctgggtcctctgcggaccaggacgatgaggagggagtggtaaagtttcagccatcactttggccatgggacagcgtccgaaacaatcttcggtccgctctgacagaaatgtgcgtgctatacgacgtgctcagtattgttagagacaaaaagtttatgacactcgaccccgtgtcccaggacgcactcccacccaagcagaatccccagactcttcagttgatttctaagaagaagtctctggccggagccgcccagatcctgctgaagggcgcagagcgactcaccaaatctgtgactgagaatcaggaaaataaattgcagagggatttcaactctgaactgcttcggttaagacaacattggaagctgcgcaaggtgggtgataaaatactgggtgatttatcatatagatcggctggaagcctttttccccatcacgggacattcgaagtaataaaaaacaccgacctagacttagataagaagatacccgaagactattgccctttggacgtgcaaatcccatccgacctcgaaggtagtgcctatatcaaggtcagtattcagaagcaagcacccgatattggtgatctgggcactgtgaacctgttcaagcgccccttgcccaagtctaagccaggttcaccccattggcagaccaaacttgaagcggcacagaacgtgcttttgtgtaaagaaatttttgcgcagttaagtcgagaggctgtgcagatcaagagccaggtgcctcatatagtggtgaagaatcagattatttcccagccattccccagcctgcaactgagtatctccttgtgtcatagctccaacgataagaaatctcaaaaattcgcaaccgagaaacagtgccccgaagatcacctctacgtgctggaacataatctccatctattaatccgggagttccacaaacagactctgagcagcatcatgatgcctcatcccgcctcagctcccttcgggcacaaaagaatgagactctcaggcccccaggcattcgacaaaaacgagattaactcactccagtccagcgagggcctgcttgagaaaattattaaacaagcaaagcacatctttttacgttcacgcgctgctgcgactatagattctctcgcctccaggatcgaggacccccagattcaggcccactggagtaatatcaatgatgtgtatgagtctagcgttaaggtcctcatcaccagccaaggctatgaacaaatttgtaaatctattcagctccagctaaatattggcgtcgaacagattagagtcgtgcatagggatggaagagttataaccctttcctaccaagagcaggagctccaggattttttgttgagccagatgagtcagcaccaagtccacgccgtacaacagttagccaaggtgatgggttggcaggtgttgtcattttctaatcatgtgggacttgggcccattgaatctataggaaatgcttcagctattaccgtggcctcacctagcggggattatgctatttcagttagaaacggacctgagagcggatccaaaattatggtgcagttcccgaggaatcagtgcaaggaccttcccaagtccgatgtgcttcaggataataagtggtcccacctgcgtggcccattcaaggaggtgcaatggaataagatggaagggcggaactttgtgtacaagatggagttactgatgagcgctctgtctccctgcctgctgtag

SEQ ID NO: 194420 - DNA, 438 bp, synthetic construct
  misc_feature 1..438: note = Description of Artificial Sequence: Synthetic coding sequence
  source 1..438: mol_type = other DNA
atgagcggcgtgcgggccgtgcggatcagcatcgagagcgcctgcgagaagcaggtgcacgaagtgggacttgatggaaccgagacatatctgcctccgctttcaatgtcccagaaccttgcccgcctggcccagcgcatcgacttttcccaaggctcggggagtgaggaagaggaggccgccggcacggaaggtgacgcccaggagtggccaggggcggggtctagtgcagaccaggatgacgaagagggggtcgtcaagttccagccctctctgtggccttgggatagtgtgaggaataatcttcgctccgcactgacggagatgtgcgtgttatatgatgtcttgtcaatcgtcagagataaaaaattcatgaccctggatcccgtttctcaggatgctctgccgccaaaacaggttttcgtcgactttaactag

SEQ ID NO: 194421 - DNA, 627 bp, synthetic construct
  misc_feature 1..627: note = Description of Artificial Sequence: Synthetic coding sequence
  source 1..627: mol_type = other DNA
atggaggccccccccgtgaccatgatgcccgtgaccggcggcaccatcaacatgatggaatatctgttgcagggttccgtcctggatcacagcttagagagtctcatccatcggttgagaggcttgtgcgataacatggagcccgagacgtttcttgatcacgagatggtgttcctgctgaaaggccaacaggcttctccctttgttctccgggctaggagaagtatggatcgcgccggggccccatggcacctgaggtacttaggccaacccgagatgggcgataagaacaggcacgcattagtgagaaattgcgtggatatagcaacatccgagaacttgacggattttctcatggaaatgggattccgcatggaccacgagtttgtggccaagggccacctctttcgtaaggggataatgaagattatggtgtataagatattccgaattttagtcccagggaacaccgactcaactgaggcactatctctgtcttatttggttgaactatcagtggtggcgcctgccggccaggacatggtgtcagatgatatgaagaatttcgccgaacaactcaaacccctcgtacacctggaaaaaattgaccccaaacgcctgatgtag

SEQ ID NO: 194422 - DNA, 627 bp, synthetic construct
  misc_feature 1..627: note = Description of Artificial Sequence: Synthetic coding sequence
  source 1..627: mol_type = other DNA
atggaggccccccccgtgaccatgatgcccgtgaccggcggcaccatcaatatgatggaatatctgcttcaaggttcggtgttggaccatagccttgaaagcctcatccaccgcctgagaggtctctgtgataacatggagccagaaacatttctggatcacgagatggtgttcctcttgaaggggcagcaggccagcccctttgtactgcgtgctcgtcgctctatggaccgtgcaggcgccccctggcacctcagatatctcggccagccagagatgggcgacaagaatcggcatgccctggtgcgtaattgcgtcgacatcgcgacgtctgagaatctcacagatttcctcatggagatgggcttccgcatggaccatgagtttgtggcaaaagggcaccttttccgaaaaggcatcatgaaaattatggtgtacaaaattttccggatcctggttcccggcaatacagactcaacggaggctctttccctttcctatttagttgaactaagcgtggtagctcctgctggccaagatatggtgtcagacgacatgaaaaattttgccgaacagctcaaaccattagtccaccttgagaaaatcgaccccaagagattgatgtag

SEQ ID NO: 194423 - DNA, 585 bp, synthetic construct
  misc_feature 1..585: note = Description of Artificial Sequence: Synthetic coding sequence
  source 1..585: mol_type = other DNA
atggagaacttcaccgccctgttcggcgcccaggccgacccccccccaccccccacggctctgggatttgggccgggcaaaccccctcctccgccacccccgccagcgggcgggggaccagggactgcaccacccccgacagctgcaaccgccccccctggcgcggacaagtccggcgccggatgtgggcctttctacctgatgcgggagctaccaggttctaccgaactcaccgggtcaactaacctcatcacccattacaatctggagcaggcatacaacaaattctgtgggaagaaagttaaagagaagctaagtaactttttacctgacctccctggcatgatagacctgcctggaagtcatgacaattcgagtctgcgcagcctgatcgaaaagccccctatcctctcctccagcttcaatcctataaccggtaccatgctggctggatttcggctccacaccggtccactgcccgagcagtgtcgcctcatgcatatccaacctcccaagaaaaaaaacaagcataagcataagcaatcacgtacgcaagaccccgttccaccaggaaaaccatcttag

SEQ ID NO: 194424 - DNA, 735 bp, synthetic construct
  misc_feature 1..735: note = Description of Artificial Sequence: Synthetic coding sequence
  source 1..735: mol_type = other DNA
atggagaacttcaccgccctgttcggcgcccaggccgacccccccccccctcctacagcattagggttcgggcctggcaagcctccccctccccctcctcctcccgccggcggtggaccggggacggcccctccgcccactgccgccaccgccccccccggggctgacaaatcaggagcaggctgcggccctttttatctgatgagggagttgccgggcagcacggagctgacaggaagcaccaatttgattacgcactataatttggaacaggcctataataaattctgcgggaagaaagttaaagaaaagctctcaaattttctcccagatctcccaggaatgattgaccttccaggttcacacgataatagttccctgcgttctctgatcgaaaagcctcctatcctctcttcatccttcaatccgattacaggaaccatgctggctggctttaggctgcacacagggcctctgccggagcagtgcagacttatgcacatccagccgccaaaaaagaaaaataaacataaacacaagcagagccggacacaggatcccgttcctcccgaaaccccaagtgatagcgaccacaagaaaaaaaaaaagaaaaaagaggaggatcctgagaggaaaaggaaaaagaaggagaaaaaaaagaagaagaacagacacagtcccgaccatccaggcatggggagtagccaagcctcttcttccagcagtcttaggtag

SEQ ID NO: 194425 - DNA, 639 bp, synthetic construct
  misc_feature 1..639: note = Description of Artificial Sequence: Synthetic coding sequence
  source 1..639: mol_type = other DNA
atgggcgtgacctgcgtgagccagatgcccgtggccgagggcaagagcgtgcagcaaaccgtggaattgctgacgagaaagctggagatgctgggagcagaaaagcaggggaccttctgtgtggactgtgagacttatcacactgctgctagcacccttgggagccagggacagactggcaaactcatgtatgtgatgcacaatagtgagtacccgctgagttgtttcgctttgttcgagaacggtccttgcctgatcgcagatacaaacttcgacgtactgatggtgaaattgaaggggttcttccagagtgcgaaggcctccaaaatagagacaagaggaaccaggtaccagtattgtgactttcttgtcaaagtggggaccgtaaccatgggtccttccgccagaggcattagcgtcgaagtcgaatacgggccctgtgttgtggcatcagactgctggagccttctcctggaattcctacagtcttttctaggtagccacacccctggagcgcccgctgtattcggtaacaggcacgatgctgtgtacggcccggcagacacaatggttcaatacatggagttatttaataagattcgcaagcagcagcaggttcccgtggctggaatcagatag

SEQ ID NO: 194426 - DNA, 423 bp, synthetic construct
  misc_feature 1..423: note = Description of Artificial Sequence: Synthetic coding sequence
  source 1..423: mol_type = other DNA
atgcccgtggccgagggcaagagcgtgcagcagaccgtggagctgctaactcggaagctcgagatgctaggagccgaaaagcaggggaccttttgcgtcgactgtgaaacctatcacaccgctgcgtcaaccctggggagccaggggcagacgggaaagcttatgtacgtgatgcacaacagcgagtaccccctgagctgctttgccctctttgaaaatggaccatgtcttattgccgacactaacttcgatgtgctgatggttaagctgaagggtttcttccaaagtgcaaaagcctccaagatcgaaacaaggggtacacgatatcagtactgtgactttctggtcaaggtcggtaccgtaacaatgggaccttctgctcggggcatctcagtggaggtggaatatgggccctgtgtgtag

SEQ ID NO: 194427 - DNA, 438 bp, synthetic construct
  misc_feature 1..438: note = Description of Artificial Sequence: Synthetic coding sequence
  source 1..438: mol_type = other DNA
atgggcgtgacctgcgtgagccagatgcccgtggccgagggcaagtcagtgcagcagaccgttgagttattaactcggaaactcgagatgctcggcgccgaaaaacagggaaccttttgtgttgactgtgaaacttaccacacggctgcctccaccttgggctctcagggtcagaccgggaagcttatgtacgtgatgcacaattcagaatatccactatcatgttttgcactgttcgaaaacggcccatgtctcatcgctgacaccaatttcgacgtgctgatggtgaagctgaagggattctttcaatcggccaaagcctcaaaaattgaaactagaggtacacgatatcaatactgtgactttttggttaaagtgggaaccgttaccatgggaccaagcgcacggggcataagtgtcgaggtccggccctggtag

SEQ ID NO: 194428 - DNA, 372 bp, synthetic construct
  misc_feature 1..372: note = Description of Artificial Sequence: Synthetic coding sequence
  source 1..372: mol_type = other DNA
atgggcgtgacctgcgtgagccagatgcccgtggccgagggcaagtccgttcaacagacagtggagctattgacacggaaactcgaaatgttaggagcagagaagcaaggtaccttctgtgtggactgcgaaacttaccatacggccgcttctactctcggttcccagggccagacaggcaagctgatgtatgtgatgcacaattccgagtaccctttgagttgcttcgccctgtttgagaacggcccttgtctgatagctgacacaaactttgacgttttaatggtgaaactcaaaggattctttcagtcagccaaggcaagcaagattgaaacacggggcacaagatggtcaatggcccccgtgtggtag

SEQ ID NO: 194429 - DNA, 435 bp, synthetic construct
  misc_feature 1..435: note = Description of Artificial Sequence: Synthetic coding sequence
  source 1..435: mol_type = other DNA
atggccgaccggctgacccagctgcaggacgccgtgaacagcctggcggaccagttctgcaacgccatcggagttctgcagcaatgcggcccacccgcgtcattcaataatattcaaactgccatcaataaggaccagcccgctaaccccaccgaagaatatgctcagctatttgccgcgctgatcgcccggacagcgaaggacatcgacgtgcttatagactcccttccaagtgaggaaagcacagcagctctgcaggccgcatcactctataagttggaggaagaaaaccatgaagctgcaacatgtcttgaagatgttgtctaccgaggtgacatgctgctcgagaagattcagtccgcactggccgacatagcccagagtcaactgaagactcgctctgggactcatagccagtctctccctgacagttag

SEQ ID NO: 194430 - DNA, 4098 bp, synthetic construct
  misc_feature 1..4098: note = Description of Artificial Sequence: Synthetic coding sequence
  source 1..4098: mol_type = other DNA
atggagacccagctgcagagcatcttcgaggaggtggtgaagaccgaggtaattgaagaagcctttccaggaatgttcatggacacgcctgaagatgaaaaaacgaagctgataagctgtctgggtgcatttagacagttttggggaggcctgtctcaggagtcccacgagcagtgcatacagtggatagtcaagttcatccatggtcaacattccccgaagcgcatcagcttcttatacgactgcctggcgatggcggtggagactggtcttttgccccctaggctggtctgtgagtcactgatcaactctgatacactggaatgggaaagaacccagctttgggcactgaccttcaaactggtccggaagatcatcggcggggtggattataaaggcgtccgcgaccttctaaaagtgatcctggagaagatcctaaccatccccaacacggtgtcttctgcagtggtgcagcagctgttggccgcgagggaggttatcgcatacatcctggagcgcaatgcatgtttgctacccgcttacttcgctgtaacagaaattcgtaaactctacccagagggtaagcttccacattggttgctgggcaacctggtcagtgacttcgtggacactttccggcctacagccaggattaattctatctgcgggcgttgcagcctgcttcccgtggtgaacaatagcggcgccatatgtaactcatggaagttggatccggcgaccttgaggtttccgttaaagggactattgccctatgacaaagacctttttgagccacagacagcactgttgcgatacgttcttgaacagccttactcacgcgacatggtctgcaatatgctgggcctgaacaagcagacactgaacatcgcccagcacaagcagcgctgccccgttctcgaggaccagttagttgaccttgttgtttacgccatggaacgctcagaaaccgaggaaaaattcgatgatggcggcaccagccagttgctttggcagcatctcagttcacaactcatctttttcgtgctgtttcagttcgcctccttcccgcacatggtgttgagcctccaccagaaactggccggccgcggtcttatcaaaggccgcgaccatttaatgtgggtgcttctgcagttcatctccggctccattcaaaagaacgcactggctgatttcctgccggttatgaagctgtttgacctcctgtaccccgagaaggagtatattcccgtgcccgatattaataagccacaatctacacacgctttcgccatgacgtgcatttggattcatttgaatagaaaggctcagaatgataattccaagctccagatccccattccacatagtctccgcctgcaccatgagttcttgcagcagtctttgcgcaataagtctttgcagatgaacgactataagattgcattgctttgcaacgcctactcgactaacagcgaatgcttcacacttccaatgggggccctcgtggagacgatctacgggaacggtatcatgcgcatacctctccccggcactaactgtatggcttctggtagtatcacaccactcccaatgaacctgctggattcactgactgtgcatgctaaaatgagcctgatacatagtattgcaacgcgggtgatcaagctggctcatgctaagtcctccgtggctcttgcccctgcgctggtcgagacttattcaaggctcctcgtctacatggagatagaatccctcggcatcaaaggcttcatcagccaacttctgccaactgtgtttaagtcccacgcatgggggatcctccacacactcctggagatgttctcttataggatgcatcatatccagcctcattacagagtgcagcttttgtctcacctccacactctggcagcggtggcccagaccaaccagaatcagttgcacttatgcgtggagtctaccgccttgcgtctgattaccgctctaggctcttctgaagtgcagccccagttcacaaggtttttgagcgatccaaaaactgttctgtcggcagagagcgaggagctgaaccgagccctgatcctgacactggctcgggctactcacgtgacagacttttttaccggctcagattcaatacagggcacctggtgtaaagacattttgcagactattatgagcttcacccctcacaactgggcgtcccacacactctcttgcttccctggtcccctccaagcattcttcaaacagaacaatgtgccccaggagtcgagattcaacttaaaaaagaacgtggaagaagaataccggaagtggaagagtatgtccaacgagaatgatataatcacacatttctctatgcaggggtctcctccactcttcctgtgcctgctgtggaagatgctgcttgaaactgaccacattaaccagattggatacagggttctcgaaaggataggtgctagagcattagtagcacacgtgaggaccttcgccgatttccttgtgtatgagttctcaacctctgcaggagggcagcaactcaataagtgcatcgaaattctcaacgacatggtctggaaatataacatcgtgactctggaccggttaattctctgtcttgccatgaggtctcacgaaggaaatgaggctcaagtgtgctactttatcatccagctgctgcttctgaagcccaacgacttccgcaacagggtaagcgatttcgttaaagagaactcacctgaacattggcttcaaaacgattggcatactaaacatatgaattaccacaaaaagtatccagagaagctgtactttgaaggcctcgccgaacaggttgacccaccagtacagatccagagtccttatctccctatttattttggaaacgtctgcctgaggttcctaccagtcttcgatatcgtcatccacaggttcctcgagctactgccagtgagcaaaagccttgaaactctgctggatcacctaggtggcttatacaaattccatgaccgtcccgtgacttacttgtataacaccttacattactacgagatgcaccttcgcgatcgggcctttctgaaaagaaagctcgtgcatgctattattgggtcgctaaaggacaaccgaccccagggctggtgcctttcagatacatacctaaagtgcgctatgaatgcccgggaggaaaacccgtgggtgcccgatgatacctactattgtagactcattggccgcttggtggacactatggcgggcaaatccccaggcccctttcctaactgtgactggcggttcaacgaattcccaaatcctgctgctcatgcgctccacgtgacgtgtgtcgagttgatggcattagccgtttcgggcaaagaggttggtaacgccctgctgaacgttgttctgaagagtcagccgctcgtgccaagagaaaatataaccgcctggatgaacgctattggactgattatcaccgctttgcccgagccctattggatcgtgctgcatgatcgcattgtttccgtgataagcagtccctcactcacctctgaaactgagtgggtgggatacccgttccgtctcttcgactttacagcatgtcaccaatcttactccgaaatgagttgcagctacacactggcattggcccatgccgtctggcaccacagtagcatcgggcaactgagcctaattcctaaattcttgacagaggtcctgctccccatcgtgaagaccgaattccagctgctgtacgtctatcacctcgttggcccatttctgcagaggttccagcaggaaaggacaaggtgtatgatcgaaattggagtggcattctacgatatgttgctgaacgtggaccaatgttccacccacctgaattacatggatcctatatgtgattttctatatcatatgaagtatatgttcaccggggacagtgtgaaggaacaagtagaaaaaatcatctgcaatctcaagcctgcccttaagttgaggctccggttcattacccacataagtaagatggaacccgcagcggttcctcctcaagccatgaacagcgggtcacccgctcctcagagtaaccagtag

SEQ ID NO: 194431 - DNA, 2661 bp, synthetic construct
  misc_feature 1..2661: note = Description of Artificial Sequence: Synthetic coding sequence
  source 1..2661: mol_type = other DNA
atggagacccagctgcagagcatcttcgaggaggtggtgaagaccgaagtcatagaggaagcattccccggtatgttcatggacacccctgaagatgaaaagacgaagctaattagctgtttgggagccttccgacagttttggggtggtctcagtcaagaatcacacgaacagtgcattcagtggatcgttaaatttattcacggccagcacagtccaaaacggatctcgttcttatacgattgtctagcaatggctgtggagactggcctgcttccgcctagattggtttgtgaatcacttataaactctgacacgttggaatgggagcggacccaactctgggccttaactttcaagttagtccgaaaaatcatcgggggggtggattataagggcgtccgcgacctgcttaaagtaatactcgagaaaatcctgacaattcccaacacagtgtctagcgccgtggtccaacaactgctcgccgcgcgcgaagtgatcgcatacatcctggaacgaaatgcttgcttactgcccgcatacttcgccgtgacagaaatacgaaagttatatcccgagggcaagctgccccactggctattgggcaacttagtgagtgatttcgtggatacgtttcgaccaacagcaagaattaattctatttgcggccggtgcagcctcctgccggttgtgaacaactctggcgccatttgcaacagttggaagttggatcccgccaccctgaggtttccacttaagggcctcctgccctatgacaaggaccttttcgagcctcagactgcactgttgcgatacgtcctggaacagccttattctcgagatatggtctgcaatatgttaggcttgaataaacagacacttaatattgctcagcacaaacagcgatgccctgtgctagaagaccagctggtggatctggtggtttatgcaatggagagaagcgaaaccgaagagaagttcgatgacggcggcaccagtcaactactgtggcagcatcttagtagccagcttatattctttgttctttttcagttcgcatcttttccacatatggtcctctccttgcaccaaaagttggccggtcggggccttatcaagggccgggaccacctcatgtgggtgctgctacagtttatcagtggatctatccagaagaatgcactggccgactttctccccgtaatgaaactgtttgatctactgtatcccgagaaggaatacattcctgtgcccgacatcaataagccacagagcacccacgcctttgccatgacctgcatctggatccacctgaatagaaaggcccaaaatgacaattccaagctgcagatacccataccgcattccctccgcctgcatcacgagttcttacagcagtcacttcgaaataagtccttgcagatgaacgactacaaaattgccttgctgtgcaacgcctattctaccaattccgagtgtttcacactgcctatgggggctctggttgagacaatctatggtaatggaataatgcggatccctcttccagggaccaactgtatggcctcaggttcgataacacctttgcctatgaatttgctggactctctcacagttcatgccaagatgtcgttaatacattccattgcgacacgagtgatcaaactcgcccacgctaaatctagtgtggccctagccccagccttggtggaaacttactcaagactgctcgtctatatggagatagaatctctggggatcaagggatttatcagtcagctgctccccaccgtgttcaagagtcacgcctggggaattctccacaccctattagaaatgttttcgtataggatgcatcacatccaaccccattatcgagtgcaactactgtcacacctccacaccctggctgctgtggcccagacaaaccagaaccagcttcacctgtgcgtggaatccaccgccttaaggttgatcactgccctggggtcttccgaagtacagccccagttcaccagattcctgagtgatcctaagacagttttgtccgcggaatctgaggaactgaacagagccttaatccttactttagccagggcaactcacgttacagacttctttactgggagcgacagcattcaaggtacttggtgtaaggatatcctgcagaccatcatgagtttcaccccccacaactgggccagccacaccctgagttgttttcccggaccactccaagcctttttcaagcaaaacaatgtgccccaggagtctcgttttaaccttaagaaaaacgtggaggaagagtatcgaaaatggaagagtatgtccaatgagaatgatatcattactcacttttccatgcagggctccccccctctgttcctgtgtttactctggaagatgcttctggagactgaccatattaatcagattgggtacagagtcctcgaacgaataggggcccgagccctggtggctcacgttcgcaccttcgccgactttctcgtttatgaattttctaccagtgccgggggtcaacagctcaacaagtgcatcgagatactgaatgacatggtatggaagtacaatatcgtgaccctcgacaggttgattctgtgtctggtgcgcattaatacctttctgtctctattctcgtag

SEQ ID NO: 194432 - DNA, 4125 bp, synthetic construct
  misc_feature 1..4125: note = Description of Artificial Sequence: Synthetic coding sequence
  source 1..4125: mol_type = other DNA
atggagacccagctgcagagcatcttcgaggaggtggtgaagaccgaggtcatcgaggaggcctttccgggaatgttcatggacacacctgaggacgagaaaacaaaactgatatcttgtctgggcgcctttcggcaattttggggtggcttgtcgcaggagtcacacgaacagtgcatccagtggattgtcaagtttatccatggacagcactctccaaagagaatatctttcctgtacgattgcctcgctatggctgtcgagacggggctcttgcccccaagactggtgtgcgaatccttgatcaacagcgatacgctggagtgggaaaggactcagctttgggcactcaccttcaagcttgtaagaaagattattggcggcgtggactacaagggcgtcagagatttgttgaaagtaatactggaaaaaatcctgacaatccctaacacagtatcatctgcagttgtgcagcagctcctggcagcacgggaagtcattgcctatattttagagcgcaatgcttgtctcctacccgcatactttgccgtcacagaaatccgcaagttatatccagagggaaagcttcctcactggctgctgggcaacttggtatcagattttgttgacacatttcgccctactgctagaattaactcaatttgcgggcgctgctccctgctgccagttgtgaacaacagcggtgccatctgtaactcttggaagctcgatcctgcaaccctccgcttcccattaaaaggactgttaccgtacgacaaagatctcttcgaacctcagacggcactgctgaggtatgtcttagaacagccatattctcgggacatggtttgcaacatgctggggctgaataagcaaactctgaatatcgcacagcacaaacagagatgtcccgtgctggaggatcagctggtcgacctcgtggtctacgccatggagcggagtgaaaccgaggagaagtttgacgacggtggcacctctcagctgctgtggcagcacctgagcagtcagctgatcttcttcgttctgttccaattcgctagcttccctcacatggtcctgagcttgcatcagaagctggccggcagaggattgatcaaaggacgagaccacctaatgtgggtgctgctccagttcatctccggctctattcagaaaaatgctttagccgactttctccctgtgatgaagcttttcgatctgctgtatcccgagaaggagtatattcccgtacctgatattaacaagccacagtcaactcacgccttcgcaatgacatgcatttggattcatctgaacagaaaggcccagaacgataattctaagttgcagatccctatcccacacagcctcagactccaccacgaattcctgcaacagtcattgcggaacaagtctctccagatgaatgactacaagatcgccctattatgcaacgcgtactcaacaaattccgagtgcttcactttgcctatgggagctttggtcgagacaatttacggcaacgggatcatgcggatccctctgccgggcacgaactgcatggcctccggtagtattactcctctccccatgaatttgcttgattcccttacagtgcatgccaagatgtcattgattcactccatagcaacaagggtgatcaagctggcccacgccaagtcatcggttgcactggccccagcactggtggaaacatattcccgcttgctggtttacatggaaattgagtctctgggcatcaagggatttatcagccaactgctgcccactgtttttaaaagtcatgcttggggcatcctgcataccctgctcgagatgttcagctatagaatgcatcatatccagccccactaccgggtgcagctgctctcacaccttcacacactggccgcagtggctcagactaatcagaatcaactgcacctctgcgttgagtctaccgccttacggctgatcaccgcgctcggaagttccgaggtgcaaccgcaattcacacgttttctatcagaccctaaaaccgtgctgagcgccgagtccgaagagcttaacagagccttgatcctgacactggcacgtgccacacacgtcactgatttctttacgggcagtgactccattcagggaacctggtgcaaggacattctacagactataatgtcattcacgcctcacaactgggccagtcacacactgtcttgtttccctgggccactccaggccttctttaagcaaaataacgtcccccaagagtcgaggtttaatttgaaaaaaaatgttgaagaggaatatcgtaagtggaagagcatgtctaatgagaatgacattatcacccactttagcatgcaggggtcacctcccctattcctttgcttgctttggaaaatgttactggagacagaccacataaatcagattggctatcgggtgttggaacgaatcggggccagggccctcgtcgcacatgtgaggacatttgctgactttcttgtatatgagttttccacatcagccggtggccagcagctcaataagtgcatcgagatcctcaatgacatggtgtggaagtacaatatcgtcaccctggaccgcctgatcctgtgtctcgcaatgcgttctcacgaggggaacgaagcccaggtgtgctactttatcattcagctgcttttactgaaacctaacgacttccggaatagagtgtcagacttcgtgaaagagaatagtccggaacattggttgcagaacgattggcacaccaaacacatgaactaccataaaaaatatccggagaagctttattttgagggacttgccgaacaggtggaccctcccgttcaaattcagtctccatacctgccaatatattttggaaacgtgtgcctgcgctttctgcccgtgttcgacattgtcatacaccggttcctggagttgctgcccgtgagcaaaagcctggaaactctgcttgaccacttgggggggctctacaagtttcacgatagacctgttacatacttgtacaacactctgcattattacgagatgcatctccgcgaccgggcgttcctcaagaggaagctcgtccacgcaattatcggaagcctgaaagacaaccgccctcaggggtggtgcctgagcgacacatatcttaaatgcgctatgaatgctcgtgaggagaatccgtgggtacccgacgacacatactattgtcggttgatcggccggctcgtggacaccatggccgggaagagcccagggccgtttcccaattgcgactggcgatttaacgaattccccaatcccgcggcccacgctctccacgtcacctgcgttgaactgatggctttagctgtcagtggaaaagaagtgggcaacgcattgctgaatgtggtgctgaagtcacagccccttgttcctcgtgaaaacatcacggcatggatgaatgccatcgggctgattatcactgctctccctgaaccatattggattgtgctgcacgatcgcattgtctcagtgatatcatcaccctccctgaccagtgaaacagaatgggtgggctatccatttagactgtttgatttcactgcttgccatcagtcctatagtgaaatgtcatgctcatacactctcgcccttgcacacgcagtgtggcaccacagcagcataggccaactgtcactcatacctaagttcttgaccgaagttttgttgcccattgtgaagactgagttccaactgttgtatgtttaccatttggtgggcccattccttcaacgttttcaacaggagaggacgcggtgcatgattgagatcggagtcgcgttctatgatatgctgttgaatgtagaccagtgcagtacacaccttaattacatggacccaatatgcgacttcctgtaccacatgaaatacatgtttaccggcgatagtgtgaaagaacaggtcaagaagatcatttgcaatctgaaaccagctcttaagttgaggctcaggtttattacacacataagtaagatggaacctgcagccgtgccccctcaggccatgaacagtgggagtcccgctccgcagagcaaccaggtccccgtgtcactcccagtaacccagtag

SEQ ID NO: 194433 - DNA, 4095 bp, synthetic construct
  misc_feature 1..4095: note = Description of Artificial Sequence: Synthetic coding sequence
  source 1..4095: mol_type = other DNA
atggagacccagctgcagagcatcttcgaggaggtggtgaagaccgaggttatagaggaagccttcccaggaatgttcatggacacgcctgaagacgaaaagactaagttaatttcgtgtctcggggcttttcgccagttctggggaggcctctcccaggaatcccacgagcaatgtatacagtggatagttaaattcatacatggccagcatagccctaagcgcatttctttcttatacgactgtctggctatggctgtcgaaaccggccttctgcctccgagactggtttgcgagtctctgatcaatagcgatactctggaatgggagcgcacccaactttgggctctcacatttaagctggtgagaaaaattattggtggggtcgactataaaggtgtgcgagacctgctgaaggtcatattagaaaagatactgaccattcctaatactgtttcctcagccgtcgttcagcaactgctggcggcacgtgaagtcattgcctatattttggagcgcaatgcatgtcttttgcctgcctactttgccgttacggagattcgcaagctgtatcctgagggcaagctgccccactggctgctgggtaatctcgtatctgacttcgtcgacacctttcggcctactgcacgaatcaatagtatctgtggcagatgctcgttgcttccagttgttaataattccggagccatctgcaattcttggaagctggatccagctaccctgagattcccccttaaaggcctgctgccatatgataaagatctatttgagccccaaactgctctgttgcgatacgtcctggaacagccatactcacgcgatatggtatgcaatatgctggggttaaataaacagcacaaacaaaggtgccccgttttagaagaccagctggtggatttagtggtttatgcaatggagcgctccgaaacagaagagaaattcgatgatggcgggacctcacagcttctttggcagcatctcagctcgcagttgatcttttttgtgttattccagttcgcctcctttccccacatggtcctgagcctgcatcagaagctggcgggcaggggactcatcaaaggaagggaccatctgatgtgggtactgttacagtttattagcggctcgatccagaagaacgctctcgcagactttctgcctgtgatgaaattatttgacttgctgtatcccgaaaaggaatatatccctgtacctgatataaataagcctcagagcacacacgccttcgccatgacgtgtatatggattcatctgaatcggaaggcccagaacgacaacagcaagctacagattcctataccccatagcttgcgattgcatcacgagtttttacaacagtcgctgcgtaacaagtctcttcaaatgaacgactacaagatcgcactgctctgcaacgcttactcaacgaactctgaatgtttcactctccccatgggcgccttggtcgaaaccatttatggaaatggaatcatgaggatcccactgccgggtacaaattgtatggcttctgggagcatcacacctctcccgatgaatctactggactcactgactgtccacgccaaaatgtctctcattcacagtatcgccaccagagtaataaaactcgcacacgccaagagttctgtagccctggctcctgccctagtggagacatactctaggcttctcgtgtacatggagatagagagtctcgggattaaagggttcatctctcaattgctgcctaccgttttcaaaagccacgcatgggggatcctgcacacattgttggaaatgttcagctatcggatgcaccatattcagccacactaccgtgtgcaactcctgtctcacctgcacacactggccgctgtggcccagactaaccagaaccaacttcacttgtgcgtcgagagcaccgcgttgagactcatcaccgctcttggttcaagcgaggtacaaccccagtttacgaggtttctctccgatccaaaaaccgtgttgtcagccgagagtgaggaactcaaccgggcattaatcttgacgttggcaagggccactcacgttaccgactttttcactgggtcagatagcatccaggggacatggtgcaaggacatcctgcagacaattatgagctttactccccataattgggcaagccatacgctgagctgtttcccggggccacttcaggccttcttcaaacagaacaacgttccacaggagtctcggtttaatcttaagaaaaacgtggaggaggagtatcggaaatggaaatcaatgagcaacgagaacgatatcataactcacttcagcatgcagggctcaccacctctgtttctctgccttctgtggaaaatgctgctagagactgatcacatcaaccagatcgggtacagggtgcttgagagaattggtgcgagggcactggtggcacatgtgagaacattcgctgactttctggtgtacgagttttctacgtccgccggagggcaacagctgaacaagtgtattgaaatcctcaacgatatggtgtggaaatacaatatcgtcacactggataggctgatactttgtctggcaatgcgcagccatgagggcaacgaggcacaggtctgctattttattattcaattgttgctcctgaaacctaacgactttcgcaaccgtgtatctgactttgttaaagaaaattcccctgaacattggctgcagaatgactggcatacaaagcatatgaactatcacaaaaaataccccgagaagctctactttgaagggctcgctgagcaggtggaccctccggtacagattcagtccccttatctaccaatatactttggcaatgtttgcctgcgctttttaccggtgttcgatatcgttatccaccggttcctcgaactgttgccagtctccaaatccttagagactctcctggatcacttgggtggcctctataagtttcatgaccgacccgtgacttatctgtataatactcttcactactacgagatgcacctcagagacagagcattcctaaagcgcaagctggttcacgctataataggctctctgaaagataacagaccacagggatggtgtctcagcgatacctatctgaagtgtgccatgaatgctcgggaggagaatccgtgggtgcctgacgacacatattattgtcgacttattgggaggttggtcgacactatggcagggaaaagcccaggacccttccctaactgcgactggagatttaacgagttccctaatcccgccgcacacgcactccatgtgacttgcgttgaattaatggcgctggctgtgtcgggcaaggaggtcgggaatgcactgctgaacgttgtactgaagtcccagcccttagtaccccgtgagaacatcacggcgtggatgaacgccatcggtctgattataactgccctgcctgagccttactggattgtcctgcacgatagaattgtttcagtgatctcaagcccttctctcacctctgagaccgaatgggtgggatatccattccgcctgtttgatttcactgcatgtcaccagagttattctgagatgtcctgctcctatacccttgctctggcccacgcagtgtggcaccattctagcattggccaactttcactgatccccaagtttctgacagaggtcctgttaccaatcgtaaaaacagaatttcaactcctctatgtgtatcacctggtggggccttttctccaaaggttccaacaggaacgaacccgttgtatgatcgaaatcggcgtggcgttctatgacatgctgctcaacgttgaccagtgttccactcatttaaactacatggaccccatttgcgacttcctttaccatatgaaatacatgttcaccggggattcagtgaaggaacaggtggagaagattatctgcaacctcaaaccggcactgaaacttaggctccgatttataacacatatatctaagatggaacccgccgctgttccaccgcaggctatgaattctggcagcccagccccgcagagtaaccaggtagataccttaacatag

SEQ ID NO: 194434 - DNA, 4107 bp, synthetic construct
  misc_feature 1..4107: note = Description of Artificial Sequence: Synthetic coding sequence
  source 1..4107: mol_type = other DNA
atggagacccagctgcagagcatcttcgaggaggtggtgaagaccgaagtgatcgaggaggcttttccaggaatgttcatggatacgcctgaagacgaaaagactaaactgattagttgtctgggggctttccgccaattttggggtggactgtctcaggagtctcacgaacagtgtatccaatggattgttaaatttattcacggccagcattctccaaaaagaatatcattcctgtacgactgccttgcaatggccgtggaaactggcctactgccccccaggctggtctgcgagtccttgataaattccgataccctggagtgggagaggacacaactctgggcgctcacttttaaactggtccggaagatcatcggcggcgtagactataaaggggtgcgggaccttctgaaagtgatcttagaaaaaattctgacaatccctaacaccgtatcctctgcagtggtccagcaactgttggcggctagggaagtaattgcatatatactagagcgaaacgcctgcctactacctgcatattttgctgtgactgaaattcgcaagctgtaccccgagggaaagcttcctcattggctccttggcaacctagtgtctgactttgtggataccttcagaccaacggccaggattaactctatttgcggtaggtgctctctgctgcccgttgtgaataacagcggcgcaatatgtaattcctggaagctggatcccgcaacccttaggtttcctcttaaagggttgcttccatatgataaggacctatttgaaccacaaactgccttactgagatatgtccttgagcaaccatactccagggacatggtatgcaatatgcttggactaaataagcaacataaacagcggtgtccagtccttgaagatcaacttgtagatctcgtggtttacgcaatggagcgtagtgagactgaagagaaatttgacgatggtggaacaagccagctcctctggcagcatttgtccagccagctcatcttttttgtcctgttccaattcgcttccttcccccatatggtcttgagcctacatcaaaagctggccggtcggggcctaattaagggcagagatcatttgatgtgggtcctgctgcagtttatttccgggagtattcaaaagaacgctctggctgacttcttgcccgtgatgaagcttttcgacctcctctatcccgagaaggagtatatcccagttcccgacatcaacaagccccaatcgactcacgctttcgccatgacctgtatatggatccatcttaacagaaaagcgcagaatgataacagcaaactgcagatcccaattccgcacagcctgcgactgcaccatgagtttctccagcaatctttacgaaacaaatcactccagatgaatgactacaagatagccctcttgtgtaatgcgtacagcacaaactcggagtgcttcactttaccaatgggagctttggtggagaccatctacgggaatgggatcatgagaattcccctacccggtactaattgcatggctagcggatcaataactccactacccatgaacctactggactccttgacagttcacgcaaagatgagcctgatccattcaatcgcgactagagttatcaaacttgcacacgcgaagagctcagtcgcactagcacctgctctcgttgaaacctactccaggctcctggtctacatggagattgagagcctcgggatcaaagggttcattagccagctgctcccaacagtgttcaaaagccatgcctggggaatcctgcacactcttctcgaaatgttctcttacagaatgcaccacatacagcctcattacagagtccagctattgtcccatctgcacactctggcagccgtggcccagactaatcagaaccagctgcacctgtgcgtggaatccactgccctccgtctcatcactgccctgggcagcagcgaagtacaaccacagtttacacggttcctgtcagatccaaaaacagttctctcagcagagtcagaagagctgaatcgcgccctgatactaaccctggctcgggctacgcatgtgaccgacttttttacaggctcagattctatccagggtacctggtgtaaagatattttacagaccattatgagtttcaccccccacaactgggcctctcataccctgtcatgcttccccggtcctttacaggcatttttcaagcagaataacgtaccgcaggagtcccggtttaacctgaaaaagaacgtcgaggaagaataccggaaatggaagagtatgagtaatgagaatgatattattacccacttttctatgcagggctcacctcctttgtttttgtgtctactgtggaagatgcttttagagactgaccacattaaccaaatcggataccgagtgctggagcgcatcggcgcgagggcactcgtggctcacgtgcggacattcgctgattttctggtttacgagttttccacctcagccggtgggcagcagctcaacaaatgtatcgagatccttaacgacatggtatggaaatacaatatagtgacactcgacaggctgatcttatgcctggcaatgcggtcccatgaaggcaatgaggcacaagtctgctacttcataatacaactgttattactgaagccgaacgacttccggaaccgagtgtctgacttcgttaaagaaaactcccctgagcattggcttcagaacgattggcatactaagcatatgaattatcacaagaaataccctgagaaattatatttcgaagggttagctgaacaggttgatccccctgttcagattcagtcgccctacttaccaatctatttcggaaatgtgtgcttgagattccttccagtgttcgacatcgtcattcatcgctttctggagctactgccagtgagtaaatctctggaaacgttattggaccatctggggggactgtataagttccacgaccgcccagttacgtacttatacaatacccttcactattacgagatgcacctgagggaccgtgcatttcttaaacgtaagctcgtgcacgccattataggctcccttaaggacaatagacctcagggctggtgcctgtccgatacatacctgaagtgcgctatgaacgccagagaggagaacccatgggtcccagatgatacttactactgccgccttattggacggttggtcgacacaatggcgggcaaaagtccaggcccttttccaaactgcgactggcgctttaacgagtttcccaacccagcagctcatgccctacacgtcacgtgcgtggagttgatggctctagctgtttcggggaaggaagtcggtaacgccctccttaatgtggtattgaaatcacagccactggtgcctcgcgagaatatcacagcttggatgaatgcaatcggactcatcatcactgccctgcccgagccctattggatagttctgcatgacagaattgtctcagtaatttctagccccagtctcacatctgaaaccgaatgggtggggtacccttttcgtctatttgatttcaccgcctgtcaccagtcctactccgagatgagctgctcgtacacgttggccctggctcacgcggtctggcaccacagctccataggccagctatccttgattcccaagtttctgaccgaagtgctgctccccattgtaaaaacagagtttcagcttctctatgtgtatcacctggtggggccattcctccagcggtttcagcaggaaaggacgaggtgtatgatcgagatcggagttgccttctacgacatgctgcttaatgttgaccagtgctctacccacctcaattatatggatcctatatgcgacttcctgtaccacatgaagtacatgttcactggagacagtgtgaaagaacaagttgaaaagatcatttgtaacctcaagcccgctctgaagcttaggctgcgttttattacccacatcagcaaaatggaaccagccgcagtgcctcctcaggccatgaacagtggttcacccgccccccagagcaaccaggtcccagtgtccctccccgtaacgcagtag

SEQ ID NO: 194435 - DNA, 4125 bp, synthetic construct
  misc_feature 1..4125: note = Description of Artificial Sequence: Synthetic coding sequence
  source 1..4125: mol_type = other DNA
atggagacccagctgcagagcatcttcgaggaggtggtgaagaccgaagtgatagaggaggctttcccaggcatgtttatggacactcccgaagacgagaaaaccaaactaatatcatgcctcggagcctttcgccagttctgggggggactttctcaggaatcacatgagcagtgtatacagtggatcgtcaagtttatccacggccagcatagccccaaacgaatcagctttctgtacgattgcctggctatggctgttgagaccggactcttgccccctaggctcgtatgtgaaagtctcatcaacagcgatacgctggaatgggagcggacacagctctgggccctgaccttcaagctagtccggaaaattattggtggcgtggactataaaggcgtcagagatcttcttaaagttatcctggagaaaatcctcactattcctaataccgtgtcttccgccgtggttcagcagctgcttgcagcacgggaagtgatcgcgtacatcctggaacgcaatgcttgtctcctgccggcgtacttcgcggtaaccgaaattcgaaaattgtaccccgagggcaaactgccacactggctgctgggcaacctggtgtcagattttgttgacactttccgtcctaccgccagaatcaacagcatctgcggtagatgctctttgctgccagtcgttaataacagcggggccatttgcaatagctggaagctggatcctgctacgctcagattccccttaaaaggcctcctgccctacgataaggacctgttcgaaccgcagactgctctgctgaggtatgtgctggagcagccctactctagggacatggtctgcaatatgttagggctaaataagcagctgatttcagctctccagcacaagcaacggtgtccagtactcgaggatcagctcgttgaccttgtggtatacgccatggaacgaagtgaaactgaggagaagtttgacgatggggggacatcccaactactctggcagcacctgagcagtcagctgattttttttgtgctgttccagttcgcaagcttcccgcacatggtgttaagcctgcatcaaaaactcgccgggcggggactgattaaggggagggaccacctgatgtgggtactgctgcagtttataagcggatccatccaaaagaatgcactggccgacttcctgccggtcatgaagctcttcgacttgttgtatcccgagaaagaatatatccctgttcccgacattaacaagccgcagtccacacatgcattcgccatgacttgcatctggatccacctgaatagaaaggcacagaacgacaattctaagctccagatccctataccccacagtctccgcctgcaccacgaattcctacaacaatctctccggaacaagtccctgcagatgaatgattacaaaatcgcgttgctatgtaacgcctactctaccaatagcgagtgttttactcttcctatgggagctttagtggaaacaatttacggtaatggtattatgaggattcccctgcccgggaccaactgcatggctagcggcagtataacgcccttgccgatgaacctactagattccctaaccgttcacgctaagatgtccctgatccatagcattgctaccagggtcatcaaactggcccatgcaaaatcctctgtggcacttgctccggccctggtagaaacttattctaggctgttggtctacatggaaatcgaatcacttggcatcaaagggtttataagccagcttcttcccactgtcttcaaatctcacgcatggggaatcttacacacactcctggagatgttctcgtacagaatgcaccacattcagccacactatcgcgtccagctcctgagccacctgcacacactggctgcagtggcccagacaaaccagaaccagctgcacctgtgcgtcgagagtactgctctccggctaatcactgctctgggatccagcgaagttcagccccagtttacacggtttctgtctgatcctaagaccgtcttgtcagctgaaagtgaggagctgaaccgcgctctgatcttaacgctggctcgtgcaacacacgtgaccgacttcttcactgggagcgactcaatccagggcacctggtgtaaagacatactgcagaccatcatgtctttcaccccacacaactgggctagccacactttgtcatgctttcccgggcctctgcaggccttcttcaagcagaataacgtgccccaggagtctcgctttaaccttaaaaagaacgtcgaagaggagtatcgcaagtggaagtcaatgagtaatgagaacgacattattacacactttagcatgcagggtagccccccgctttttttgtgtctcctgtggaagatgctcctagagacagaccacattaatcaaattggatatagggtcctggaaagaatcggagctagggccctggtcgcccacgttcgcacattcgctgacttcctggtctatgagttctccactagtgcagggggccagcaattaaataagtgtatcgagattctcaatgacatggtttggaagtataacattgtgactctggatcggttgattctctgcctcgctatgagatcccacgagggcaacgaggctcaagtttgctactttattatacagctactgctgctgaagccgaatgacttcagaaatcgcgtatctgatttcgtcaaagaaaacagtcctgagcactggctgcagaacgattggcacactaaacatatgaactatcataaaaaatatcccgaaaaactgtatttcgaaggcttagccgaacaggtggatccaccagtacagattcagagtccatatttgccaatctattttggcaacgtatgtctgaggttcctcccagtcttcgatatcgtgatccacagatttcttgagctgcttccagtgagtaagagccttgaaacccttcttgatcatctggggggtctctataagttccatgataggcctgttacatacctctataatacgctgcattattacgagatgcaccttcgcgatcgtgcttttctcaaacgcaagctcgtccacgctattatcggctcgttaaaggacaatagaccccaaggctggtgcctctccgatacttacctgaagtgcgctatgaatgctcgggaggagaacccatgggtgccagatgatacatactactgcagattaatagggcggctggttgacactatggctggcaagtcacccggccctttccctaattgcgactggcgctttaatgagtttcccaacccagccgcccacgccctccatgtgacttgtgtcgagctcatggccctagctgtgagtggcaaagaagtcggaaatgctctccttaacgtggtattgaaaagccagcctttggtcccccgggaaaatattaccgcctggatgaacgccataggcttaattattacggcactgcctgaaccgtactggatcgtgttgcacgaccgcattgtatcagtgatctctagtccgagtctcactagtgagaccgagtgggtgggctatccttttagactctttgacttcacagcgtgccaccagtcatattctgagatgagctgcagctatacactagcactggctcatgccgtgtggcaccactccagcataggccagctctctctaatccctaagtttttgactgaggtgttactgccaattgttaaaacagagttccagctcctatacgtgtatcatctcgtcggaccattcctgcaacgctttcagcaggaacgaacgcgctgtatgatcgagatcggggtggctttctatgatatgttgctgaacgtggatcagtgttctacccatctgaattacatggatcccatctgtgactttctgtaccatatgaaatatatgttcaccggtgactccgttaaagagcaagtcgagaaaatcatctgtaacctaaaacccgcactgaagctcagactccgcttcatcacccatattagtaaaatggaaccggccgctgtacctccccaggcgatgaactctggctcccccgcccctcagtcaaatcaggtccccgtctcactgcccgtaacacagtag

SEQ ID NO: 194436 - DNA, 114 bp, synthetic construct
  misc_feature 1..114: note = Description of Artificial Sequence: Synthetic coding sequence
  source 1..114: mol_type = other DNA
atggagacccagctgcagagcatcttcgaggaggtggtgaagaccgaggtgatcgaggaggcatttcccggcatgtttatggacacgccagaagacgagaagagttccaagtag

SEQ ID NO: 194437 - DNA, 132 bp, synthetic construct
  misc_feature 1..132: note = Description of Artificial Sequence: Synthetic coding sequence
  source 1..132: mol_type = other DNA
atggagacccagctgcagagcatcttcgaggaggtggtgaagaccgaagtcatagaagaggctttcccgggaatgtttatggacaccccggaggatgaaaagacaaaactttttatggagatggaactgtag

SEQ ID NO: 194438 - DNA, 1428 bp, synthetic construct
  misc_feature 1..1428: note = Description of Artificial Sequence: Synthetic coding sequence
  source 1..1428: mol_type = other DNA
atggagacccagctgcagagcatcttcgaggaggtggtgaagaccgaggtgattgaagaagcattcccaggaatgttcatggatacaccagaagatgagaagacaaagctgatttcatgtcttggcgctttcagacagttttggggcggcctctcacaggagagccacgagcaatgcattcagtggattgtgaagttcatacacgggcaacattcccccaagaggattagttttctgtacgactgcctcgccatggctgtggagactggccttctccccccccgcctggtttgtgaatccctcataaatagcgacacactggagtgggagcgcacacagctctgggccctgacgttcaaactggttcgaaaaatcataggtggagtcgactacaagggggtgcgggacctattgaaagtgatcctcgaaaaaatcctcaccatccccaacacggtatcttcagccgtcgtgcagcaactcctggccgcccgggaagttattgcttacatactggagagaaacgcatgcctgttaccagcctactttgccgtgaccgaaattagaaagctgtaccctgaggggaagctgccccactggctgctagggaatctagtctccgattttgtggacaccttcaggcctacggcaaggataaactccatttgcggacggtgttctctgctcccagtcgttaacaactccggtgcaatctgtaattcctggaaactcgaccccgctacgctgcgttttcctctgaaggggttgctcccttacgataaggatctcttcgaaccccaaacagctctgcttcggtacgtgctggagcagccgtactcaagggacatggtttgtaacatgcttggcctcaataagcaacacaagcagcgatgtcccgtcctggaggaccagcttgttgatctggttgtttacgccatggagaggtcagagacagaagaaaagtttgacgatggcggcacttcccagttactatggcagcacttgtcttctcagttgatattttttgtgctttttcaatttgctagttttccacacatggtattatccctacaccaaaagctcgccgggcgcggactgatcaaaggacgcgaccatctcatgtgggtgcttctgcagtttattagtggtagcatccaaaagaatgcacttgcagactttctgccggtgatgaagcttttcgatttgctctacccggaaaaagaatatatccccgttccggacatcaacaaacctcagagtacacacgcttttgccatgacgtgcatctggattcaccttaaccgcaaggctcagaatgataattcaaagctgcagatccccattccgcatagccttagactccaccacgagtctgcttttgccaactgtttccagatcacctgtatgggggatttaactcatactccttag

SEQ ID NO: 194439 - DNA, 429 bp, synthetic construct
  misc_feature 1..429: note = Description of Artificial Sequence: Synthetic coding sequence
  source 1..429: mol_type = other DNA
atgcaccacatccagccccactaccgggtgcagctgctgagccacctgcatacactggccgctgtggcacagacaaatcagaatcagctccacctgtgcgtagagtcaaccgccttgcggctcattaccgccctggggagcagcgaggtgcagccacaattcactcggttcttgagtgacccaaagactgtcttgtccgctgagagcgaagagctgaacagagccttaatactgactttggcccgtgccacccatgtaacggacttcttcacggggtctgattccattcaaggaacctggtgcaaagacattcttcagacaatcatgtcctttacgccacataattgggcctcccacacactctcttgcttccccggacctctgcagacattattaattttaggcgagcttgccctccggaagacatag

SEQ ID NO: 194440 - DNA, 2661 bp, synthetic construct
  misc_feature 1..2661: note = Description of Artificial Sequence: Synthetic coding sequence
  source 1..2661: mol_type = other DNA
atggagacccagctgcagagcatcttcgaggaggtggtgaagaccgaagtgattgaggaagcatttcctggcatgttcatggatacccccgaggatgaaaaaaccaagcttatatcttgcctgggggccttcagacagttttggggaggtctgtcacaagagtctcatgagcagtgtatccagtggatcgtgaaattcattcacggccagcattcccctaaaaggatttccttcttgtacgattgtctggccatggcggtcgagaccgggttgttgccaccccggcttgtgtgtgagtcactcatcaactccgatacgcttgagtgggaacgcacccagctctgggcgttaacatttaaactggtccggaaaattattggcggcgtggattataaaggtgttagagacctgttaaaagtgatcttagaaaagatcttgaccataccaaatacagtaagttctgctgtggtgcagcagttgctcgcggcaagggaagtcatcgcctacattttagagcgaaatgcttgtttgcttcctgcctactttgcggtgaccgagataagaaagttgtaccctgagggtaagctccctcactggctattgggcaacctggttagtgattttgtggacacctttagaccaactgctcggatcaacagcatctgtgggcgctgctcattgttacctgtggtgaataactcaggtgccatctgtaatagctggaagttagacccagcaaccctgagattcccgttaaaaggtctgctgccatatgacaaagacttgtttgaaccacaaaccgcattactaaggtacgtccttgagcaaccctactctagagatatggtctgcaacatgctgggtctcaataagcaggtactgaaaatttttaagcacaagcagcggtgtccagtgctggaggaccaattggtagacctagtcgtgtacgccatggaaagatccgaaactgaagaaaagttcgatgacggtggaacatcccagctattatggcaacacctttcttcccaattaatcttttttgtgctcttccaatttgccagctttccccacatggtactgagcctgcaccaaaagctggccggcagagggctgattaaggggcgcgatcacctcatgtgggtgctgctccaatttatcagcggctcaattcaaaaaaacgctcttgccgactttctgcccgtgatgaagctgtttgatctcctgtatcctgaaaaggaatacattcccgtgcctgacattaacaaaccgcaatcaacgcacgcctttgcgatgacttgtatttggattcatcttaataggaaggcgcaaaacgataacagcaagctccaaattcccatcccccattctctcagactgcaccacgagttcctgcaacaatctctgagaaataaatctcttcaaatgaacgattacaaaattgccctgctatgcaacgcatactctacgaatagtgaatgtttcacccttcctatgggagctcttgtagaaactatttacggcaatggcatcatgcgtatccccctgcccggtaccaactgcatggcttctggctctatcaccccgttgccaatgaatctgcttgattctctgaccgtacacgcaaaaatgtccctgatccactctatcgccacaagagttattaagctcgcacacgctaaatctagcgtcgccctggctcctgcgctcgtcgaaacatattcaaggttgctagtgtatatggagatcgagtccctggggattaagggctttattagccagctgctgcccaccgtgttcaaaagtcacgcctggggcattttgcacaccctcctggagatgttttcatataggatgcatcatatccagccacactatagggtgcaactcctcagtcacctgcacacccttgctgcagtggcacagaccaaccagaaccagctacacctctgtgttgagtcaaccgcccttaggctcatcactgcactgggttcttctgaggtgcagcctcagttcactcggtttcttagtgatccaaaaactgttctgtccgcagagtcagaggagctgaatagagcactgatcttgacactggctagggctactcatgtgaccgatttcttcacaggtagcgactccattcagggaacctggtgtaaagatattttgcagaccattatgtcatttacacctcacaattgggcctcccacactcttagttgttttcccgggcctctgcaggccttcttcaaacagaataatgtgcctcaagaaagtcggttcaatttgaaaaagaacgtcgaggaggaatatcgaaaatggaagtccatgtcaaacgagaatgatatcatcacccactttagtatgcagggctctcccccactttttttgtgtttactctggaagatgctgctcgagaccgaccatatcaatcaaatagggtacagggtgctcgagcgtatcggagctcgagctcttgtcgcacacgttagaaccttcgcagacttccttgtatacgaattctctaccagcgccggtggacagcagttgaacaagtgtatagagatactgaacgacatggtgtggaaatacaacatcgtcacgttggacaggctgattctgtgcctggtacggatcaacacattcctgagtcttttctcatag

SEQ ID NO: 194441 - DNA, 3030 bp, synthetic construct
  misc_feature 1..3030: note = Description of Artificial Sequence: Synthetic coding sequence
  source 1..3030: mol_type = other DNA
atggagcggagcgagaccgaggagaagttcgacgacggcggcaccagccagctgctctggcaacacctctcatcccagttgatcttttttgtcttgttccagtttgcatcttttccacacatggtcctctccctgcatcagaaatatatccctgtgccagacattaacaaaccacagagcacacacgctttcgccatgacctgtatctggatacacttgaacagaaaagctcagaatgacaatagtaaactgcagatacccatcccccactccctgcggctgcatcacgagtttctccagcagtctttgaggaataagtctttgcagatgaatgactataaaatcgctctgctgtgtaatgcctacagcaccaactccgaatgttttaccttgcctatgggcgccctcgtggaaactatctatggaaacgggattatgcgcatcccactgccaggaacaaattgcatggcgagtggtagtatcacgcctctgcctatgaacctcctggattcactgacggtgcacgctaagatgagtctgatccacagcatcgctacccgggtgatcaagctcgctcatgccaaaagctcggtggcattggctcctgcactagtggaaacctatagccggctcttagtgtacatggaaatcgagtcactgggtatcaagggctttatctctcagcttctccccactgtgttcaagtctcacgcgtggggaatcctgcacactctcctcgaaatgttcagctatcgcatgcaccacatccagccccattacagggtccagcttctatcacacctgcatacccttgcagctgttgcccaaacgaatcaaaaccagctccacctttgtgtggaaagcaccgcactgcgcctgatcaccgccttaggatctagcgaagtgcaaccccagtttactagatttctttctgatccaaagaccgtactcagtgctgaaagcgaggaactcaaccgcgctctgatcttgacccttgccagggccacccatgtgacagatttcttcacagggtcagacagtatacaggggacctggtgtaaagacattctgcagacgatcatgagtttcactccccacaattgggcctctcacacactgtcttgtttcccaggccccctccaggctttcttcaaacagaacaacgttcctcaagaatctaggttcaatcttaaaaagaatgtggaggaggagtatcgcaaatggaaaagcatgagcaatgaaaatgatatcattacccacttcagcatgcagggtagtcctcccttgtttttgtgcctcctgtggaaaatgttgctcgagaccgatcatatcaaccagattggatatagggtgctcgaacgcatcggagcccgggctcttgtggcacacgtgcgcacctttgccgacttcctggtctatgaattttctacgtccgccggcgggcagcaactcaataagtgtattgaaatcctgaacgacatggtatggaaatataacatagtcaccttggaccggctcatcctgtgtctggcaatgcggtcccatgaaggcaacgaagcacaggtctgttatttcattattcagttgcttctgcttaagccaaatgattttaggaatcgggtaagtgactttgtgaaggagaatagccctgagcactggctacagaatgactggcacaccaaacacatgaattatcataaaaaatacccagagaagttgtactttgaagggctggccgagcaggtcgatccaccagtgcagattcagagcccatatctgccaatctactttggcaatgtgtgtctgaggttcctgcccgtgttcgatatcgtcattcacagatttctggaattgctccctgtcagcaagtccctcgagactctattggaccatctgggtgggctctataagttccatgataggcctgtgacctatctgtacaatactctccattactacgaaatgcatcttcgggatcgggcctttctgaagaggaaattggtgcatgccatcattggttccctcaaagataatagaccccagggatggtgcctgagcgacacctacttgaaatgtgccatgaatgcacgcgaggagaatccctgggtgcctgatgacacttactactgtcgtctgatcggaagattggtcgacacgatggccggcaaaagccctggaccctttcctaattgtgattggcggttcaacgagtttccgaatcccgcagcacacgccctgcacgtgacctgcgtcgagctaatggcattggccgtgagcggaaaggaagtgggtaatgccctacttaacgtcgttctgaaatctcagccactggtgcctagggaaaatattaccgcctggatgaacgcaatagggctgatcattactgcattacccgaaccttactggatagtgttacacgacagaatcgtttcagttattagtagtccctccctgacttctgagaccgagtgggttgggtacccttttcgcctgttcgatttcacggcctgccaccaaagctatagcgagatgagctgttcatacaccttggccctggcacacgctgtctggcaccacagttccatcgggcagttgagcctgattcccaaattcctgacagaagtgctactacccattgtaaagacagagttccagcttctgtatgtatatcatttagtggggccttttctgcagaggttccaacaagagcgcacaagatgtatgatcgagattggtgtggctttttacgacatgctgctgaacgtcgaccagtgcagcacacatctaaattatatggaccccatttgcgacttcctttatcacatgaagtacatgttcacaggggattccgtgaaggaacaggtggagaaaattatctgtaatctgaaacccgcactcaagctgcgacttcgctttatcacgcatatcagcaaaatggaacctgccgccgtaccccctcaagccatgaactctggctcccctgccccccagagcaatcaggtccccgtctctttaccagtgactcaatag

SEQ ID NO: 194442 - DNA, 2970 bp, synthetic construct
  misc_feature 1..2970: note = Description of Artificial Sequence: Synthetic coding sequence
  source 1..2970: mol_type = other DNA
atgaaggtggtgaacctgaagcaggccatcctgcaggcctggaaggagcgctggagcgactatcagtgggcgatcaacatgaagaagttttttcctaagggcgcgacgtgggacattctcaacctggctgatgctcttttggaacaggcaatgattggcccttccccaaaccccctgatcctgagttatctcaaatatgcaatttccagtcagatggtctcttattcttctgtacttacagctatcagcaaatttgacgacttttcacgagatctgtgtgtccaggcgttactagacattatggatatgttctgtgacaggttgtcatgtcacggaaaagctgaggagtgtatcggtttatgccgcgccctgttatccgcactgcactggctcttacggtgcaccgcggcctcggctgagcgccttagagaaggtctagaagccggtacaccggctgccggcgagaaacaacttgcaatgtgcctccagagactggagaagacactatcaagtacaaaaaatagagcgctgttgcatatcgcaaaactggaagaggccagtagctggacagccattgagcacagcctgttgaagctcggggagatcctggcaaacttatctaatcctcagctgaggtctcaggctgaacagtgcggtactttaatacggtccatccctacaatgctatccgttcatgcggaacaaatgcacaagaccggttttcctaccgttcacgctgtgatccttcttgagggcacaatgaaccttaccggggagactcaatccctggttgaacagctgacaatggtgaagcggatgcagcacatccccactccactgtttgtgctggagatctggaaggcctgcttcgtggggcttatcgagtcccccgaaggcactgaagagcttaaatggaccgcatttacattccttaaaatcccccaagtgctggttaaactgaagaaatacagccacggagacaaagacttcacagaagacgtaaattgcgcctttgaattcctgttaaagctgacgcctctgctggataaagcagaccaacgttgcaattgcgactgcacaaatttcctcctgcaggagtgcgggaagcagggactactcagtgaagcttctgttaataatctcatggccaagcgaaaggccgatcgtgagcatgccccccagcagaagtccggcgaaaacgccaacatccaaccaaatatccagcttattttgagagcagagcctacagtgaccaacatcctcaagactatggatgctgatcattcaaaatctcctgagggcctactcggcgtgctgggtcatatgctgtcagggaagtctctggatttactgctggccgcagccgccgctacaggcaaacttaaatcttttgctcgcaaattcataaacctcaatgaattcaccacttacggctctgaagaatcaaccaagcccgcctcggtcagggcgctcctgtttgacatcagcttcctgatgctatgccacgttgcacaaacttatgggtccgaggtcatcttgtcagaatccagaacgggggctgaggttccctttttcgagacttggatgcaaacttgtatgcccgaagaagggaagatcctcaatcctgatcatccttgttttagaccagacagtacgaaagttgagagtctcgtggctctgctgaacaactcgagcgaaatgaaacttgtgcagatgaaatggcacgaagcttgcctgtctatctccgccgcgattcttgagattcttaacgcatgggagaacggcgtcttggcctttgagagtatccagaaaataactgacaacataaagggaaaagtgtgctccctggcagtatgcgctgtcgcttggcttgttgctcacgtgaggatgctcgggctggacgagagagaaaaatccctgcagatgatccgccagctcgctggcccgctgttcagtgaaaacaccctccagttctacaacgaacgtgtcgtgataatgaactcaatccttgagcgtatgtgtgctgacgtgcttcaacaaactgctacacaaattaagttcccctcaaccggggttgataccatgccatactggaatttgctacctccaaaacgacccataaaagaggttctgaccgacatctttgctaaggttttggaaaagggctgggtcgattcaaggtctatccacatcttcgacacccttcttcatatggggggcgtctattggttctgcaacaacctgattaaggaattattaaaggaaactcgcaaggaacacacgctaagggctgtcgagctcttgtacagcatcttctgtctggatatgcagcaggtgaccctcgtgctcctggggcatattcttcccggacttttgacggatagctccaagtggcattcattgatggatcctcccggaactgccttggcgaagttagctgtgtggtgcgccctgagctcatactcttcacataaaggccaggctagtacccgacaaaaaaagcgtcaccgcgaagacatcgaagattatatctctctttttcctctggacgacgtgcaacccagcaagctcatgcgcctccttagtagcaacgaggatgacgctaacatcctttcgtcccctacagatcgttctatgtcttctagtctgagcgctagtcaactgcacaccgtgaatatgcgcgatccattaaatcgcgtcctcgccaatctctttcttctgattagtagcattctcgggtcaaggacagctggccctcatacacagtttgtgcagtggttcatggaagaatgtgtcgactgtctggaacagggaggaaggggctctgtgttgcagttcatgcctttcaccactgtgtctgagctcgtgaaggtatcagcaatgagctccccgaaggtggttcttgcaattaccgacttatcactgccactcggaaggcaggtcgctgcgaaggcaatcgcagcgctatag

SEQ ID NO: 194443 - DNA, 2970 bp, synthetic construct
  misc_feature 1..2970: note = Description of Artificial Sequence: Synthetic coding sequence
  source 1..2970: mol_type = other DNA
atgaaggtggtgaacctgaagcaggccatcctgcaggcctggaaggaacgctggtcggactaccagtgggccatcaatatgaaaaagttttttccgaagggtgcaacttgggatatcctaaacctcgcagacgcgctcttggagcaggctatgatcggcccatcccccaaccctttaattctctcctatttgaaatacgccatctcaagtcaaatggtctcatattcatccgttctcaccgcaatctcaaaatttgacgacttctctcgtgacttgtgtgttcaagccctcctggacattatggacatgttctgcgatcgactttcctgtcacgggaaagccgaagaatgtatcggactgtgcagggccctgctctcggcactgcattggctgttaagatgtacggccgcatccgcagagcgcctgagggaaggattggaggcagggacccccgcggcgggagaaaaacagcttgcgatgtgtttacagcgcctagagaagaccctgtcaagcactaagaacagagcactgctgcacattgccaagctcgaagaagcttctagctggacagctatcgagcactccttgctcaaattgggcgagatactcgccaatctctccaacccccagttacggtcccaagcagagcagtgtggaaccctgatacggagtattccaacaatgctgagtgtccatgccgagcaaatgcacaaaacagggttcccgaccgtgcacgctgtgatcctgcttgagggtactatgaacttaacaggagagactcagagcttggtggagcaactcacgatggtgaagaggatgcaacacatccctacacctcttttcgtgctggaaatatggaaggcctgcttcgtaggcctgatagagtcacccgaggggactgaggaactcaagtggaccgcattcaccttcttgaaaatcccacaagtactagtgaagttaaaaaaatattcacacggggataaagactttacagaggatgtgaactgcgcttttgagtttttgctgaaattgacacctctgctcgacaaagccgaccagcgttgcaattgcgattgcaccaatttccttctgcaggaatgtgggaagcagggactcctatcagaagccagtgttaataacttgatggccaaacgcaaagccgatcgtgagcacgcaccccagcagaaatctggagagaacgccaatatacagccgaacatccagctcattctaagggcagaaccaacagtgactaacatcctgaaaaccatggacgcggaccactccaagagtcccgagggcctattgggcgttctgggtcacatgttgtctggcaagtccttggacctcctgctggctgccgctgcggctactggtaaacttaaatcattcgccagaaaatttattaacctgaatgagttcacaacctacggtagcgaggagtcaactaaacctgcaagcgttcgagctctgctttttgatatttcatttctgatgctgtgccacgtggcccagacctatggatcggaggtgattctgagcgaaagccggacaggcgccgaggtgccgttctttgaaacctggatgcagacatgtatgcccgaggagggaaagattctgaaccccgaccatccatgctttaggccagactcaaccaaggtggagagtctggttgccctgcttaataattccagcgaaatgaagttggtccagatgaagtggcacgaagcctgtctgagcatcagcgccgctatactagaaattctcaatgcttgggagaacggcgtactggcatttgagtctatccaaaaaattacagacaatatcaagggcaaggtgtgttcactggcagtctgcgccgtggcctggctagtcgctcatgtcagaatgctgggattagatgaacgagaaaagagtttgcagatgatccgccagttggcgggaccacttttcagcgagaacaccctgcagttttacaatgagcgcgtagtgatcatgaacagtattctcgaacggatgtgcgccgacgtgctgcagcaaacagccacacagatcaagttcccctcaaccggcgtcgacaccatgccatattggaacctacttccacccaaacggcccataaaagaggttttgactgatatcttcgccaaagtgctggagaaagggtgggtggactcccggagcattcacatcttcgacactctgctgcacatgggcggggtctattggttctgcaacaatctgatcaaagagctgctcaaggaaactagaaaagagcatacactcagagccgtggaactactgtatagcatcttctgcctggacatgcagcaagtcacactggtgctgcttggacatatcctgcccggactccttacggactcctccaagtggcattccctcatggaccctccaggaactgctctggcaaagctggcagtgtggtgtgctttgtcatcatattcgtcgcataaggggcaagcctctacccggcagaaaaagaggcatagggaggatatcgaggactacatttctctgtttccactggatgatgtccagccatcaaagttaatgcgcttgctatcgagcaatgaggatgacgccaatatactttcttcccccacggacagaagcatgagttcaagcctatccgctagccaattgcatacagtgaacatgcgagacccactcaacagagtgctggctaacctgtttctgctaatttcctcaattctggggtcgaggacagccgggcctcacacccagtttgttcagtggtttatggaggagtgtgtggactgtctcgagcagggcggcagagggtcagtgctgcagtttatgcccttcacgacggtgtctgagcttgtcaaggtgagcgccatgagttcacctaaagtggtgctggccattactgacctttctctgccacttggacgacaagtcgccgccaaagcaatcgctgccctgtag

SEQ ID NO: 194444 - DNA, 2931 bp, synthetic construct
  misc_feature 1..2931: note = Description of Artificial Sequence: Synthetic coding sequence
  source 1..2931: mol_type = other DNA
atgaaggtggtgaacctgaagcaggccatcctgcaggcctggaaggagagatggagtgactaccagtgggctattaacatgaaaaaattctttcccaaaggcgccacttgggacatcctgaacctcgctgacgccctacttgagcaagccatgatcggcccttcaccaaatcctctcatactaagctatttaaagtatgccatttcctctcagttcgacgatttcagccgggatctgtgcgtacaagccctgcttgacatcatggacatgttctgcgacaggctcagttgccatggaaaagcggaggagtgcatcggattgtgcagggctctgctcagcgccctacactggctcttgcgctgcaccgccgcatccgccgaaagactccgagagggactggaggctggcacccccgccgccggagagaagcagctggccatgtgtctgcagagattggaaaagactctgagttcgaccaaaaaccgtgctcttctccacatcgcaaaactggaagaggcgtcttcctggactgctattgagcatagcctcctgaaacttggggagatacttgctaatctgtccaatccgcagctccgttcacaggccgagcagtgtggaacattaattaggtcaatccccactatgctcagcgtgcacgcggaacagatgcacaaaacaggattccctaccgtccatgctgtgatcctgctggagggaacaatgaacctgacaggcgagacccaaagcttagttgagcagctgaccatggttaaacgcatgcaacatattcctacccccttattcgtactggaaatctggaaggcctgctttgtggggctcatcgagagtcccgagggaaccgaggagttgaagtggactgcctttacgttcctgaaaattcctcaggtcttggttaaactcaagaagtattctcatggggataaagattttactgaagatgtaaattgtgcattcgaatttctactgaagctgactccactcctggataaggctgatcagagatgcaattgcgactgtacaaatttcctattgcaagaatgtggcaagcaaggcctgttgtctgaggcatcagtaaacaatcttatggccaagaggaaggccgatagagaacacgccccccagcagaagtctggagaaaacgccaatatccagcccaacattcagctcatactgagagccgaacccacagtgacgaacatcctgaagacgatggacgccgatcacagtaagtctcccgaaggacttctgggggtgctcggacacatgcttagtggcaaatccttagatctgttactcgccgcagctgctgcaaccggcaaactaaagagtttcgccagaaagtttatcaatctgaatgaatttacgacatacggaagtgaggaatcaaccaagcccgcaagtgtccgcgccctcctctttgatatcagcttcctaatgctgtgccatgttgcccagacttatggaagtgaagtcatcctgagcgagagcaggacgggcgcagaggtgcccttcttcgagacttggatgcaaacatgtatgcccgaagaagggaagattttgaatccagaccatccgtgcttccgaccagatagcaccaaagtggagtccctggtggctcttcttaacaattcgagcgagatgaagctggtgcagatgaaatggcatgaggcctgcctctcaattagcgcagccattctggaaatactcaatgcttgggaaaatggcgtgctggcctttgagtcaattcaaaagattactgataacatcaaagggaaggtttgctcactggccgtatgcgctgtagcctggctggtggcccacgttagaatgcttggtctggacgaaagagagaagtcccttcagatgataaggcagcttgcaggtcccttgttctccgaaaatacactccagttctacaatgaaagagtggttattatgaatagcatccttgagaggatgtgcgcggacgttctgcaacagacagccacacagatcaaatttccctccaccggggtcgacaccatgccttattggaatctgctcccccctaaaagaccgatcaaagaggtgctcaccgatatctttgccaaggttctagagaagggctgggtggatagccgcagcatccacatctttgataccctattacatatggggggagtctactggttctgtaataacctcatcaaggagctcctcaaggaaaccagaaaggaacacactcttagagctgtggaacttctctactctattttttgcctcgacatgcagcaggtgactctcgtgctgctgggccatatcttacccggcctgctgactgactctagtaagtggcatagtctcatggacccgccaggaactgcgttagccaagctagccgtttggtgcgcgctgtctagctacagctctcacaagggacaggcttcaacaagacagaagaaacggcacagggaagatatagaagattatatctcactttttccccttgacgatgtgcagcccagcaagctgatgaggttactctctagcaatgaagatgacgccaatattctctcttcccccacggaccgatccatgtcctcatctttgtccgcaagccagctgcatactgttaacatgagggatcctcttaaccgggtattagccaatctgttcctgctaatttcttctattctcggctctcgtaccgccgggccgcacacccagtttgtgcagtggtttatggaagagtgtgtagactgtctcgaacagggtggccgcggatctgtcctgcagttcatgccgtttaccacagttagcgagctcgttaaagtgtcagccatgtcatccccaaaggtagtcctagctattacagatctctctcttcctctcggaagacaggtcgcggcgaaagccattgcagcgctttag

SEQ ID NO: 194445 - DNA, 2970 bp, synthetic construct
  misc_feature 1..2970: note = Description of Artificial Sequence: Synthetic coding sequence
  source 1..2970: mol_type = other DNA
atgaaggtggtgaacctgaagcaggccatcctgcaggcctggaaggaacgatggagtgactaccaatgggctattaacatgaagaaattctttcccaagggcgcgacctgggacattttgaatctggccgatgcccttctcgaacaggccatgataggaccttcgcctaacccgttgatactttcctacttgaagtacgctatctcatcacagatggtaagttattcttcggtgctgacagccatctctaagtttgatgatttctctcgagacctctgcgtgcaggctctgctcgacattatggatatgttttgcgatcgtctgagttgccatggtaaggccgaagagtgcattggtctttgccgcgccctcttgtctgccttgcactggttgcttagatgtacggcagcttccgctgagcggcttagagagggccttgaggctggaacgccagccgccggcgagaagcagctggctatgtgtctgcagcggctggaaaagaccttgagttccacgaagaatagagcccttctccacattgcaaaactggaggaagcgagtagctggactgcaatcgagcattccctgttaaagctcggcgaaattctcgcgaatctgtccaaccctcagcttagatcccaggccgagcaatgcggcaccttaatccgcagcatccccacgatgctgagcgtacatgccgaacaaatgcacaagacaggctttccaaccgtccatgctgttatcttgcttgagggcacaatgaacctgacaggcgagacccaaagcttggtggagcagctgactatggtgaaaaggatgcaacacattcctacccctctcttcgtgcttgagatctggaaagcatgcttcgtgggtcttattgagtcaccggaaggtacggaagaacttaagtggacagccttcacttttcttaagatcccacaggtgctggtgaagctgaaaaagtacagtcatggggataaagattttaccgaggacgtgaattgcgctttcgaattcttactaaagcttacgcctctcctggacaaggcggatcagaggtgcaattgtgattgtactaatttcctgctgcaggagtgcggaaagcaagggctccttagtgaggcgtccgtgaacaatttaatggcaaaaagaaaggcagatcgggagcatgctcctcagcaaaaatcaggagagaatgcaaatattcaacctaacatccagctgattcttcgcgccgagccaacagtgacaaatattctgaaaacgatggatgcagatcactcaaaaagcccggagggtcttctgggagtcttgggccacatgctgagcggaaagagtttggacctcctgttagccgctgccgctgccactggcaagctgaaaagcttcgcccggaaatttatcaacctaaacgaattcaccacatacggtagtgaggaaagtacaaaacccgcgagtgtacgcgccctgctgtttgacatctcttttttgatgctttgccacgtagctcagacatatggatcagaggtgatcctttccgagtcccggacgggcgccgaggtgccatttttcgagacttggatgcagacctgtatgccagaggaaggtaaaatattgaatcccgaccacccctgcttccggcctgattcgaccaaggtggagtcactggtggccctgcttaacaactcatctgaaatgaaactggtgcagatgaagtggcacgaggcttgtctctccataagtgcagctatcctggaaatcctcaatgcatgggagaacggcgttctggcatttgaaagcatacagaaaataaccgataatatcaagggcaaggtgtgtagtctggccgtttgcgcggtagcatggcttgtggctcacgtacgtatgctgggactggacgaaagggagaaaagtttacagatgattaggcagctggctggcccactttttagtgaaaacacactccagttttacaatgagcgtgtcgtcatcatgaactctattcttgaacggatgtgcgctgatgtgttgcaacagacggcaactcagataaagttcccgtccacaggcgtggacacgatgccgtactggaacctgcttcccccgaaacggcctattaaagaggtgttaaccgacatctttgccaaagtgctggagaaggggtgggttgactcccggagcatccacatctttgacacacttcttcatatggggggcgtgtattggttttgtaataacttgatcaaggaactactgaaggaaacgaggaaggagcatactctgagagccgttgagctgctgtatagcatcttttgtctggatatgcagcaagtaacgctggtactcctgggacacatactgcctggattattgactgatagctctaaatggcattctcttatggacccaccggggacagcactagcgaaactagccgtatggtgtgccctctcaagttactcttctcacaagggacaagcctctactagacagaagaaacgccacagggaggatattgaagactacatttcgctgtttcccttggacgatgtgcagcctagcaagcttatgaggctcctgtccagtaacgaggacgacgcgaatattctgagttcgcctacggatagaagtatgtcttcttcactcagcgcatcacagctccacaccgtaaatatgagagaccctctgaatcgcgtactcgccaacctgttcctgctcatttcatctatcctgggttccagaactgcagggccccatactcaatttgtgcaatggtttatggaggagtgcgtggattgcttggaacaaggcggacgcggctccgttctccagtttatgccttttactacggtgtcggagctcgtcaaggtctcggctatgtcttcacccaaggttgtgctagccataaccgacctgtcgctgccccttggcagacaggtagccgcaaaggcaattgccgccctatag

SEQ ID NO: 194446 - DNA, 864 bp, synthetic construct
  misc_feature 1..864: note = Description of Artificial Sequence: Synthetic coding sequence
  source 1..864: mol_type = other DNA
tgaaacctgatcaaggagctgctgaaggagacccggaaggagcacacgctgcgcgcagtcgaacttctttactcgatcttctgtctggacatgcagcaggtcactctagtgctccttggtcatatcttgcctgggcttctcacagatagctccaagtggcactcgttaatggatcctccaggcacagcactggccaaattggctgtctggtgcgccctctcttcctacagctcacataagggacaggcttcaaccaggcaaaagaaacggcatcgagaggacatcgaagattacatcagcttgttcccattggacgatgtgcaaccctccaagctgatgaggctgctctcttcaaacgaagatgatgcaaatatcctgagttctccacgaagtagcctcggttccccatgcacttcatatctccgctgggtcaaggtgggactgggtcaccctagaggtgcaccgttacttcattctgccgggtgttttccagctcttcaccttctgcgccctacagcggaccggagtatgagctccagcctctctgcttctcagcttcacacggttaatatgcgtgaccccttgaatcgagtcctggctaaccttttcttgctgattagttccattctaggatctagaacagccggtccacatacgcagtttgtgcaatggtttatggaggaatgcgtcgattgtttggagcaaggtggccgaggctcagttcttcaatttatgccgttcacaaccgtctcagagctggtgaaggttagcgccatgtctagccccaaagttgttctagcaattacagacctcagcttaccactgggtaggcaggtggcggcaaaggccatagcagctctgtag

SEQ ID NO: 194447 - DNA, 906 bp, synthetic construct
  misc_feature 1..906: note = Description of Artificial Sequence: Synthetic coding sequence
  source 1..906: mol_type = other DNA
atgaaggtggtgaacctgaagcaggccatcctgcaggcctggaaggaacggtggagcgactatcagtgggcaataaatatgaaaaagttttttcccaaaggcgcgacttgggacatccttaacttagctgacgcactgctggaacaggcaatgatcgggccttctccaaatcctctgatacttagctaccttaaatatgccattagtagccagatggttagttacagcagtgtgcttaccgccatatctaaattcgatgacttttcacgcgatttatgcgttcaggcactccttgacatcatggacatgttctgcgacagactgagttgtcacgggaaagctgaagaatgtatcggcctgtgcagagccctgcttagtgccctgcactggctgctgcgttgcactgccgccagcgctgaaagactgcgggaagggcttgaggccggtaccccagcagcaggcgagaagcagttggccatgtgtctgcaacggcttgagaagacccttagcagcacgaagaacagagcgctgctccatattgccaagttagaggaggcaagcctacatacatctcagggacttggccagggcggtacccgcgccaatcagcccactgcctcctggacagccatagaacattcgctcctgaagttgggtgagatcctggcgaatctcagcaacccccaactgcgctcccaggcagagcaatgcggaaccctgatacgaagcatccccaccatgcttagtgtgcacgccgaacagatgcacaaaacagggttcccaaccgtgcatgctgtgattctgctggaagggaccatgaatcttactggggaaacgcagagtttggtagaacagctaactatggtaaagcgcatgcagcacatcccgacccctttgtttgtctag

SEQ ID NO: 194448 - DNA, 2700 bp, synthetic construct
  misc_feature 1..2700: note = Description of Artificial Sequence: Synthetic coding sequence
  source 1..2700: mol_type = other DNA
atgcccctggtgccccggtggtgccccaccctgctgagcagccagccctctgtgtcatgccatggcaaggctgaggaatgtattgggttatgtagggctctcctaagtgctctccactggctcctgagatgtaccgccgcctctgctgagagactgagggagggtctggaggccggtacaccagccgcgggcgagaagcagctggcaatgtgcttgcagcgtctagaaaaaaccctttccagtactaagaacagggcacttctgcatattgcaaagctggaggaggcctcgagctggacggccattgagcacagtctcttgaaactcggcgaaattctggctaatctctccaacccccagctgcgatcgcaggcagagcagtgcggcactctgattagatcaatcccgacgatgctcagcgttcatgctgaacaaatgcacaagacgggcttccccaccgttcatgccgttatcctgttagagggcacaatgaatttgacaggagagacccagtccctggttgagcagctgactatggttaagaggatgcaacatatccccactccccttttcgttctggaaatctggaaggcctgtttcgtagggctgatcgagagcccagaaggcaccgaggagctcaagtggacagctttcacgttccttaagatcccccaagtcctggtgaaactcaagaagtactcccatggagacaaggattttactgaggatgttaactgcgctttcgaattccttctcaagttgactcctttgctggataaagccgaccagaggtgcaactgtgattgcaccaacttcttactgcaggagtgtggaaaacaaggtttacttagtgaggcttccgttaacaacttgatggccaaacgaaaggcagatagagagcacgctccacagcagaaaagcggcgaaaatgcgaatatccagcccaacattcaactgattcttcgggccgagcctactgtgaccaatatactgaagaccatggacgccgaccactcaaaatccccagaggggctgcttggcgtgctgggacatatgctttccggcaaatcactagacctattactggctgccgccgccgctaccggtaagctgaagtcctttgcccggaagttcatcaaccttaacgagttcacaacgtatggcagcgaagagtctactaagccagcaagtgttcgagccctgttatttgacatctccttcctgatgctgtgtcacgttgcccagacatacggatcagaagtcatactgtccgagtccagaacgggagccgaagtgccgtttttcgagacttggatgcaaacatgcatgccggaggagggtaagatcctgaatcccgaccatccatgtttccggcctgatagcaccaaggtggaatctctggtcgccctgctaaacaattccagtgagatgaaattggtgcagatgaagtggcacgaggcttgtctgagcatctcagccgccatcctggagattctgaacgcctgggagaatggcgttctcgcatttgagtccatccagaaaatcaccgataatatcaagggaaaggtctgtagtctggctgtatgtgcagtcgcctggttagtggcgcatgtgcggatgcttggactcgatgaacgtgagaagtccctgcagatgatcagacagctggctgggccgttattcagcgaaaataccctgcagttttataacgaacgtgttgtcataatgaactccattctggaacgcatgtgtgccgatgtgcttcagcagactgcaacccagattaagttcccttctacaggcgttgacaccatgccgtactggaatttactcccccccaagagaccaatcaaggaagtgctgacagacatatttgccaaagtgctggaaaaaggatgggtggacagcaggagcatccatatcttcgacacgcttttacacatggggggggtgtattggttttgtaataacctaatcaaagaacttctgaaagaaacaagaaaggaacacacactcagggccgtggagcttctgtattcaattttctgtctagacatgcagcaggtcacactggttcttctggggcatatcctccctggcctgttgactgattcctcaaagtggcactcactaatggacccgcctgggacagccctcgccaaattggccgtctggtgtgccctgtcatcatacagcagccacaaagggcaggcctctactaggcagaagaaaagacatcgcgaggatattgaggactatatctctttattccccctggacgatgtgcagccgtccaagctcatgaggctcttgagcagcaatgaagacgatgctaacatactgagctctcctactgacaggagtatgtcatcctcactctcagcgtctcagctgcatactgttaacatgcgcgatcccctcaacagagtgctcgccaatctgttcctgttaattagttctatactcggcagcagaacagcgggtccccacacacagttcgttcaatggttcatggaggaatgtgtggattgccttgaacagggcgggcgcggatccgtgctgcagttcatgccgttcacgactgtgagcgagctggttaaggtgtcagcaatgtcctcgcccaaagtggtgctggccatcaccgatctctccctgccacttggacggcaggtcgccgccaaagccatcgctgctctgtag

SEQ ID NO: 194449 - DNA, 756 bp, synthetic construct
  misc_feature 1..756: note = Description of Artificial Sequence: Synthetic coding sequence
  source 1..756: mol_type = other DNA
atgaagaagttcttccccaagggcgccacctgggacatcctgaacctggcggacgctttgttggagcaggcgatgattggcccgagtccgaatccattgatcctgtcatacctgaagtacgcaattagcagtcagatggtgtcctacagttccgttctcaccgccatcatggaaattctgaatgcatgggagaacggcgtgctggcatttgaaagtatacagaaaattaccgataatattaaaggcaaagtgtgcagtcttgccgtctgcgctgtagcctggctcgtagcacacgtgagaatgttagggctcgacgagagggagaaatcccttcaaatgattcgacagcttgctggtcccctcttttctgaaaatactttacaattctataatgaaagagtagtgattatgaatagcatcctggaaaggatgtgcgccgacgttctacaacagaccgccacacagatcaagttccccagtacgggcgtcgacactatgccatactggaatctgctgcctcccaagcggcctatcaaagaggtacttacagatatctttgctaaagtgctggagaagggttgggttgactccagatcaattcacattttcgacactcttctgcacatgggcggcgtgtactggttctgtaacaatctcatcaaggaactgctcaaagaaaccaggaaggagcacaccctgcgggcggttgagttgctgtattcaatcttctgtctcgacatgcaacaggtgacctag

SEQ ID NO: 194450 - DNA, 2466 bp, synthetic construct
  misc_feature 1..2466: note = Description of Artificial Sequence: Synthetic coding sequence
  source 1..2466: mol_type = other DNA
atgatcggccccagccccaaccccctgatcctgagctacctgaagtacgcaatctcctcccagatggtctcttatagttcagttcttacagcaatcagtaaatttgatgacttttccagagatctgtgcgtgcaggccctactggatatcatggatatgttctgcgatcgtctctcgtgccatggcaaagcggaggaatgtattgggctatgccgcgcattgctcagtgcccttcactggctgctgaggtgcactgccgcgagcgcagaaaggctgagggaggggctggaggcaggaacccctgctgcaggggagaagcagctggctatgtgcttgcaaagactggagaagacactttctagtacaaaaaaccgggcacttcttcatattgccaaactagaggaggcttccagctggactgccatcgagcactcactgcttaaactcggggaaatactggctaacctctctaacccccaactgcgctcccaagctgagcagtgtggaacattaatccggagtatccccaccatgctatctgttcacgcagaacagatgcataaaactggttttccgactgtccacgctgtcattctgttggaagggaccatgaatctgaccggagagacccaaagcttagtggaacagctgaccatggttaagcgaatgcagcatatcccaactcccctgttcgttttggagatctggaaagcttgcttcgtgggtcttatcgagtcacctgaggggaccgaagaattaaagtggactgcatttactttcctgaagatacctcaggtcctcgtcaaactgaaaaaatattcacacggtgataaggactttacagaggacgtgaattgcgcctttgagtttctgctgaagcttacacctctgctggataaagcagatcagaggtgtaactgtgattgtactaacttccttcttcaggagtgtggtaagcaaggtcttctctccgaggcttccgttaacaacctcatggccaagcgtaaggccgaccgagagcatgccccacaacaaaagtccggcgaaaatgctaacatccagcccaacattcagttaatcttgcgcgccgagcctaccgtgacaaacatcctcaagacgatggacgcagatcactctaaaagtcccgagggactgttgggagtgttagggcacatgctgagtggcaaatctctcgacctcctcctggcagccgctgccgcgacaggtaagcttaagagtttcgccaggaagttcatcaacttaaatgaatttactacctacggctccgaagagtcgactaagccagcctcagtccgagccctactgttcgacatcagtttcctgatgctgtgccatgtggcgcagacatatggaagcgaagtgattctcagcgagagcaggacgggggccgaggtacccttctttgagacctggatgcagacttgtatgcctgaagaggggaagatactaaatcccgaccatccctgtttccgtcccgactcaactaaggtagagtcattggtcgccctgttgaataattcttctgagatgaagctggtgcagatgaagtggcacgaggcctgcttatcaatctctgctgccatccttgaaattctgaatgcctgggaaaacggggtgctggccttcgagtctatccaaaaaattacagacaacatcaagggcaaggtgtgtagcctggccgtatgtgcggttgcgtggcttgtggcccacgtcaggatgctcggccttgacgagcgagagaagagcctgcagatgatcagacagctcgcaggacccttgttttccgaaaatacccttcaattctacaacgagagagtggtaattatgaatagtattctggaaagaatgtgtgccgatgtgctgcagcagactgcgactcaaatcaaattccccagcacgggagtcgatacgatgccctattggaatcttctgccacctaagaggccaatcaaggaagtgctcactgatattttcgcaaaggtgctggagaaaggatgggtggatagtcggtcgatccatatttttgacaccctccttcacatggggggcgtatactggttttgtaacaacctcatcaaggagttgctgaaggagacccggaaggaacatacccttcgggctgtagaactgctttacagcattttctgcctggacatgcaacaggtgactctggttttgctgggccatatactgccgggtctgctgacagattctagcaaatggcactcgctgatggacccccctggtacggctctggccaaactagccgtgtggtgcgccctttcatcttacagctcacataaggggcaggcttctacaagacagaaaaaaaggcacagagaggacatcgaggactatattagtccaaaagtcgtgctcgctataactgacctatccctgcctctgggaaggcaggtggccgccaaagctatcgctgctttgtag

SEQ ID NO: 194451 - DNA, 1026 bp, synthetic construct
  misc_feature 1..1026: note = Description of Artificial Sequence: Synthetic coding sequence
  source 1..1026: mol_type = other DNA
atgaagaagttcttccccaagggcgccacctgggacatcctgaacctggccgatgctctgctggagcaggccatgatcggccctagtcccaaccccctgatccttagttacttgaagtacgcaatcagttcgcagatggtgagctactcatctgtgttgacagccatcagcaagttcgacgacttttctagagacttatgtgtccaggccctcttagatatcatggatatgttttgcgatcgactgagctgccacggtaaggctgaggagtgtataggattgtgccgagctcttctaagtgcactgcactggcttctacggtgtacggcggcctctgcagagaggctgcgggagggactagaagccggtacccctgccgcaggagagaagcaacttgcaatgtgcctacagagactcgaaaagactctcagctccaccaaaaatagggccctgttacacatcgctaaactcgaggaggcttcttcttggacagctattgagcattccctgctgaaattgggggaaatcctagctaatctcagcaatccacagctgaggagccaggccgagcaatgcgggacacttatccgatctatccctacgatgttaagcgtccatgccgagcagatgcacaagactggcttcccgacagtccatgcagtcatccttctcgagggtacaatgaacctcactggtgaaacccaatccctggttgagcaacagactgcgacacagatcaagttccctagcaccggcgtcgatacaatgccttattggaaccttctgccacccaaacggcccattaaagaggttctgaccgacattttcgcgaaagtcttagaaaaaggctgggtcgattctcggagtattcatattttcgacaccctgctgcatatgggcggtgtttattggttttgcaacaatctgatcaaagagctgctcaaagagacccggaaggaacacaccctgagggctgtcgaactcctttattccattttctgtttagacatgcaacaggttacatag

SEQ ID NO: 194452 - DNA, 2796 bp, synthetic construct
  misc_feature 1..2796: note = Description of Artificial Sequence: Synthetic coding sequence
  source 1..2796: mol_type = other DNA
atgaaggtggtgaacctgaagcaggccatcctgcaggcctggaaggagcgctggtcagattatcagtgggcaataaacatgaagaagttcttccctaaaggcgctacatgggatatcctcaacctagctgacgccttgctagagcaggcaatgataggtccctcacccaacccactgatcctatcttatttgaagtacgccatcagctcgcagatggtatcctacagctctgtgctcactgcaataatgtgtttgcaacggttagaaaagaccttatctagtaccaagaacagagcactgttgcacatagccaagttagaggaggcttccctgcacacgtctcaggggctcggacagggtggcacgcgggcaaatcaaccgaccgcctcctggactgccatagaacacagccttctgaagcttggtgagattctagcaaatctgagtaacccacaactgcgctcccaggcagagcagtgcgggaccctgatccggtcaattccaaccatgctaagcgttcatgccgaacagatgcacaaaaccggcttcccaactgtccatgccgtgatactcttggaaggcactatgaatctcacaggcgagacccagtctctggtggagcagcttaccatggttaaacgcatgcaacacatacctactcctctgtttgttcttgaaatatggaaagcatgctttgtgggcctcatcgaatcgcccgaggggaccgaggagctgaagtggacagcttttactttcctcaagatcccgcaggtgctcgtcaagttgaagaagtactcgcacggggacaaagactttacagaggacgtcaactgcgccttcgaattcctgctgaagctgacaccattactggacaaggcggaccagaggtgtaattgcgattgcaccaatttcctgcttcaggaatgcggcaaacagggattgctgagtgaggctagcgtgaataacctgatggcgaagcggaaagcggacagggaacatgcaccacagcagaaatcaggggagaatgccaacattcaaccgaatattcagttaattcttagggctgagcccacagtaaccaatatcctgaagaccatggacgctgatcactctaaaagtccagagggtctcctgggcgtcctgggacatatgctctccggtaagtcattggaccttctgcttgcagctgcggcagcaacaggcaaacttaagtctttcgcccgcaagtttatcaacctgaatgaattcaccacatatggctctgaagaatctactaaaccagctagcgtgagggcactcctcttcgatatcagcttcctgatgctctgccatgttgcccagacctacgggtcggaagtgattctttcagaaagccgcacaggtgccgaggtccccttcttcgagacctggatgcagacctgcatgcccgaagagggaaaaatcctgaaccccgatcatccctgcttccggcccgacagtacgaaagtcgagtctctggtagcacttcttaataattcctcagagatgaaactggtccagatgaaatggcacgaagcttgtttgtccataagcgcggccatactggagatactcaatgcctgggagaatggtgttctggcatttgagtctattcaaaaaattacagataacattaaaggaaaagtctgttcactggcagtctgcgcagtcgcatggctcgtggcccatgtccgtatgctgggactggacgagcgcgaaaagagccttcaaatgattagacagctggcagggcccctattttctgagaatacactgcagttttataatgagcgggtggtcatcatgaactccatcctggagcgcatgtgcgccgacgtgttgcagcaaacagcaactcagattaaatttcccagcactggagtagataccatgccttattggaacttactgcctccaaagaggcctatcaaagaagtgctcactgacatttttgctaaagtgctggagaaaggctgggtcgattcccggagcatacatatttttgacaccctcctacacatgggtggagtctattggttctgcaataatctcattaaagagctcctgaaggagacaaggaaagagcatactctgcgagcagtcgagctgctgtacagcatattttgccttgacatgcaacaggtgaccctggtgctcctgggccacatcctgcctggattattaactgacagtagcaagtggcatagtcttatggacccacccgggaccgcactggctaagctggctgtctggtgcgctctgtcttcgtattcatcccacaagggccaggcgtccactcgtcaaaagaagcggcacagagaggacatagaggactacatctcccttttccccctcgatgatgtccaaccaagtaagctgatgaggctgctgtcctccaacgaagacgatgctaatattctgagtagccccactgacagaagtatgtcaagttcactgtccgcatctcagctgcacactgttaatatgagggatccattgaacagggtcctggctaatttgttcctgcttatttcatcaatactcggatctaggaccgccggccctcacactcagttcgtacagtggtttatggaggaatgcgtggactgtctggaacaaggggggaggggatccgtgcttcagttcatgccattcactactgtgtctgaactggtgaaggtctcggccatgagcagtcccaaagttgtgctggcgattacagacctgagtttaccactggggaggcaggtagctgctaaggcgattgccgcactctag

SEQ ID NO: 194453 - DNA, 444 bp, synthetic construct
  misc_feature 1..444: note = Description of Artificial Sequence: Synthetic coding sequence
  source 1..444: mol_type = other DNA
atgaagaagttcttccccaagggcgccacctgggacatcctgaacttggctgatgctctgttagaacaggcaatgattgggccctcgcccaatccactcattctctcgtatcttaagtatgcaatttcgtcccagatggtcagttatagtagcgtcctcacagctatttcaaagttcgatgacttctcgcgggacctgtgtgtccaggccctcctggatatcatggacatgttttgcgacaggttgagctgtcatggaaaggccgaggagtgtatcgggctgtgtcgcgcattgctgtcagcactgcactttatgccctttactaccgtgtccgagctggtcaaggttagcgcaatgtcttctcccaaagtggttcttgccatcacggacctgagcctccccctcggaaggcaggttgccgctaaagccattgctgcgctgtag

SEQ ID NO: 194454 - DNA, 921 bp, synthetic construct
  misc_feature 1..921: note = Description of Artificial Sequence: Synthetic coding sequence
  source 1..921: mol_type = other DNA
atgaagaagttcttccccaagggcgccacctgggacatcctgaacctggccgacgcactgctcgagcaggctatgataggaccaagtccaaaccccctgatcctcagttatctgaagtatgcaatttcaagccagatggttagctacagctccgtcctgactgcgattagcaagtttgacgatttcagccgagacctgtgtgtgcaagcactgctcgacatcatggacatgttctgtgataggttgtcctgccatgggaaagctgaggaatgtataggcctttgtcgggcgctgctcagcgccctccattggcttctccgctgtactgctgcatccgccgagaggctgagggaaggattggaagcagggacccccgctgcaggcgaaaagcagctcgcaatgtgtctgcaacgcctcgagaaaacattgtcatctactaagaacagggccctcctgcacattgccaagctggaagaagcaagctcatggactgctatcgaacactccttacttaaattaggcgaaattctcgcaaacctgtccaatccacaactccgctcccaggccgagcagtgcggtaccctgatacgctctataccaactatgcttagcgttcacgcggagcagatgcacaagacggggtttcccaccgtgcacgccgttatcttgctggaaggcacaatgaacttgaccggcgagacccagtccctggtcgaacaactgacaatggtgaaacgtatgcagcacatcccgacccctctgttcggaagaggatctgtcctgcaattcatgcctttcacaacggtgagcgagctcgtcaaggtgtccgcgatgtcctcccccaaagtagtgttggcaattacggatcttagtcttccactaggaagacaagtggccgctaaggctattgccgccctgtag

SEQ ID NO: 194455 - DNA, 2244 bp, synthetic construct
  misc_feature 1..2244: note = Description of Artificial Sequence: Synthetic coding sequence
  source 1..2244: mol_type = other DNA
atggtgcccggcagcgagggccccgcccgggccggcagcgtggtggcagatgtagttttcgtgattgaggggactgccaatctgggtccttactttgagggtctgcgtaaacactatctgctgcctgccatagagtatttcaatgggggacctccagccgagacagactttggtggcgattacgggggaacgcagtattccctggtggtgttcaacacagtagactgcgcccccgaatcgtacgtccagtgtcatgccccaacatcttcagcctatgaattcgtgacctggctggacggtattaaattcatgggcggcggaggcgaatcatgctcgttgatagccgagggccttagcacagcactccaattgttcgacgacttcaagaaaatgcgcgaacaaattgggcaaacccatagagtgtgcctactgatctgcaacagccccccctatctgcttcccgcggtcgagtctaccacttattcgggctgcaccacagagaacctggtgcagcagattggtgagcgaggaattcacttttcgattgtgtcaccacgaaagctgcctgcgcttcgcctccttttcgaaaaggccgcaccccctgcgctcttggaacccttgcagccacccaccgacgtgtcccaggatcctaggcatatggtcctcgtccgagggcttgtcctgcctgtggggggcggcagcgcccccggcccacttcagtccaagcagccggtgccactacctccagccgccccctccggagccaccttgtctgccgctccgcaacagccactgccaccggtccccccgcagtatcaggtccctggtaatcttagtgcagcccaggttgccgcgcagaacgccgtggaggccgctaagaatcagaaagccggtcttggaccgagattcagtcccataaccccgcttcagcaggcagcacccggtgtggggccccctttttctcaagcccctgcgccacagctgccacccggaccaccgggagccccaaaaccccctcccgccagccagccatcgctggtgagtaccgtggcccccggtagcggccttgctcctaccgcccagccaggggcgccgtccatggccggaactgttgcccccgggggcgtgagcggtccatcacccgcgcagctaggtgcacccgcactgggtggtcaacagtcagtgtcaaataagctgctggcttggtcaggggtcctcgagtggcaagaaaagccaaaacctgccagcgtggatgccaacactaagttgactcggagcttaccttgtcaggtgtacgtgaaccatggtgagaacctgaagaccgaacaatggccgcagaagcttattatgcagctgattccccaacagctgctcacaacgctcgggcctctgttcaggaattcaaggatggtgcagtttcactttaccaataaagaccttgaatctctgaagggactctacagaattatggggaatggctttgcgggttgtgtgcactttccacataccgccccatgcgaggtcagggtactgatgctcttgtattccagcaagaagaaaatctttatgggactgattccgtacgatcagtccggttttgtgaacggcattaggcaggtaatcactaatcacaagcaagttcagcagcaaaagctggagcaacaacagaggggaatgggcggccagcaggctcctcctggcctcggccccattttagaagaccaggccagaccaagtcagaacctcctccaactgaggcccccccagcctcagccacaaggaacagttggcgccagcggagccaccggacagccacaaccccaggggactgcacagcccccccctggcgccccccagggccctccaggagccgcaagcgggccacctcccccgggtccaatcctaagacctcagaatcctggggcaaacccgcagctcaggtcgctgctgttgaatccacctcccccacagacaggtgtcccccccccacaggcatcactgcaccacctgcagcccccaggagcccctgccttgttgcccccccctcaccagggtctgggccagcctcaactgggccctccgctgctgcacccaccccccgcccagtcctggcctgcccagcttccaccgagggcacccctgccagggcagatgctgttaagcggtggcccccgcgggcccgtcccacagccgggcctgcagccaagtgttatggaagatgacattttgatggatttgatctag

SEQ ID NO: 194456 - DNA, 2268 bp, synthetic construct
  misc_feature 1..2268: note = Description of Artificial Sequence: Synthetic coding sequence
  source 1..2268: mol_type = other DNA
atggtgcccggcagcgagggccccgcccgggccggcagcgtggtggctgacgtcgtgtttgtgatcgaaggtacagctaatcttggcccatacttcgagggcctacggaagcactatctactcccagctattgagtactttaacggaggaccccctgcagagactgattttggcggtgattatggaggcacgcagtattcacttgtcgtttttaacactgtggactgtgcgcccgaatcttacgtacaatgtcacgctcccacatccagtgcatatgagtttgtaacctggctcgacggcatcaaatttatgggcggcggcggcgagagctgctccctcatcgccgagggcctcagtaccgcactgcagttatttgacgattttaaaaaaatgagggagcagatcgggcaaacacaccgggtgtgcctgctcatctgtaactctccaccctatctcttgccggcggtcgaatccaccacctactccggttgcaccaccgagaatctggtacagcaaataggggagcgggggatccacttttcaatcgtgtccccaagaaagttgcccgctttgcgcctattatttgaaaaggcggccccccccgcactcttggaacccttacaaccacccacggacgtgtcacaagaccctcgacacatggttctggtccgcggactcgtgctgccggtgggcggcggcagcgccccagggccgctgcagagcaaacaacccgtccccctgccacctgccgctccctccggagcaacactaagtgctgctcctcaacagcctttaccacctgtcccacctcagtaccaggtaccaggaaatctctctgctgcccaggtcgcggcccaaaatgcagtggaagctgcgaaaaatcagaaggccggactgggcccccggttcagccctatcacacccctgcaacaggctgccccaggagttggcccccctttctcccaggcgcctgcaccccagctgccacctggccctccaggtgcgccaaaaccaccacccgcaagccagccgtcactggtctctaccgtcgcccccggcagtggcctcgcaccaacagcgcagccgggggctccctcaatggccggaactgtggcgccaggaggcgtatccggcccctcccctgctcagctaggagcaccggcgctcgggggacagcaatccgttagtaataaactgttggcctggagcggcgtgctggagtggcaagagaaaccaaagcctgcatctgtggatgcaaacacgaagcttacaaggagcttgccctgtcaggtgtatgtgaaccacggtgaaaatctaaagaccgaacagtggcctcagaagctaatcatgcaacttattcctcagcagctccttaccacattgggaccactctttaggaactcaagaatggtgcagtttcactttactaataaagatctggagtccctaaaggggctgtacagaatcatgggcaacgggttcgcaggatgtgtgcacttcccccatacagcaccctgtgaggtgagagtgcttatgctcctgtacagctcgaaaaagaagatctttatggggctcatcccttacgatcaatccggtttcgtgaatggcatccgtcaagtgattaccaatcataagcaggtacaacagcagaaactggagcagcagcagagaggaatgggaggacaacaggctcctccgggactgggccctatcctggaagaccaagccagaccaagccagaatctgctgcagctgcgaccacctcagccccagccgcaagggacggtcggcgccagcggggcaaccggccaaccgcagccacaggggaccgcacagccacctcccggggctcctcagggaccgcctggagctgctagcgggcctccccctccaggacctattctgaggccccagaatccaggggctaacccccagcttagatccctcctgcttaaccccccgccaccccagacaggcgtcccaccgccacaagcctcgctccaccaccatctgccatccccaggccctcacaattttcctctgggactacattgccaggtgcggggaccaggcgggggccagcgatccgggctctcggtgcccgccgcccccggcctcgagcatcaagaccgagtcctgctcgggtctaaggacatcgggtctaagaatgagggatccccgataagagcctgcagtccagccagttggagaaccacatcctcctggatttctagcgaatccccaacacccaacaaggtaccattctag

SEQ ID NO: 194457 - DNA, 2349 bp, synthetic construct
  misc_feature 1..2349: note = Description of Artificial Sequence: Synthetic coding sequence
  source 1..2349: mol_type = other DNA
atggtgcccggcagcgagggccccgcccgggccggcagcgtggtggctgacgttgtgtttgtcatagagggcaccgcaaacctcggcccatatttcgagggcctgaggaaacactatctcctgcccgctattgagtacttcaatgggggacctccggcggaaactgactttggtggcgactacggcggcactcagtactcccttgttgtgtttaataccgtggactgtgcccctgaatcatatgtccagtgtcatgccccaactagctccgcctatgaattcgtgacatggttggatggcatcaagttcatggggggcggaggcgaaagctgtagcctcatcgcagaaggattgtcgaccgcactgcaactgttcgatgactttaagaagatgagggagcagattggacagactcaccgcgtctgcctattgatttgtaactctccaccctacctcctgcctgcagtggagagtacaacgtattcaggatgtaccaccgaaaatctggtgcaacaaatcggcgagcgcggtattcacttttcaattgtttcaccgcgtaaactgcctgctttgcgtttgctgtttgaaaaggccgcaccacctgctctgttagaacctctgcagcctccaaccgacgtttcccaagatcctaggcacatggtgctcgtcagaggtcttgtgctgccagttgggggggggagcgctcccggcccactgcaatccaaacagcctgtgccgcttcctcctgccgccccctctggtgccacattgagcgcagcaccccaacaacccctgcctccggtccctcctcagtatcaagtgccaggtaacctgtcagccgctcaggtcgcggctcagaacgccgtggaagctgcaaaaaaccagaaagctggactgggtccccgtttctcccccattactccactgcagcaggcagctccaggagtcggccctcccttcagccaggctcccgctccacagctcccccccgggcctccgggcgcccccaagccccccccggcctctcagccctctttagtctctacagtcgccccggggtccgggctcgcgcctacggcccagcctggagcgccgtctatggccgggactgtggccccaggcggggtgagtggtcccagccccgctcagttaggggccccagctctcggggggcagcagtccgttagcaacaaattactggcatggtccggcgtgctagagtggcaggaaaagcccaagcctgctagcgtcgatgccaacacaaagctgacccgctctctcccatgtcaggtgtacgttaatcatggcgagaatctcaagaccgaacaatggcctcagaaacttatcatgcagttgatcccccagcaacttctgaccacattgggccctctgttccgtaacagcagaatggttcagttccactttacaaataaagacctcgagtccctgaagggtctgtatcgtatcatgggtaacgggtttgcaggatgcgtgcactttcctcacaccgctccctgtgaggttcgggtccttatgctgctgtatagctcgaagaaaaaaatttttatggggcttattccctatgatcaaagtgggttcgtaaacggaattagacaggtcattacgaatcataagcaggtgcagcagcagaaactcgaacagcagcagcgtgggatgggggggcaacaggctccacctggcctggggcccatcctagaagatcaggcaaggccttcacagaatctgttacaactacgccccccccagcctcaacctcaggggacagtgggagcctccggcgccactgggcagccacaaccacaggggacggcccagcctcccccaggagctccacagggccctcccggtgccgcgagtggcccccccccgccgggccctatactccgcccacagaatccaggagccaatccacaactcagaagcctgttactgaatcctcctccgccacaaacaggtgtgcctccccctcaggccagtctgcatcatctccagcccccaggagcccctgcgctcctgcctcccccacatcagggtcttggccagcctcagctggggcctccattattgcacccaccacctgctcaaagctggcccgcccagctacccccacgcgccccccttcccgccgctaagcggaaacgcgaaggtgagggacgcgttttcagggagaagtgggagagggcttatttcttcgtcgaggttaagagcatgcccatgtgtctgatttgcaagcagatcgtctccgtgttgaaggaatacaacctaaagagacactacgagtctaagcactccaagagctacgatcagtacactgagcagacacgatag

SEQ ID NO: 194458 - DNA, 1449 bp, synthetic construct
  misc_feature 1..1449: note = Description of Artificial Sequence: Synthetic coding sequence
  source 1..1449: mol_type = other DNA
atggtgcccggcagcgagggccccgcccgggccggcagcgtggtggccgacgtggtgtttgttattgaggggactgccaatctagggccgtatttcgaaggactgaggaagcattatcttctccccgcaatcgagtattttaatggaggcccaccagcaccattcagtcaggctccagctccacagctgcctcctggacctcctggggcccctaagccccctcccgcttcccagccttctttagtgagtacggtggctcccggcagcgggttagcccctactgcccagccgggagcacctagcatggccgggactgtggccccaggcggtgtgtcaggaccctctcctgcacagctgggggcgcctgccctgggtggacaacagtccgtgagtaataagctcctggcttggtccggggtgttagaatggcaggagaaacctaagccagcctccgtggatgccaataccaaactcaccaggagcctcccctgccaagtgtatgttaaccacggggagaatttaaagaccgagcagtggccccaaaagctgataatgcaactgataccccagcagctcttgacaacgcttggcccattgtttagaaactcgcgtatggtacagtttcacttcaccaataaggacctggaatcgctgaagggactttacaggattatgggcaatgggttcgcagggtgcgtacatttccctcacacggccccttgcgaggtgagagtactgatgctgctgtactctagcaagaagaaaatctttatgggactcattccctacgaccagtccggttttgttaatggtatccgccaagtaattacgaatcacaagcaggtccaacaacaaaagcttgagcagcaacagagaggcatgggcggtcagcaagccccacctggtctgggccccatcctcgaggatcaggcaaggccttctcaaaacctgctgcagctgcggccaccccagccccaaccacaggggaccgtcggtgccagtggtgccactggccagccccaaccacaaggcacggcccagcccccccccggcgcaccccagggtccacctggggcggcctccgggcctccgccacccggacctatcctgaggccccagaacccaggggccaaccctcagctgagatctcttcttctgaatcctccgcctccccaaactggcgtccccccgccccaggccagccttcaccatctgcagccacccggagcacctgcactgcttcccccacctcatcaggggttaggtcagcctcagctcggaccacccctacttcatcccccccctgcgcagtcttggcccgcccaacttccaccccgcgctcccctccccggacagatgctcctgagcggtggccctagaggccctgtcccgcagcccggactccagccttccgtgatggaagacgatatcctgatggacctaatatag

SEQ ID NO: 194459 - DNA, 2385 bp, synthetic construct
  misc_feature 1..2385: note = Description of Artificial Sequence: Synthetic coding sequence
  source 1..2385: mol_type = other DNA
atggtgcccggcagcgagggccccgcccgggccggcagcgtggtggccgacgtcgtctttgtcatcgagggtacagccaacttgggaccgtatttcgaaggtctgcgcaaacactatctgttgcctgccattgaatacttcaacggtggccccccagccgaaacagacttcggtggcgactacggaggtacccaatatagcttagtggttttcaacactgtcgactgtgctcctgaatcatatgtgcagtgccacgctcctacatcatctgcatatgaatttgtgacctggttagatggtataaaattcatgggaggtggcggagagtcatgctccttaatagcagagggtctgtctaccgccctgcagctttttgatgattttaaaaagatgagagaacagatcgggcaaacacatagagtttgtcttctcatctgtaactcaccaccctatctgctgcccgcagtggagagtaccacctactctggctgcactacggaaaacctagttcagcagattggggagcgcgggatccatttttccatagttagcccccggaaactgccagccctcaggctgctcttcgaaaaggccgcaccacctgcactgctggagcctttgcagccccccaccgacgtgagtcaggaccccagacatatggtcctagtcagggggcttgtgctccctgtgggagggggctcagcccctggaccactgcagtcgaagcaacccgtacctcttccccctgctgcccccagtggggcaacactcagtgcagcaccacagcagccattgccacccgtaccaccccagtaccaggttccagggaacttaagtgccgcacaggtggcggctcaaaatgcagtcgaggccgcaaaaaaccagaaggccggattagggcctaggttcagtccaataactcctcttcaacaggctgcacctggagtggggcctcctttttcccaggcccctgcgcctcagctgccgccagggcctcctggtgccccgaaacccccccctgcgtctcagccctcattggtttccactgtggctccgggcagcggtctagccccaactgctcaaccaggcgccccctctatggcggggaccgtcgcccccggtggagtgtctggaccttctcctgctcaattgggagcgcccgcactggggggacagcagtccgtgtctaataagcttctcgcctggtccggagtattagagtggcaagagaaaccaaagcctgccagcgtagatgcaaacacaaaactaacaagatcgttgccttgccaggtgtatgtcaatcacggtgagaacctgaaaaccgagcagtggccccaaaaattgattatgcagttaatccctcagcagctgttgactactttgggtccactcttcaggaactctaggatggtccagttccacttcaccaataaagatctggaaagtctgaaaggattatataggatcatggggaatgggtttgccgggtgtgtgcacttccctcatactgcgccgtgcgaggtccgtgttctgatgctactctacagtagcaaaaagaagatctttatggggttgataccatatgaccagtcagggttcgtaaatgggatccgccaggtcatcacaaaccacaagcaggtgcaacaacaaaagcttgagcagcagcaaagggggatgggcggccagcaagcccccccgggtcttgggcccatcctggaggaccaagcccggcctagtcagaacctgttgcagctgaggcctccgcaaccccagcctcagggaacagttggcgcctctggagctacgggccagccccagcctcaagggactgcacagcctccacctggagctccacagggcccaccaggtgcagcctctgggccccccccaccagggccaatcctgcggccacaaaaccctggagccaatccacaactacgcagtctattgctcaatccgcccccgcctcagacgggagttcctcctccgcaggccagcctacaccacctgcagccacctggtgcgcctgcacttctgcccccaccgcatcagggcctggggcagccccagctcggccctcctctactgcatccaccccctgatggcgctagaagatccgatgctgccgagagggggagtcccgggcctggaagaagcccccagtcgccgcccttacccctggggttccccgttcgtcaaagggttactgctttccatgtgtccatcacgtctggcaaaacaaaagagcggaggcgcggaccctgcgtcagcagaaagatgggagcgtcactcttcctctgcgggtccgaggaacatgcctacgtgttcaacatgcagaccaatcgcgtgtgtgtggaaagaatccagccagaaaccccactctag

SEQ ID NO: 194460 - DNA, 2175 bp, synthetic construct
  misc_feature 1..2175: note = Description of Artificial Sequence: Synthetic coding sequence
  source 1..2175: mol_type = other DNA
atggtgcccggcagcgagggccccgcccgggccggcagcgtggtggctgacgttgttttcgtgatcgagggtactgctaacttgggaccctacttcgaaggactgcgcaagcactacctcctgccggccatcgagtattttaacgggggcccaccagcggagacagattttggtggagattacgggggaacgcagtatagcttggttgtgtttaacactgttgactgcgcacctgagagctacgttcagtgtcacgccccgacctcatcagcttacgagtttgtcacctggctggatggcattaagttcatgggcggcggcggtgaaagctgcagccttatcgccgaggggcttagcaccgccctccagcttttcgatgatttcaagaagatgagggagcagatcgggcaaacccaccgagtctgtctcctaatctgcaacagccctccttacctcctaccagcagtggagagcactacatattcgggctgtaccactgagaatctggtgcagcagatcggggagagaggcattcacttttccatcgtcagtcctcggaagctgcccgccctccgcctgctgttcgaaaaggctgcacctcccgccctgctagaacccctgcaaccgccaacagacgtatcccaggaccctcgtcatatggttctggtgcgtggcctggttcttccagtaggtggcggttccgctcccggacccctccaatcaaagcaaccagttccactgccaccagccgcgccttcgggcgctaccctcagcgctgcaccacagcagcccctgccccctgtgcccccacagtatcaagtgccaggaaacctcagcgcggcacaggtcgcagcacaaaacgccgtggaggctgccaaaaatcagaaggctggcctgggcccacgcttctcacctatcacaccactccagcaggctgctcccggcgtgggaccacccttcagtcaagctcctgctccccaactcccgcctggcccccctggcgcaccgaaacctcctcctgcctcccaacccagcctggtaagtacagtcgcccccggaagcggcctggcccctactgcccagcccggtgcaccgtccatggctggtacggtggcccctgggggagtgtccgggcctagcccagcccagctcggagcaccagcactcggaggccaacagtcagtctctaacaaactcctggcctggagcggtgtgctggagtggcaagaaaaacccaaacccgccagtgtagatgctaacactaaacttacccgctccctgccatgccaggtctacgtaaatcacggtgaaaatctgaaaactgagcagtggcctcagaagctgatcatgcagctgatccctcagcagttactgacaacactgggcccactctttcgtaatagcaggatggttcaatttcactttactaacaaggacctggagagcctcaaagggctatacagaataatggggaatggctttgccggatgtgtgcattttcctcacactgcaccatgcgaagttcgggtgcttatgctgctctacagttctaaaaagaagatcttcatgggcttgattccatatgaccaaagcggattcgttaacggcataagacaggtgattaccaaccataagcaggtgcaacagcagaaattagaacagcagcaaagggggatgggcggtcagcaggcccctccaggccttggtcccattcttgaagaccaggccagaccctcacagaatctgctgcagctcaggcctccacagcctcagcccccaccaggagcgccccagggcccgccaggagccgcatcaggacctccacccccaggaccaattttgcgcccccagaaccctggtgccaacccacaacttcgaagcctgctcctaaatcctcccccaccgcagaccggggtgccccctcctcaggcttctttacaccacctgcagccccccggagccccagctctgctgcctccccctcatcaaggcttgggccagccccagctgggccccccgctgctccatccccctcccgcacagagctggcctgcacagttaccacctcgggcccccctgcccgggaaaggcacgcggggcagagcagaggtgtggacggagtgcccaagttcttcgtgggccagggccccacgccctagcgctccggggaagtag

SEQ ID NO: 194461 - DNA, 753 bp, synthetic construct
  misc_feature 1..753: note = Description of Artificial Sequence: Synthetic coding sequence
  source 1..753: mol_type = other DNA
atgctgctgtacagcagcaagaagaagatcttcatgggcctgatcccgtatgaccagtcaggatttgtcaacggtatacggcaggttattacgaatcacaagcaggtgcagcagcaaaaactggagcagcaacagagggggatgggcgggcagcaggctcctcccggactcgggcccattctggaggaccaggctagaccatcccagaatctcttgcagttgcggccacctcagccgcagccgcagggcaccgttggggcctccggcgcaaccggccaaccgcagccccagggcactgcccagccccctcctggggccccgcagggccccccgggtgcggctagcggaccccccccgccaggaccaatttttggcccacggactcttggtcctacactttcatgtgaggcctcctccagcacccaccataggcggcggctgggctgccctcatccccgcccaccttcaaccacaagcagtcatcagggcctgctgcgctgttgcctccggcggcagggcttgggtcagcctcagctgggaccccattcttgcatccatcatttgccgtcccccggccctcacaattttcccctagggctgcattgtcaagtcagagggccaggtggcggccaaagaagtggtctcagcgtacccgccgctccaggcctcgaacaccaggatagggtgttactgggaagcaaagacattgggagcaaaaacgagggatcgcctatggcattcgcagagctgtag

SEQ ID NO: 194462 - DNA, 1605 bp, synthetic construct
  misc_feature 1..1605: note = Description of Artificial Sequence: Synthetic coding sequence
  source 1..1605: mol_type = other DNA
atggtgcccggcagcgagggccccgcccgggccggcagcgtggtggccgatgtggtgttcgtcatcgaaggcacagcaaacttgggcccatacttcgaggggctaagaaagcactatctgttacctgcaattgaatacttcaatggcgggcccccagccgaaactgacttcggaggagatgtgcctggcaacctcagtgccgcacaggtggcagctcaaaacgccgtggaggccgccaaaaaccaaaaagctgggctcggtccacgcttcagtcccattacccctttgcagcaagctgcacccggcgtggggccaccattcagtcaggctccagcgcctcagctgccgcccgggcctcccggtgcgcctaagccccccccggcctcacagcctagcctggtgtctaccgtggctcccgggtcaggcttggcacccactgcccagcccggcgccccttcgatggcaggaactgtggccccagggggagtatctggtccaagcccggcacagctaggtgccccagcactgggtggacagcagagtgtctcaaacaagctccttgcctggagcggcgtgctggagtggcaggagaagccaaagccagcttcagttgacgctaacaccaagctgacacgttctctaccatgccaagtgtacgtaaaccatggcgagaacttgaagaccgagcaatggcctcagaagcttattatgcagttgatccctcaacagctgctgacgaccctcggcccactctttagaaattcccgaatggtccagtttcatttcactaataaagaccttgaatccctgaaaggcttgtacaggatcatgggaaatggcttcgcaggatgtgttcactttccccataccgctccttgcgaagtgcgcgtgctcatgctgctatatagcagtaaaaagaagatcttcatgggactcatcccttatgaccagagcgggttcgtgaatggcatccgccaggtgataaccaaccacaagcaggtgcagcagcagaagttggaacagcaacagaggggaatggggggacaacaggcccctcccggactcggacctattctggaggatcaagcgcgaccatcacagaacttgttgcagttgagacccccccaaccccaaccgcagggcacagttggtgcttctggcgctaccggacagccacagccacagggtacagcccagcctcccccaggagctccccagggccctcccggtgcggcgtcagggcccccacctcccggtcccattctaagacctcaaaaccctggcgccaacccacagcttcgaagcctacttcttaatccacctcctccacagactggagtgccccctccccaggcctctctgcaccatctgcagccaccaggggcccccgctttattgccacccccccaccagggtctgggccagccacagctggggccaccattgcttcaccctcctcccgcacagtcctggcctgctcagctccccccgagggctcccctacccgggcaaatgctgctgtccggtggaccacgagggcctgtgccccagcctggtttacaaccatcagtcatggaggatgacatcttaatggacctgatttag

SEQ ID NO: 194463 - DNA, 1194 bp, synthetic construct
  misc_feature 1..1194: note = Description of Artificial Sequence: Synthetic coding sequence
  source 1..1194: mol_type = other DNA
atggtgcccggcagcgagggccccgcccgggccggcagcgtggtggctgatgtagtattcgtgatcgagggcaccgccaatctgggaccgtactttgaaggcctgcggaaacactatcttctgcctgctattgagtactttaatgggggcccccccgccgagaccgattttggcggcgactatggagggacccaatacagcctggtagtctttaatacagttgactgcgctcctgaaagctatgtgcagtgtcacgcgccaacaagctcagcctatgagtttgtgacatggctggatggcataaagttcatggggggtggcggagaatcttgttcccttatcgctgaaggtctgtccactgccctgcagctcttcgatgactttaagaagatgcgagagcaaatcggtcagactcatagggtgtgtcttctgatatgcaactcgccgccctatttgctgccagctgtggagagtaccacctactctggctgtacgaccgagaatcttgtccagcagatcggagagcggggaatccatttctccatcgttagtccacggaagctgccagccttaagattattgttcgaaaaggccgccccccctgcattactggagcccttgcagccaccaactgacgttagccaggaccctcggcatatggtgctggttcgcgggctcgtattacccgtcggcggggggtccgcccctggccccctgcagagtaaacagcctgtaccactgccacccgcggccccatccggggcaacccttagtgcagcaccacagcagccactgccacccgtgccacctcaataccaagttcccggtaatctatccgccgcccaagtcgcagcgcagaacgctgtagaggcagctaagaatcagaaggctgggctaggcccccgtttttctcccataactccgctgcagcaggcggccccgggagtgggcccaccattctctcaggcccctgcccccgccctgctaccacctccacatcaggggctgggccagcctcagttgggacctcccctgctgcacccgcccccagcccagtcctggcctgcgcagttgccacctagggcacccctgccgggccagatgctgctgtcaggcgggccaagaggcccagtcccccagcccgggctgcaacctagtgtaatggaggacgatatcctcatggaccttatttag

SEQ ID NO: 194464 - DNA, 780 bp, synthetic construct
  misc_feature 1..780: note = Description of Artificial Sequence: Synthetic coding sequence
  source 1..780: mol_type = other DNA
atggtgcccggcagcgagggccccgcccgggccggcagcgtggtggctgacgtggtgtttgtaatagaggggactgccaatctgggcccgtacttcgaaggtctgcgtaaacactaccttttacccgccattgagtacttcaatggaggaccccctgccgagacagatttcggcggggactacggcgggacccagtactcccttgttgtgttcaataccgtcgattgtgcccccgaatcctacgtgcagtgccacgcccccaccagcagcgcctacgagtttgttacctggttggacggcattaaatttatgggtggtgggggggagagttgctctttgattgccgagggcttgagtaccgctctgcagttgtttgacgacttcaagaagatgcgcgagcagatcggccaaactcaccgtgtctgtctgctgatttgcaattctcccccttatcttctcccagccgtagaatcaaccacatacagtggatgtacgactgaaaatctcgttcagcagattggggagcgcggaatacacttcagtatcgtgtccccacgaaagctgcccgcgttgagactgctctttgagaaggctgcccccggcctcgcgggagctgccgccgcttccgacagatgtgagcccgggcccgaagcccatggcgctggctcaggcacgcgggccgcttgctggggctggctgtctccaagaccaccacccgtgaaggcagcttcccctccggctagtcgcaggaccctccgttgtcaggttcggtgctgttag

SEQ ID NO: 194465 - DNA, 1803 bp, synthetic construct
  misc_feature 1..1803: note = Description of Artificial Sequence: Synthetic coding sequence
  source 1..1803: mol_type = other DNA
atgaccgccgcccccgccagcccccagcagatccgggaccggctgctgcaggcaattgatccacaaagcaatattagaaatatggtggccgttttagaagtcattagttccctcgaaaaatatccgatcacaaaggaggccctggaagaaaccagactgggcaaattgatcaacgacgtaagaaaaaaaactaagaacgaggaactggctaagagagcgaaaaaactgctccggagttggcagaaactgattgagccagcccaccagcatgaagcagcacttcggggcttggcgggggcaacaggatcagcgaacggcggggcacacaattgtagaccggaggtcggggctgccggccctcccagatctattcacgatctaaagagccgaaacgatcttcaaagactgcccgggcagagattggatcgtctcgggtctcggaaaaggcgcggcgaccagcgcgacctcggccatcccgggcccccgccaaaggtatcaaaagcttctcacgatcccctggtacccaattctagtcccctgcccacgaatggcatcagcggctccccagaaagttttgcatccagcttggatggctccggtcacgccgggcctgaaggctcacggctggagcgtgacgaaaacgacaaacactccggtaaaatccctgtcaacgccgtgcgtccccacaccagcagcccaggtctgggtaagccaccaggaccctgtcttcagcccaaagcatctgtcctgcagcagctagacagagtcgacgaaaccccaggcccaccacatcccaagggccctccccgctgttccttctctcctcggaactcacggcatgaaggcagtttcgccaggcaacagtcactgtacgcacccaagggcagcgttcctagtccgtctccacggccccaggctctggatgccacccaagtgccaagtcctttgcccttggctcagccctccactcccccagtacggcgcctcgagctcctaccatccgcggagagcccagtgtgctggctcgaacaacctgagagccatcagcggttggctggcccagggtgcaaggcagggcttagcccggctgaaccattgctgtccagagctggctttagcccagatagtagcaaggccgactcagacgctgcatcctctggggggagcgatagcaagaagaagaagaggtataggcctcgcgattacacagtgaacctcgatggtcaggtggccgaggcaggggtgaagccagtgcgactcaaagagcgcaaattaacatttgatcctatgacacggcagattaaaccactcacacaaaaagaacctgtgagggcagattcccccgtgcacatggagcaacaatccagaaccgagttggacaaacaggaggccaaagcaagcctccagtctcctttcgagcagactaactggaaggagctcagccgaaatgaaatcatccagtcataccttagtcgccagtcttccctgctgtcatcctcgggggctcaaactccaggtgcccatcatttcatgtccgaatacctgaagcaggaagaaagcaccaggcaaggcgcaaggcagttgcacgtgctggtgcctcaatcgcctccaaccgacctccccggactcaccagggaggtgacccaagatgatttagataggatccaggcatctcagtggcccggtgtgaacggttgccaggacactcaaggaaactggtatgactggacccaatgcatttcgttagatccacatggtgatgacgggcgtctcaacattcttccttacgtgtgcctagactag

SEQ ID NO: 194466 - DNA, 282 bp, synthetic construct
  misc_feature 1..282: note = Description of Artificial Sequence: Synthetic coding sequence
  source 1..282: mol_type = other DNA
atgaccgccgcccccgccagcccccagcagatccgggaccggctgctccaagcgatcgaccctcagtctaacatccgcaatatggttgccgtccttgaggtcatttcgtcactggagaagtaccctattacgaaagaagccctcgaagagacacggctgggtaaacttataaacgatgtgcggaaaaagaccaagaacgaggaactggctaagcgtgccaagaagctgctgcccggatggcagtgggcttgccgcccgcggggtcaaccccccggcgcgtag

SEQ ID NO: 194467 - DNA, 936 bp, synthetic construct
  misc_feature 1..936: note = Description of Artificial Sequence: Synthetic coding sequence
  source 1..936: mol_type = other DNA
atggccgacgtgatcaacgtgagcgtgaacctggaggccttcagccaggcaattagtgcaattcaagccttgcggtcctctgtgagcagagtatttgattgcttgaaagacggtatgcggaacaaagagaccctcgaaggcagagagaaggcctttatcgcccatttccaagataatttgcattccgtcaatagagatctgaatgaattggaacgactgtccaatttggtaggaaagccttccgagaatcatcccctgcacaactcgggcctactctccctggacccagttcaggataaaacgcccctctattctcagctcctccaggcgtataaatggagcaataagctacagtatcacgcaggactggcaagtggccttctgaaccagcagtccctcaagcggagtgctaatcagatgggagtctctgccaaacgccgacctaaggcccagcccacgaccttagttcttcctccacagtatgtagacgacgtcattagcaggatcgatagaatgttccctgagatgagcatacatttatctcgtcccaatggaacaagcgcgatgttactggtgacgcttggcaaggtgctgaaagtcattgtggtgatgcgctcactttttattgacagaacaatagtcaaaggatacaacgagaatgtgtacaccgaagatggcaagctggatatttggtctaagtccaattaccaggtttttcagaaagtcacagatcacgcaacgactgccttgctgcactaccaactgccgcagatgcctgacgtggtagttaggtcattcatgacttggctgcgatcctacatcaaactttttcaagctccgtgtcagagatgtgggaaatttcttcaagatggcttaccacctacctggcgtgactttcgcacacttgaggccttccatgatacctgtcgacagtag

SEQ ID NO: 194468 - DNA, 714 bp, synthetic construct
  misc_feature 1..714: note = Description of Artificial Sequence: Synthetic coding sequence
  source 1..714: mol_type = other DNA
atgcggaacaaggagaccctggagggccgggagaaggccttcatcgcccattttcaggataacttgcactcggtgaaccgggacctgaatgagctagaacggctttctaacctggtgggaaaaccgtcggagaaccatcccctccacaattctggcctcctctctctagaccccgtacaggacaagactcctctgtatagtcagctcttacaggcatacaagtggagcaacaagctccaataccacgcgggtcttgcctctggcttgcttaaccaacagagccttaaacggagcgcaaatcagatgggcgtttccgccaagagaagaccaaaagcccagcctactacccttgtcctaccccctcagtacgtagatgatgtgatctcacgaatcgatagaatgtttcctgagatgagcatacacctatcaaggccaaatggtacctccgcaatgttgctgctggacatttggtctaagagtaattatcaggttttccaaaaggtcactgaccatgctacaacggctctgttacactaccagttgccccaaatgccagacgtggttgtgagatcattcatgacatggctgcggagttatatcaaactgtttcaggccccatgtcagagatgtggaaaattcttacaggatggattgccaccaacatggagggacttcagaacactggaagcctttcacgatacctgtcgccagtag

SEQ ID NO: 194469 - DNA, 828 bp, synthetic construct
  misc_feature 1..828: note = Description of Artificial Sequence: Synthetic coding sequence
  source 1..828: mol_type = other DNA
atggccgacgtgatcaacgtgagcgtgaacctggaggccttcagccaggctatatcagcaatccaggctttgcggagcagcgtctccagagtctttgactgtctgaaagacggcatgcggaacaaggaaacactcgaaggtcgtgagaaggcattcatagcccacttccaggacaatctgcacagtgtaaatcgcgatctgaacgagttggaaaggttatctaaccttgtgggcaaaccttctgagaatcacccactacacaacagtggcctcttatccctcgaccccgtgcaagacaaaacacccctttattctcagctgttacaggcctataaatggtcaaataaacttcagtatcatgctggcctcgccagcggcctgcttaatcaacagagcctgaagcgttctgccaaccagatgggtgtgtcagccaaaagacgtccgaaggcccagcccaccacactcgtgctgccgccccagtatgtggatgacgtaatctctcgcattgacagaatgttccccgagatgagcatccacctgagtaggccaaacggcacgtcagcaatgctgcttttggacatttggtcgaaaagcaattaccaggtctttcaaaaggtcacggatcacgctacaacagccctcctccattaccagctgccacaaatgcctgacgttgttgtcagaagctttatgacctggctgagaagttatatcaagttgttccaggccccttgtcaacgctgtggcaagtttctgcaggatggactgcccccaacctggcgtgactttaggacactggaggctttccatgacacttgtaggcagtag

SEQ ID NO: 194470 - DNA, 666 bp, synthetic construct
  misc_feature 1..666: note = Description of Artificial Sequence: Synthetic coding sequence
  source 1..666: mol_type = other DNA
atgctgaagagcaacggcgagcggcggagccggaacgccctgcccgcagtctatgcaagaaagatggccgcatcacagcaacaggcttcagcagcatccagcgccgctggagtttccggcccctcgtcagcaggcggccctgggcctcaacaacagcctcagcctccagcccagcttgtcgggcccgcacagagtggccttttgcaacagcagcagcaggacttcgaccctgtgcagcggtacaagatgctcatccctcaactgaaggagtctcttcagactcttatgaaggtagcagcccagaacttaattcagaacaccaatatagacaatggccagaaatcaagcgatggccccatccagagattcgacaagtgtttggaggaattctatgccctttgcgatcagctggaactttgcctccggttggcacacgagtgtctcagccagtcatgcgattctgctaagcacagtccaactttagtccctactgccactaaaccggacgccgttcagccggactcgctcccatatcctcagtatctcgccgtgattaaggcacaaataagctgtgcaaaagacattcacaccgctcttcttgactgcgccaataaggtgactggcaagacgcctgcaccacctgcaggacctggaggcacactgtag

SEQ ID NO: 194471 - DNA, 420 bp, synthetic construct
  misc_feature 1..420: note = Description of Artificial Sequence: Synthetic coding sequence
  source 1..420: mol_type = other DNA
atgctgatcccccagctgaaggagagcctgcagaccctgatgaaggtcgccgcccagaaccttatccagaatacaaatatagacaacggacagaagagtagtgatggccctatccaacgattcgacaaatgcctggaggaattctacgccctgtgcgaccaactggagttgtgcctccgactggcccacgagtgtctcagccagtcttgtgattctgccaagcattccccgactctcgtgccaacagccactaaacctgatgctgtacagcctgatagcttgccatacccacaatacttagcagtgatcaaggcccagatttcttgcgcaaaagatatacataccgctcttctcgattgtgctaataaggtcacgggcaagacaccggcccccccggctggccctggaggtactttgtag

SEQ ID NO: 194472 - DNA, 537 bp, synthetic construct
  misc_feature 1..537: note = Description of Artificial Sequence: Synthetic coding sequence
  source 1..537: mol_type = other DNA
atgagcaccccccccctggccgccagcggcatggcccccggccccttcgctggaccacaagcgcagcaagccgctcgggaggttaacaccgcctcactctgcaggattggtcaagagaccgtacaggacattgtttatcggaccatggagattttccagctcctacgaaatatgcagctgcctaatggagtgacctatcacactggcacttaccaagaccgactcaccaaactccaagataacctaagacaactgagcgtactgttcaggaagttacggctagtttacgataagtgtaacgaaaattgcggaggcatggacccaatccctgtcgagcagctgattccatacgtagaagaggatgggagtaagaatgacgaccgtgcaggacctccccggtttgcctccgaagaaaggcgcgagatcgctgaagttaacaaaaaactcaagcaaaagaatcagcagctgaagcaaattatggaccagctgcggaacttgatatgggacatcaacgctatgctggccatgcggaattag

SEQ ID NO: 194473 - DNA, 813 bp, synthetic construct
  misc_feature 1..813: note = Description of Artificial Sequence: Synthetic coding sequence
  source 1..813: mol_type = other DNA
atggccgccagcagcagcggcgagaaggagaaggagcggctgggcggaggcctcggagtggcaggcggaaactccaccagagaaagactactgtcggctctcgaggatctcgaggtgctctccagggagctcatcgagatgttagctatctcccgtaatcagaagctgttacaagccggagaggagaaccaggtcctcgaattgctcattcacagggatggcgagttccaggaactaatgaagcttgcactaaaccagggaaaaatccaccatgaaatgcaggtgctcgagaaagaggtggaaaaacgagactccgacattcagcagctccaaaagcagctgaaggaggctgaacagattctcgccactgctgtctatcaggccaaagagaagctaaagtcaatcgagaaagcaaggaaaggagcaatcagctccgaagagatcattaagtatgctcaccgcataagcgcgagcaatgccgtctgcgctcctctgacttgggttcctggcgacccccgccggccctaccctacggacctggagatgcggtcgggactactcggtcagatgaacaatccctctaccaatggagtcaatgggcatctccctggcgacgctctcgctgccggccgacttcccgatgtgctggcaccccagtatccgtggcagtctaacgatatgagtatgaacatgctgcccccaaatcatagcagtgacttcctcctggagccccctggccataataaggaaaatgaagatgatgtggagataatgagtaccgattcttcttcttctagcagcgaatctgactag

SEQ ID NO: 194474 - DNA, 675 bp, synthetic construct
  misc_feature 1..675: note = Description of Artificial Sequence: Synthetic coding sequence
  source 1..675: mol_type = other DNA
atgctggccatcagccggaaccagaagctgctgcaggccggcgaggagaaccaggtgctcgaattattaatccacagagacggggagttccaggaactcatgaaacttgctctgaatcaaggtaaaatccatcacgaaatgcaagtgctggaaaaggaagtggaaaagcgtgactcggatattcagcagctgcagaagcagctgaaggaggccgaacagatcctcgcgacggcagtctaccaggctaaggagaagcttaagtcgatcgagaaagccaggaagggagccattagcagtgaggagatcattaagtatgctcataggatcagcgcctctaacgctgtatgtgcacctctcacgtgggtgcctggagacccgaggcgcccctatcccactgacctggaaatgcggtccgggcttttgggccagatgaataatccctctaccaacggcgtcaacggccacctgccaggggatgccttggcagcgggtaggctacccgacgttttggccccgcagtacccttggcagagcaatgatatgagcatgaatatgctgcctcccaatcactcatcagatttcctgttggaaccaccaggtcacaacaaggaaaacgaagatgatgtcgaaatcatgtcaaccgactctagttcctctagttcagagtccgactag

SEQ ID NO: 194475 - DNA, 747 bp, synthetic construct
  misc_feature 1..747: note = Description of Artificial Sequence: Synthetic coding sequence
  source 1..747: mol_type = other DNA
atgaagctgctgtggtggtgcgactggctgcccgagcggagccacgtgttcacccagagagagctgatcgagatgttggccatttctcggaaccagaagctgctacaagcgggtgaagaaaatcaggtgctcgagcttctgattcaccgagatggtgagtttcaagagttgatgaaactggccctgaaccaggggaaaattcaccacgaaatgcaggtgctggagaaggaagttgagaaaagagactccgacatccagcagctccagaagcaactcaaggaagccgagcagatactggctacggcggtataccaggccaaggaaaaattgaagagcatcgaaaaggccaggaaaggtgcaatttcctccgaagaaatcatcaagtacgctcacaggatctctgccagcaacgctgtttgcgcgcccctgacttgggtgccaggtgaccctagacgcccataccccaccgatctggaaatgagaagcggtctgctagggcaaatgaacaacccatctacaaatggcgtaaatggtcatcttccgggggacgcccttgccgctggcaggcttccggatgtcttagcccctcagtatccctggcagtctaatgatatgtccatgaatatgctaccccccaaccattcgagcgactttctgctggagccaccaggccacaataaggagaacgaggacgacgtggagatcatgtccacagatagtagctcgtcctcatcggagagcgactag

SEQ ID NO: 194476 - DNA, 717 bp, synthetic construct
  misc_feature 1..717: note = Description of Artificial Sequence: Synthetic coding sequence
  source 1..717: mol_type = other DNA
atgaagctgctgtggtggtgcgactggctgcccgagcggagccacgtctttactcagcgcgagctcatagagatgctagccatcagtcgtaaccagaaactgctgcaagcaggagaggaaaaccaagtgttggagctcctgatccaccgtgacggggaattccaggagctgatgaagctcgccctcaaccagggaaagattcaccacgaaatgcaagtcctggagaaggaagtcgagaagcgcgactctgacattcagcagctacagaaacaactgaaggaagccgagcagatcctggccactgccgtgtatcaggccaaggaaaaactaaagtcaatcgaaaaagcgcgcaaaggagctatctctagcgaagagatcattaagtatgcacaccggatttctgcctcaaacgcagtctgcgcacctcttacatgggtgccgggagatcctaggcgcccttatcccacggatcttgagatgcggtcagggttactcgggcagatgaacaacccaagcacgaacggtgtgaatggccatctgcctggggatgctttggcagccgggaggcttcccgacgtgctcgctccacagtatccgtggcagtcaaatgacatgagtatgaacatgttgccacctaaccacagctccgatttcctcctcgagccccccgggcataataaagagaacgaagatgatgtcgagattatgagtacatag

SEQ ID NO: 194477 - DNA, 702 bp, synthetic construct
  misc_feature 1..702: note = Description of Artificial Sequence: Synthetic coding sequence
  source 1..702: mol_type = other DNA
atgggcgagccccagcaggtgagcgccctgccccccccccccatgcagtacatcaaagagtataccgacgagaatattcaggaggggctggcacccaaaccacctccgcccatcaaagattcatatatgatgttcggcaatcagtttcaatgtgacgacctgatcattagacccctggagagtcagggcatagagcggctccaccccatgcaatttgaccataaaaaagaattgcgaaagctgaatatgagtattcttatcaactttttggacctgctcgatatacttatacgcagtcccgggagcatcaagcgcgaggaaaagctagaggatctgaagttactcttcgtgcatgtgcaccatctgataaacgagtatagaccccatcaggcacgagaaaccctccgcgttatgatggaggtacaaaaaaggcagcgcctggagaccgcggagcggttccagaaacatcttgaaagggtgatcgagatgattcagaactgtttggcttcgttacccgacgacctaccacactctgaggctggaatgcgcgtcaagacggagcctatggacgccgatgatagtaataactgtaccggccagaatgagcatcaaagggagaattcgggtcacaggcgtgaccagatcattgagaaagacgcagctctgtgtgtacttatagatgagatgaacgaaaggccttag

SEQ ID NO: 194478 - DNA, 702 bp, synthetic construct
  misc_feature 1..702: note = Description of Artificial Sequence: Synthetic coding sequence
  source 1..702: mol_type = other DNA
atgggcgagccccagcaggtgagcgccctgccccccccccccatgcagtacataaaagagtacaccgacgaaaatatacaggaagggctggcccctaagccccctccacccatcaaagatagctatatgatgttcgggaatcaatttcagtgcgatgacctcatcattcgtcctttggaatcccagggcatagagcgactgcacccgatgcagtttgatcacaagaaggagctccgaaagctgaacatgagcatactcattaacttcttggacttactggatatcctgatccgctccccaggctcaatcaaaagagaagagaaattggaggacctgaaactcctgtttgtccacgtgcaccacctcattaacgagtatcgaccccaccaggccagggagaccctccgcgtgatgatggaagtgcagaagcgccagaggttggagactgccgagagatttcaaaagcacctggagagagtcattgaaatgatacagaactgcctggcttcactgcctgatgacctaccccactcggaggcgggaatgcgtgttaagacggagccaatggatgccgacgatagcaataactgcacaggtcagaatgagcaccagcgagagaattcaggtcatcgccgagaccaaattatagaaaaagatgctgcactctgcgtgctgatcgatgagatgaacgaaagaccttag

SEQ ID NO: 194479 - DNA, 588 bp, synthetic construct
  misc_feature 1..588: note = Description of Artificial Sequence: Synthetic coding sequence
  source 1..588: mol_type = other DNA
atgggcgagccccagcaggtgagcgccctgccccccccccccatgcagtatattaaggagtatactgatgagaacattcaggaggggttagcccctaagccaccgccaccaatcaaagattcatacatgatgtttggtaatcagttccagtgcgacgacttgattattcgacctctggaaagtcagggcatcgagagactccaccccatgcagttcgaccacaagaaggaattacgcaagttgaacatgtcaatactcataaatttcttagatcttcttgacattctgatccgctctcctggttccatcaagcgagaagagaagctggaggacctgaaactgctgtttgttcatgtccaccacctcatcaacgaatacagaccacaccaggcacgcgaaacactgcgcgttatgatggaggtacaaaaacggcagcgcctcgaaacggccgagaggtttcagaagcaccttgaacgggtcatagagatgatccagaactgcttggctagtctgcctgacgatctgccccactcggaggccggcatgagagtgaaaacagagcccatggatgcagatgatagtaactag

SEQ ID NO: 194480 - DNA, 441 bp, synthetic construct
  misc_feature 1..441: note = Description of Artificial Sequence: Synthetic coding sequence
  source 1..441: mol_type = other DNA
atggccagcgccggcgtggccgccggccggcaggccgaggacgtgctgccaccaacttccgaccagccactgcccgacacgaagcccctgcccccaccacagcctccgcccgttcctgcaccccagccccagcagtctcccgccccccgaccacaatcccccgctcgagcaagggaagaagaaaactactcatttctgccgctcgtgcacaatattataaagtgcatggacaaagactcaccagaggtgcaccaggacctgaacgctctgaaaagtaagtttcaggaaatgcggaaactgatatccacaatgcctggcatccacctttctccagagcagcagcagcagcagctccagtcacttagggaacaggtgcgtacgaaaaatgagctgttgcagaaatacaaatcactgtgtatgttcgagatccccaaggaatag

SEQ ID NO: 194481 - DNA, 894 bp, synthetic construct
  misc_feature 1..894: note = Description of Artificial Sequence: Synthetic coding sequence
  source 1..894: mol_type = other DNA
atgagcaaccgggtggtgtgccgggaggccagccacgccggcagctggtacactgcaagcggccctcagcttaatgctcagttggagggttggctcagccaggttcagagcaccaagaggcctgctagggcaattattgcccctcacgcagggtatacgtattgcggcagctgcgctgcacacgcctataagcaagtggaccccagcataaccaggcgtatcttcattctcggccccagtcatcacgtgcctctcagcaggtgcgccctttcctcggtcgatatttatcgaacccctctgtatgatctgcgcatagaccagaagatctatggagagctctggaaaactggcatgttcgaaaggatgtcgctgcagactgatgaggacgagcattcaattgaaatgcatctgccatacaccgccaaagccatggaaagccacaaggatgaattcactatcatcccggttcttgtcggtgcgttgtccgaatctaaggagcaggagttcggaaagctgttttcaaagtacctggcagacccatctaacttgttcgtcgtgtcctctgacttctgccactggggccagcgcttccgctatagctactacgacgagtcccagggagaaatctaccgctctatagagcatctggataagatggggatgagcattatagaacaactggatcccgtgtctttttctaattatctcaagaagtaccacaatactatctgtggccgccatcccattggagtcctgctcaacgcaattacggagctgcagaagaatggtatgaatatgtccttttcttttctgaattacgcccagagctcccagtgtcgtaactggcaggattccagcgtgtcatatgccgcaggagctctcactgtgcactag

SEQ ID NO: 194482 - DNA, 903 bp, synthetic construct
  misc_feature 1..903: note = Description of Artificial Sequence: Synthetic coding sequence
  source 1..903: mol_type = other DNA
atgcccctgtggcgggccgacaagtgccaggacgtgcagagcgcctcctggcgacccaggagggccgacggcccccagctgaatgcccagttagaagggtggctcagccaggtgcagagcaccaagcgccccgcccgggcaattattgcacctcacgccggctacacctactgcggatcttgtgccgcacacgcttacaaacaagtggatccatctatcactcggaggatatttattcttggccccagtcatcacgtgcccctgagccgctgtgcgctttcatccgtggacatttataggacccccttatatgacctccgcatcgaccagaaaatttatggagagttgtggaagacagggatgttcgaaaggatgagcctccagaccgacgaggacgaacattccatcgaaatgcatctgccatataccgccaaggctatggagtcccacaaggacgagttcacaatcataccagttctcgtgggggccctctccgaatctaaggagcaagaatttggcaaattgttttcaaagtatctcgccgatccttctaatttgtttgttgtatcttcagacttctgtcactggggccagcgatttcggtattcctactatgatgagagtcaaggagaaatttatcggagcatagagcatcttgataaaatgggaatgtcaattatagagcagctcgacccggtgtctttttccaactatttgaagaaatatcataacacaatttgtgggcggcatcctataggcgtactcctgaacgccattactgaactgcaaaaaaatggcatgaatatgagtttttccttcctcaattatgcccagtcaagtcaatgccggaactggcaggacagcagtgtgtcttacgctgccggcgctcttactgtgcattag

SEQ ID NO: 194483 - DNA, 894 bp, synthetic construct
  misc_feature 1..894: note = Description of Artificial Sequence: Synthetic coding sequence
  source 1..894: mol_type = other DNA
atgagcaaccgggtggtgtgccgggaggccagccacgccggcagctggtacaccgcatccggaccccaactcaatgctcagctggaaggttggctctcccaggtgcagtctacaaaacgccccgcaagggcaattatagccccgcatgccggctatacgtactgcggctcttgtgccgctcatgcatataaacaggtcgaccccagtataactagacgcatctttattctaggaccctcccaccacgtccccctttctagatgtgcattaagctccgtcgacatctatcgaaccccactttatgatctgcgtatcgaccagaaaatttacggagaactgtggaagacaggcatgttcgaaaggatgtccctgcaaaccgatgaagatgagcacagtatcgagatgcacttaccatacactgctaaagctatggagtctcacaaagacgaattcaccattatcccagttctggtgggcgcccttagcgagtctaaggaacaggaattcggtaaacttttttccaaatacctcgccgatcctagcaacctgttcgtcgttagctccgatttttgccactggggacagcggtttcgctatagctattatgatgaatcccagggggagatctatcgcagcatcgaacacttggacaagatgggtatgtctatcatcgagcagctggatccagtaagtttttcgaactatcttaaaaaataccacaataccatttgcgggaggcacccaattggcgttctgctaaacgccatcaccgaactgcagaaaaacggcatgaacatgtcgttttcgtttctgaattatgctcaaagcagccagtgtcggaactggcaggattcttctgtcagctacgccgctggcgctttgacagtccattag

SEQ ID NO: 194484 - DNA, 825 bp, synthetic construct
  misc_feature 1..825: note = Description of Artificial Sequence: Synthetic coding sequence
  source 1..825: mol_type = other DNA
atgagcaaccgggtggtgtgccgggaggccagccacgccggcagctggtacacagccagtggaccccaactgaacgctcagctggagggctggctgtctcaggtgcagtccacgaaacgtcctgcgagggccatcatagcaccacgacgcatctttatcctcggaccttcccatcacgtcccactgagtaggtgcgctttgtcatcagttgatatttacaggacacctttatatgacttgcgcatcgatcagaagatatatggtgaactgtggaagactggaatgtttgagagaatgtctctgcaaactgacgaggacgagcactctattgagatgcacctgccttacacagcaaaagctatggagtcgcacaaagatgagttcacgatcatacccgtgctagtgggggccctgtctgagtccaaggaacaggaattcgggaagttgttctcaaagtatcttgcagatccgtcaaacctgttcgtggtgagctctgacttctgccactggggccagaggttccggtattcgtattatgacgagagccagggtgagatatatcgatcaattgagcacttagataaaatggggatgagcatcatcgaacagctcgatccggtgtcattcagcaattatctaaaaaagtatcataataccatttgcgggcgtcaccctattggagtcctacttaatgctattaccgagctgcaaaaaaacggtatgaacatgtcatttagcttcctgaactatgcacagagttcccagtgccgcaactggcaggattcctctgttagctacgcggcaggggctcttaccgtccactag

SEQ ID NO: 194485 - DNA, 63 bp, synthetic construct
  misc_feature 1..63: note = Description of Artificial Sequence: Synthetic coding sequence
  source 1..63: mol_type = other DNA
atgagcaaccgggtggtgtgccgggaggccagccacgccggcagctggtacacagcgagttag

SEQ ID NO: 194486 - DNA, 5478 bp, synthetic construct
  misc_feature 1..5478: note = Description of Artificial Sequence: Synthetic coding sequence
  source 1..5478: mol_type = other DNA
atggaggacacccaggccatcgactgggacgtggaggaggaggaggagactgaacaatccagcgagtctttaagatgcaatgtggaacccgtgggaagattacacatcttcagtggtgcacatggccctgaaaaagacttcccattacacctgggaaagaacgtggtcgggagaatgccggattgctctgtggcactaccttttccgagcatttcaaagcagcacgcagagatcgagattctggcctgggacaaggctcccattttgcgggattgcgggtctctgaacggcacccaaattctgcgacctccaaaggtcctctcacccggcgtatcgcaccggctgcgagatcaagagctgattttgttcgccgatttgctttgccagtatcacaggctcgatgtctcactcccctttgtaagtcgcgggcccctcacagtcgaggagaccccaagggttcaaggggaaacacagcctcagcgtttactgcttgcagaggacagcgaggaagaagtcgatttcctcagtgagaggcggatggtgaagaaatctcggactaccagctcctccgtaatcgttccagagagcgatgaagaaggacatagcccagtcctaggcgggctgggacccccctttgctttcaacctaaattccgacaccgacgtggaggaggggcagcaacccgccactgaagaagccagctcggccgcccgccgtggcgccacagtggaggcgaaacagagcgaagccgaggtcgttactgagattcagctcgagaaggaccagcccctggttaaggaacgagacaacgataccaaggtcaagaggggggctgggaacggagtggtgcccgctggcgttatcctggagcgttcacagccccctggcgaggattctgatactgacgtcgacgacgactcccgccctcccgggcgacccgcagaagtacacttagaaagagcccagccgttcggattcatagactcagataccgacgctgaagaggaacgtatcccagcaacacccgtggtcatccccatgaagaagcgtaaaatcttccacggggtcggcacacgaggacccggggccccgggtttggcccacctacaggagtcacaggccggttccgatactgacgttgaggaaggaaaagcacctcaggctgtccccctggaaaagtctcaggcgtctatggttataaacagcgacactgacgacgaggaggaggtgagtgccgccctgacactggcccaccttaaagaatctcagcccgctatttggaatagagatgcagaggaagacatgcctcaacgcgttgtgctcctccagcgctcacagaccaccaccgagagggacagtgatacagacgtggaggaggaggagctccctgtggagaaccgtgaagccgtgttaaaggaccataccaaaattagggccctggtgcgcgcgcacagtgagaaggaccagcccccattcggggatagcgatgacagcgtggaagctgacaaaagttcacccggtatacacttagaacgatcacaggcatctacaacggttgatataaatacccaggtggagaaggaggtgcccccggggtccgcaatcattcatattaaaaagcaccaggtctccgttgagggaacaaatcagacagacgtaaaggccgtcggcggccccgccaagctgctcgtggtcagtctcgaagaagcttggcccctgcatggcgactgcgagaccgacgctgaagaaggaacctcgctgacggcctcagtggtcgctgacgttaggaaatcacagctacctgctgaaggagatgccggagctgagtgggccgcagccgtacttaagcaggaaagggctcacgaagtcggagcccagggcggtccccccgtcgcccaggtcgagcaagatctacctatctccagggagaacctcacggacctggtagtcgatacagacacactgggggagtctactcaaccccagagggaaggagcccaagttcctacaggacgggagagagagcagcacgtgggcgggactaaggatagtgaagataactatggagacagcgaggacctcgacctgcaggccacccagtgcttccttgaaaaccagggcttggaggctgttcaatccatggaggacgaacctacccaagcatttatgctgactccgccccaggagttaggccccagtcactgcagttttcagaccaccggccttcttaactgcaaaatgccccccgccgagaaggcttcacggattagagctgccgaaaaagttagtcgaggagatcaagagagcccggacgcctgtctgcctcccacagtccctgaggctcccgctccccctcagaagcccttgaacagccagtcgcagaaacacctggccccgcccccgcttctgtcacccctgctcccgagcattaaaccgacagtccgcaagactagacaagacggcagtcaggaagcacccgaagcccctttgagctccgagttggaaccattccacccaaagcccaaaattcggacacgcaagtctagcagaatgacaccgttccctgccacctcagcagctcccgagccccacccttctacctccaccgctcaacctgtcacccctaaaccaaccagccaggcaacacgaagccgaacaaacaggtcatccgtgaaaacccctgaaccggttgtccctaccgcccctgaactccagccatctacttccaccgaccagccagtcacatctgagccgacatctcaggtgacgcgcggaaggaagtcccgctcttcagtgaagactcctgaaactgttgtgccaactgctttggagctacagcccagcacatctactgaccgtcctgtgacaagcgaaccgacctcacaagctactcgcggaaggaagaacagaagctcggtcaagacccctgagccagtcgtccctacagctcctgaattgcaacctagcacatctacagatcagccagtgacatctgaacctacgtatcaagccaccagggggcgcaagaatcgaagcagcgtaaaaaccccagagcccgtggtgccaacagcaccagaattgagaccgtctactagcaccgaccgaccagtcacccccaaaccaactagtagaaccactcgttctaggaccaacatgtcatccgtcaaaacacctgaaacggtcgtgcctacagcccctgagctgcagatctcaacctctacggatcagcctgtcactccaaaaccaacctcaaggaccacaagatcaaggacgaatatgtctagcgttaaaaaccccgagtccacagttcctattgctcctgagctgcctccctctaccagcacggagcagccggtaaccccagaacccacatcccgtgcaacgaggggtaggaagaacagatcttcaggcaaaaccccagagacgctggtgcctactgcccctaagctggagcctagtacatcaactgaccaacccgtgactccagagccgacctcacaggccacacggggaagaacgaacagatcaagcgtgaaaactcctgagaccgttgttcccaccgctcccgagttacagccttccacctctacggaccaacctgtcacacccgagcccacgtctcaagctactcgtggaagaactgaccggtcctcagtcaaaactcctgaaacagtggtacctaccgcgccagagctccaagcctcggccagcaccgaccagccagttacctcagaacctacaagtcggacaacaagaggccggaaaaataggtcttctgtgaagacccctgaaacggtggttccagctgccccggaactccagcccagtacgagcactgatcagcccgttacccctgagccaacatcgcgcgctacgagggggcgcacgaaccgaagctcagtgaagactccagagtcaattgtgcccatcgcaccagagttgcagccgagcacctcaaggaatcaactggtgaccccagagcctacctcaagggccacgaggtgccgaaccaatcggtctagtgtgaaaacacctgaacctgtggtgccaacagcacctgaaccccatccgaccacaagtaccgaccagccagtcacaccaaagctgacctctcgcgctacccgacggaaaaccaatcggtccagtgtcaagactcccaagccggtggagcccgcagcttctgatctcgaaccattcactcctaccgaccagagcgtcacccctgaggccatcgcccaaggtggtcagtccaagaccctgcgctcttccacggtgagagccatgcccgtccctacaacaccggaattccagagtcctgttaccaccgatcagccgatttcccccgaaccaatcacacagccctcttgtattaaacgccagagggctgctgggaatcccgggtcacttgctgcccccatagaccacaagccttgctccgccccacttgaaccgaaatctcaggcaagtagaaatcagaggtggggtgccgtcagagctgccgagtccctcactgccatccccgaacccgcatcccctcagctgttggagacacccatccacgcctcgcaaattcaaaaggtggaacctgctggtaggtcccgttttacacccgagctgcaacctaaggccagccagagccgaaaacgttccctggctaccatggacagtccaccacaccagaagcagcctcagcggggcgaggtgtctcagaagactgtgatcattaaagaggaagaggaggataccgccgaaaaacccgggaaggaagaagacgtggtgacacctaaaccaggaaaaaggaagagggatcaggccgaggaagaacctaaccgtataccgagtaggagtctgcggaggactaaactgaatcaagaaagcacagcacccaaagtgctgtttaccggcgtagttgatgctaggggcgaacgtgctgtgctggctctcggcggcagtctggcgggatctgcggctgaggcttctcacttggttaccgaccggatcagaaggacagtgaagttcctgtgtgcgctcggacgaggaattcccatcttaagcctggattggctgcaccagagtaggaaggccgggttctttctacccccagacgaatacgtggtgactgacccggagcaagagaagaattttgggtttagtttgcaggacgcactatcacgcgcgcgcgagcgcaggctgctggagggatacgaaatctatgtgacacctggcgttcagccaccacccccacagatgggggaaatcatatcctgttgtggggggacatacctgccctctatgcccaggtcatataagccgcagagagtggttataacatgcccccaagacttccctcactgtagcatacctctcagagttggcctgcccctcttgtctccagagtttctgctgactggtgtccttaagcaggaggccaaacccgaggcctttgttctgagcccactggagatgtcctctacatag

SEQ ID NO: 194487 - DNA, 6270 bp, synthetic construct
  misc_feature 1..6270: note = Description of Artificial Sequence: Synthetic coding sequence
  source 1..6270: mol_type = other DNA
atggaggacacccaggccatcgactgggacgtggaggaggaggaggagacggaacagtcaagcgagtcacttcgttgcaatgtcgagcctgtgggacgcctccacatattttctggagcacatgggcctgagaaggacttcccactccacctgggtaaaaatgtggtggggagaatgcctgactgttccgtcgctcttccgttcccttccatctctaaacagcatgctgaaatagagattctggcatgggataaggcccccattttgagagattgcgggtctctgaacggaacgcagatcctgcgacccccaaaggtgctttcccccggtgtgagccacagactcagagaccaggagctgatcctcttcgcagatcttttgtgccagtaccaccgcctggacgtctccctcccctttgtttccaggggccccctgaccgtggaagagactccaagagtgcagggagaaacccaaccccagagactcttgctggcggaggattcagaggaggaagtagattttctgtcagaacgccgcatggtcaagaagagtaggacaaccagctcctcagttattgtgccagagagcgatgaggaaggccattcgccagtgctgggggggttgggtccaccctttgccttcaatctcaattccgatacagatgtcgaagagggccagcagccagcaacggaagaagccagctctgctgcgagacgcggagctaccgtggaagcgaaacagagcgaggccgaggtcgtaacggaaattcagctggagaaggaccagcccttggttaaagagcgagataatgatacaaaggtcaagcgcggcgctggcaacggggtcgtgccggcgggcgtgatcctggagaggagtcaacctccaggcgaagactccgatactgatgtagatgatgactctaggcctcctgggaggcctgcagaagtccacttggagcgtgcccaaccctttggttttatcgattccgacacggacgccgaggaggaaaggatacctgcgacgcccgtggtgattccaatgaaaaagcgcaaaatttttcacggggtgggtactaggggacctggagccccgggattagctcacctgcaggagagtcaggccggatctgacaccgacgttgaagaaggaaaagcacctcaggcggtccctctcgagaagtctcaagctagtatggtcattaattcagatacagacgacgaagaagaagtctctgcggctctgactctcgcccaccttaaggagtcccagccagcaatatggaacagggatgccgaggaagacatgccacagagggtggttctgcttcaaagatctcagactaccactgaaagggatagcgatacagacgtagaggaggaggaactgccagtggagaacagagaggccgtgttgaaggatcacacaaagattagggctttggtgcgcgcccattcagagaaggaccagcccccatttggggactcagatgacagcgtggaagccgacaaatcgagtccgggaatccacctagagcgctcccaagcctctactactgtggatatcaacacccaggtcgagaaagaagtgcctccagggtcagcaattattcacatcaagaaacatcaggtgtcagttgaaggcacaaaccagaccgatgtcaaagctgttggcggcccagccaaattacttgtggtgtcccttgaagaggcctggcctctgcatggtgattgtgagactgacgccgaagagggaacatcccttactgcctccgtggtcgcagacgtcagaaagtctcagctgcccgccgaaggggatgctggtgccgaatgggcagctgccgttttgaagcaggaacgtgcccatgaggtgggagctcagggcggcccccctgttgcccaggtggagcaggatctcccaatcagccgcgaaaatttaacagatctagtcgtggacactgatacactgggcgaaagcacccagccccagcgggagggcgcgcaagttcccactggcagagaacgtgagcagcatgtgggcggcacaaaggacagcgaagataactacggagattctgaggatctcgatttgcaggccacccagtgctttctggaaaaccaaggcctcgaagccgtgcagtctatggaggatgaacccacacaggcattcatgctaacaccaccccaggagctgggtcctagccattgctcatttcagactactggtacgctggatgagccatgggaggtgctcgccactcagcctttttgcctgcgcgagagcgaggattccgagacacagccattcgacacgcatttggaggcatacggcccatgcctctcccctccacgcgccatcccaggagaccagcatccagaaagccctgtccatacggaaccaatgggtattcaaggcaggggtcggcagacggtcgacaaggtgatgggtatacctaaagaaaccgctgaaagggtgggacccgaaagagggccactggaacgcgagaccgagaaattgctgcccgaacgacaaacggacgtgaccggagaggaggagctcacaaaaggcaagcaggaccgagagcaaaagcagctcctggccagagacacccagagacaggagtccgacaagaatggcgagtctgcttcacccgaaagagatcgcgaatccctgaaggtagaaatcgagaccagcgaagagattcaggagaagcaggtccaaaagcagacactgccgagcaaagcttttgagcgcgaggtggagcgaccagttgcaaaccgcgaatgtgacccagcagaactggaggagaaggtgccaaaagtgattctggagcgagatacacagcggggagaaccagaaggcggctcccaggaccaaaaaggccaggccagcagtcccacaccagagcccggcgtaggcgcaggcgacctgcctggccctacctccgctccagttccttcaggctcccagtctggggggaggggctcacccgtgagtcctcgccggcatcagaagggcctcttaaactgcaagatgccgccagccgagaaggcctccagaatccgggcagccgaaaaagtgagtcgaggcgaccaggagtctccagatgcctgtctgcctccaacagtacccgaggctcccgctcccccccagaaaccgctgaactcccagtcccaaaaacatctggccccaccacctctgctgtctccactcctgccatcaataaaacccaccgtacgaaagaccaggcaggatggttcccaagaggcgcctgaggctcccctgtcctcagaactggaacccttccacccgaagcctaagattagaaccagaaaaagctctaggatgacccctttccccgcaactagtgccgccccagaaccccacccatccacttccaccgcccagccagtcacaccaaagccaacatctcaggccacacggagccggaccaatcggtcatcagtgaagacgcccgagccggtagtccctactgctcctgagcttcagccttccaccagcaccgatcagccagtgacatcagaacccacttctcaggtgacgagggggcggaaaagtcgttcatctgttaagacaccggagaccgttgttcccaccgctctagagcttcagccctcaacaagcacggatcgccccgtgacttctgaaccaaccagtcaggctacccggggcagaaaaaatcgctcctccgtgaagaccccggagcctgtggtccctactgctccggaattgcagccgtccacatccactgaccagccagtcacctctgagccaacgtaccaagcaaccagagggaggaaaaaccgcagctccgtgaagaccccggagcccgtggtgccgacagctcccgagcttcgaccaagcacatccaccgaccgccctgttacacctaaacccacttcacggacaacgagaagtcgaacaaatatgtcttcggtgaaaacaccagaaacagtagtacccacagcacccgagctgcagattagtacctccactgaccagcccgttacgcctaaacccacctctagaaccaccaggtcccggaccaacatgtcatcagtgaagaaccctgaaagtaccgtgccgatcgcacccgagctccccccctctacctcgactgaacagcctgtcacgccagaaccaacctctcgggccacccggggcagaaaaaataggagttctgggaagactcctgaaaccttggtacccaccgctcccaagctggagccaagcacctctaccgatcagcccgttaccccagagccgacttcccaagctacaagggggagaacaaatagaagctcagtaaaaacccccgagaccgtggtccctaccgcccctgagctccagcccagtaccagtaccgaccaaccagtgactcccgaaccaaccagccaggccacccgcggcagaaccgataggtcctcggtcaaaacccctgagacagtggtccccaccgctccggaactccaggcatccgcaagcaccgaccagccagtcacatcagagcctacatcgagaacaactagggggagaaagaaccgtagctctgtcaagactccagagactgttgttcctgccgcccctgaattgcaaccttctacaagtaccgatcagcccgtgactcccgagcctacgtcgagagccaccaggggacggaccaatcgaagcagcgtcaaaacacctgagtctattgtgccaattgctccggagctgcagccatcaacgagcagaaatcagctggtcacccccgaacccacttcccgcgcaacccggtgtcggacaaaccggagcagtgtgaagacgccagagcccgtggtgcccaccgcccctgaacctcaccctacaacatctacagatcagcctgtgacccctaagctgacatcccgggccacgaggcgtaagactaaccgctccagcgttaagacgcccaaaccagttgaaccagcagcaagtgacctggaaccttttacacctacagaccagagtgtaactccagaagcaattgcccagggggggcagagcaagaccctccgtagctccacggtacgagccatgccagtgcccaccacgcccgagtttcagtcccccgttactactgaccaaccaatttccccggagccaatcacacaacctagttgcataaagcgccagagagctgcaggcaatcctggatcgctggccgcacccattgaccacaaaccgtgctcggcacccctggagcccaaatcacaagccagtcgtaaccagcggtggggtgctgttagagcggctgagtccttgactgcaatccccgagcctgcttccccccagttgttggagactccaattcacgccagtcagatccagaaagtcgaacccgccggtcgctccaggtttacccctgagctacagccaaaggcctcgcagtctagaaaaagatctctcgcaacaatggattccccaccacaccaaaagcaacctcagcggggggaggtgagccagaagaccgttattatcaaggaggaggaggaagacacagccgagaagccaggcaaggaggaggatgttgtgacaccgaagcctgggaagagaaaacgagatcaggctgaggaagagcctaacagaataccctcccgttctttgaggcggaccaaacttaatcaagagtctaccgcacccaaggttttgttcacaggcgtggtcgatgcaaggggggagcgagcagtgttggctctcggaggcagcctcgccgggagtgccgctgaggcttcccacctggtcaccgatcggatccggcgcacagtcaagttcctatgcgctttaggtagagggataccaatcctttccttggattggttgcaccagagtagaaaggcaggcttctttctgcctccagatgagtatgtggtgaccgaccccgaacaggaaaaaaacttcggcttctcactccaggacgctttgagccgggctagagagagacggctcctggaagggtatgagatctacgtgaccccaggagtccaaccccctccacctcagatgggtgaaatcatctcctgttgcgggggcacgtacctgcccagcatgccaaggagctacaagccacagagggtcgtaatcacctgtccccaggatttcccgcattgttctattcctctccgcgtgggactgcctctgctatctccggaatttctgctgactggagtccttaaacaggaagcaaagcccgaagcctttgtactgagtcccctggagatgtcaagtacatag

SEQ ID NO: 194488 - DNA, 489 bp, synthetic construct
  misc_feature 1..489: note = Description of Artificial Sequence: Synthetic coding sequence
  source 1..489: mol_type = other DNA
atggaggacacccaggccatcgactgggacgtggaggaggaggaggaaaccgagcagtcatcagagtctctgcggtgtaatgttgagcccgttggccggttacatatttttagcggggcgcatgggcctgagaaggattttcctctacacctgggcaagaatgtggtggggaggatgcctgactgttcggtcgcactgccgttcccttctattagtaagcagcatgctgaaatcgaaattctcgcatgggacaaagcccctatcttacgggattgtggctcactgaacggcacccaaatccttcggcccccaaaagttctcagccctggcgtgagtcatcgattacgggaccaggagctcattttgtttgccgaccttctgtgccagtaccatcggctcgatgttagcctgcctttcgtgagtagaggacctttaaccgtcgaagagacccccagagttcagggggaaacacagcctcagagattgtag

SEQ ID NO: 194489 - DNA, 342 bp, synthetic construct
  misc_feature 1..342: note = Description of Artificial Sequence: Synthetic coding sequence
  source 1..342: mol_type = other DNA
atggaggacacccaggccatcgactgggacgtggaggaggaggaggagactgagcagtctagcgagagtctgcggtgtaatgtggagccagtaggtcggctccacatattcagcggggcccatggtcccgaaaaagacttcccacttcatttgggaaaaaatgtcgttggcaggatgcccgattgctcagtagctctgcccttcccatcaatttcaaagcaacacgccgaaatagagatcctggcttgggacaaggcacccatcctgcgcgattgtggatctttaaacggaactcagattctgaggcccccgaaggtcctttctcctggagtgagtcattag

SEQ ID NO: 194490 - DNA, 384 bp, synthetic construct
  misc_feature 1..384: note = Description of Artificial Sequence: Synthetic coding sequence
  source 1..384: mol_type = other DNA
atggaggacacccaggccatcgactgggacgtggaggaggaggaggagacagagcagtcctctgagtctctgaggtgcaatgtcgagcccgtgggcagactccacatcttttcgggcgcgcatggacccgaaaaagacttccccttgcacctaggcaagaatgtagtaggcaggatgccagattgttcagtggctctcccattcccctccatcagcaagcagcacgccgagatagagatcctggcttgggacaaagcgcctatcctaagggactgcggatcactcaatgggactcaaattctgcgcccacctaaagtgcttagccctggggtcagccacagacttagagaccaagagctcatcctgttcgcagatctgctgtag

SEQ ID NO: 194491 - DNA, 489 bp, synthetic construct
  misc_feature 1..489: note = Description of Artificial Sequence: Synthetic coding sequence
  source 1..489: mol_type = other DNA
atggaggacacccaggccatcgactgggacgtggaggaggaggaggagaccgagcaatcgtctgaaagcctcaggtgcaatgtcgaaccagtaggaagattacatatcttctctggggcccacggcccggagaaagattttcccctgcacctcgggaagaacgtggtgggacgcatgcccgattgcagcgtcgccctacctttcccctcaatctcaaagcaacacgccgaaattgagatcttggcttgggataaggctcccatattgcgcgactgcgggagtttgaatgggacccaaatcctcaggccccctaaggtcctctctcccggggtgtctcaccgcctgagggatcaggagctgatcctcttcgccgacttgctgtgccagtaccatcgtctcgacgtgagcctgccattcgtgtctcgcggcccactaacagtggaagagacacccagggttcagggagaaactcagccccagaggctttag

SEQ ID NO: 194492 - DNA, 921 bp, synthetic construct
  misc_feature 1..921: note = Description of Artificial Sequence: Synthetic coding sequence
  source 1..921: mol_type = other DNA
tgacacgtgggcggcaccaaggacagcgaggacaactacggcgactcggaagatcttgaccttcaggccacacagtgttttctggagaaccagggcctggaagccgtgcagtctatggaagacgagccaacacaggcctttatgctcacaccaccccaggagctgggaccctcacactgtagcttccagacaactggtctactgaactgtaaaatgcctcccgccgagaaggcaagcagaattagagctgctgaaaaagtctcccgaggcgaccaagagtcaccagacgcgtgtctgcctcctacagtccccgaggcaccagcacctccccagaagcctttaaacagtcaatctcagaagcacctcgccccgccccctctgctctcacccttgctgccctccattaagccaaccgtccgaaagactcggcaggatggaagccaggaggcacctgaagctccccttagtagcgaactcgagccttttcacccgaagccaaagattcgcacccgcaagagctcaaggatgacgcctttccccgccaccagcgcagcaccagaaccacacccttcaacgtccactgcacagcctgttactcccaaacccacctcgcaggcgacccgttcccgaaccaatagatcttcagtgaagactccagagcccgtggttcctacagctcctgagcttcagccatccacaagcacggaccagccggtgacaagcgagccaaccagtcaggtaacaaggggaagaaagagccggtccagcgtgaaaactcctgaaaccgttgtaccaactgccctggagctccaaccgtccacttccacggacagacccgttacaagcgagcccaccagccaggcaactcgtggtagaaagaataggagctccgtgaagacacctgaacctgtcgtgccatag

SEQ ID NO: 194493 - DNA, 384 bp, synthetic construct
  misc_feature 1..384: note = Description of Artificial Sequence: Synthetic coding sequence
  source 1..384: mol_type = other DNA
atggaggacacccaggccatcgactgggacgtggaggaggaggaggaaacagagcagagctcagaaagccttagatgcaatgtggaacccgtcggaaggctgcacatcttctccggggcccacggccctgagaaggacttccccctccaccttggcaaaaacgtagttgggcggatgcctgattgcagtgtagcactgccattcccaagcataagtaagcagcacgcggaaattgagatccttgcatgggacaaggcccctatcctacgtgactgtggtagtttgaacggcacacagatcctgcggcccccgaaagtcctctcacctggcgtatcccatcgactgcgggaccaggaactgattttgttcgccgacctcctgtag

SEQ ID NO: 194494 - DNA, 921 bp, synthetic construct
  misc_feature 1..921: note = Description of Artificial Sequence: Synthetic coding sequence
  source 1..921: mol_type = other DNA
tgacacgtgggcggcaccaaggacagcgaggacaactacggcgactctgaggacctcgatctacaggccacccagtgctttctggagaatcagggattagaggcagtgcagagcatggaagacgagccaacgcaggcgttcatgctcacgccaccccaagaactgggtccaagtcactgctcgttccagactactggacttttgaactgcaagatgcctccagccgagaaggcctccagaattagggccgcggagaaagtgtctcggggcgaccaggaatctcccgatgcctgcctgcctcccacagtacctgaagctccggctccacctcagaagcctctgaattctcaaagtcagaaacatctcgctccaccaccactactgtcccctctcctgccttccattaagccaacagtgcgcaagacaagacaggacggtagccaggaagcccccgaggcaccactttccagcgagctggagccttttcaccctaaaccaaagattcggactaggaaatctagcaggatgactcctttcccggctacctccgcagccccagaacctcacccctcaacttcaactgcccaaccagtgacccctaagcccacgtcccaggccactagatctagaaccaatcgctcctctgtaaagacgcccgagcccgtggtccctacagcgccggagctgcagccatccacaagtaccgatcagcctgtgacaagcgagccgacctcccaggttactagggggagaaaatcccggagctcagtgaaaacccccgaaaccgtggtgccaactgctctagaattgcaacccagtacaagtaccgaccgaccagttacatctgaacctacctcccaggccactagggggagaaagaaccggagttcagtcaagactcctgaaccggtggtaccctag

SEQ ID NO: 194495 - DNA, 921 bp, synthetic construct
  misc_feature 1..921: note = Description of Artificial Sequence: Synthetic coding sequence
  source 1..921: mol_type = other DNA
tgacacgtgggcggcaccaaggacagcgaggacaactacggcgactcagaggatctggacctgcaggccacccagtgttttctcgaaaatcaggggctggaagccgtacagagcatggaagacgaacctacacaggccttcatgcttacccccccacaagagctcggaccctcacactgctcattccagacaaccggattactgaactgcaaaatgccaccagcagaaaaggcatcacgaattcgtgccgctgagaaagtgtccagaggggaccaggaaagccctgatgcttgcctcccccctaccgtacctgaagctccagcacccccccaaaaaccgctaaactctcagagccaaaaacacttggctcctccgccgctccttagccctctgctgcccagcatcaagcccaccgtgaggaaaacgaggcaggacgggtctcaggaagccccggaggcgcctctgtcatctgaactggaacccttccacccaaagccaaaaattagaactcgaaagtctagtagaatgacgcccttccctgccacttcggccgccccagaaccgcatcccagcacctctactgcccaacccgtaacacctaaaccaacatctcaggccaccagatcacgcactaaccggtcctcagttaaaacacctgaacctgtggttcctacagctcctgagctacagcctagtacttccaccgatcagcctgtgacaagcgagccaacatcccaggtcacccgggggcgcaagagcaggagtagcgtcaagacccctgaaaccgtcgttccaaccgccttggagctccagcccagcacatcgacagaccggccagtgacgtccgagcccacgtctcaagccacccgtggtagaaagaatcgctcatccgtgaaaacgcctgagccagtggttccatag

SEQ ID NO: 194496 - DNA, 6270 bp, synthetic construct
  misc_feature 1..6270: note = Description of Artificial Sequence: Synthetic coding sequence
  source 1..6270: mol_type = other DNA
atggaggacacccaggccatcgactgggacgtggaggaggaggaggaaactgaacagtcctcagagtctctgaggtgcaatgtggaacccgtcgggcgtttgcatatcttctccggcgcacatggccccgagaaggattttcccttacacctgggcaagaatgtagtaggccgcatgccagattgttcagtggcgttaccctttcctagtatctcaaaacagcacgccgagattgaaatactagcatgggacaaggccccaattctgagggactgtggatccttgaatggaacacagatactgcgtccccctaaggtcttatctccaggggtttcccatagattacgggaccaggagctaatccttttcgccgacttactgtgtcagtatcacaggctggatgtcagtctgccttttgtatctcgcggccctctcactgttgaggagacacccagagtccagggtgagacccagccgcagcgtctgctattggctgaagacagcgaggaagaggtcgacttcttgtccgaaagaagaatggtgaaaaagtcgcgcaccacatcctccagtgttatcgtgcctgaatctgacgaagaagggcattcaccggtgctagggggcctgggtccacccttcgctttcaacctcaattctgacacagacgtggaggaagggcagcaaccagcaactgaggaagcgagtagtgcagcccggagaggtgccactgtggaagctaaacaatccgaggccgaggtagtgaccgagatccagctggagaaggatcagcccctcgtgaaggagcgggataatgacacaaaggtaaaacgcggggcaggaaatggcgtcgtcccggccggagtgattctcgagaggagccagcctcccggagaggactccgatacagatgttgacgatgactcaagacctcctggccggcccgccgaggtgcacctcgaacgcgctcaaccatttggatttatcgatagcgatacggacgctgaggaggagcggataccagcaacgccagtcgtcattccgatgaagaagcgaaagatctttcacggggtcggcacccgagggccaggggcacctgggctcgcgcacctccaggaatcccaagccgggtctgacacagacgtggaagaaggcaaggcgccacaggccgtgcccctggagaaatcacaggcgtccatggtgataaattccgacaccgatgacgaggaggaggtttccgccgctttgacattggcccacctgaaagaatcccaaccagccatatggaatcgggatgctgaggaagacatgccgcaaagagtggttctactacaaaggtctcaaacaacaactgaacgagatagtgacacagacgtcgaggaggaagaactgcccgtcgagaacagagaagctgtgctgaaagatcacactaagattagagctcttgtgagagcacattcggagaaagaccaacctccattcggggatagcgacgactctgtggaggccgacaaatcaagcccaggcattcacctggagaggtcacaggcctccactactgtcgatatcaatacccaggttgagaaagaggtgccacctgggtctgccataatacatattaagaaacaccaagtttccgttgaaggaacaaatcaaacagacgtgaaggcagtgggcggacccgctaaattgctagtggtcagtttagaggaggcctggcccctccacggcgattgcgaaacggacgctgaagagggcacctcacttactgcctccgtcgtggcagatgtgcggaaatcacagttacctgccgagggcgacgccggggctgagtgggcagccgccgtgttgaaacaggagcgcgctcacgaagtaggagcacaaggtggtccacccgtggcacaggttgaacaggacctgcctatcagtcgggagaatttgacagacctggtagtggataccgacacattgggtgagagcactcagcctcaacgggagggagcccaggtgcctacaggaagggaaagggagcaacacgtgggaggaaccaaagattcagaagataactacggagactccgaggatttggaccttcaggccacacaatgtttccttgaaaaccaggggctggaagccgtacagagtatggaggacgagccgacacaagcttttatgctcacacctccccaagaacttggaccatctcactgctccttccagacaaccggcacattggatgagccatgggaggtgttggctactcaaccattttgcctgcgcgagtccgaggactctgaaacccagccattcgacacacacctggaggcctatggaccctgcctctcgcctccacgggctattccaggggaccaacatcctgagtctccagttcacactgagccaatggggattcaggggcggggccgccagactgtggacaaggtcatggggatccccaaggagactgccgaacgggtgggaccggaacgaggccccctggaaagagaaaccgagaaactgcttcctgagcgtcaaacagatgtcaccggagaggaggaattgactaaaggcaagcaagatagggaacaaaagcagttattagccagggatacacaacggcaagagagcgacaagaatggggagtcggccagtccggaacgggatcgggaatctctgaaagtcgagattgaaacctcagaggaaattcaggaaaagcaagtgcaaaagcagactctcccctctaaggcatttgaaagggaggtggaacgccctgtcgcaaacagagagtgcgatcctgccgaactggaagaaaaagtgcccaaggtgattctcgagcgagacactcagcgtggagagccggaaggtgggtcccaagatcagaaagggcaggcgagttccccaactccagagcctggggtgggtgccggtgatctgccaggcccaacaagtgcacctgttcccagcggttcacagtctggggggcgggggagccccgtttctcctagaaggcaccagaaaggcctgttgaactgtaaaatgccccccgctgaaaaggccagtcggatacgggctgccgaaaaggtgagtcgaggcgatcaggaatcccccgacgcatgcctgccccccacagttccagaggctcccgccccaccgcagaagccccttaacagccagtcacagaagcatcttgctcctccgccattactgtctccattgttgccttccataaaaccaacagtgaggaagacacgccaggacggcagccaagaggccccagaggcccctctgagcagtgaactcgaaccttttcaccctaagccaaagattcgcacacgaaagtcttcaaggatgaccccattcccggccaccagcgccgcccccgaacctcatccgagtactagtactgctcagcctgtgacgcctaaacctactagccaggccaccaggagtcgaaccaatcgctcttccgtcaagacaccagagcccgtcgtgccgactgcccctgagctgcagccaagtacttcaacggatcagcccgtcactagcgaaccgacgtcacaggtgacacgaggtcgcaagagccgcagttctgtgaagacccccgaaaccgtagtacctactgccttggagctgcagccatctacctcgaccgatagacctgtgacatcagagcccacatctcaggccactagagggcgcaagaaccggagctccgttaagacaccagaacccgttgttccgaccgcacccgaactgcagccatccacctccactgatcagcctgtgacatctgaacctacataccaggctaccagggggcggaaaaacaggtcaagtgtgaaaacccctgagccggtggtccccactgcgcccgagttgcgcccgagcaccagcacagatcgacctgtcacccctaaacccacctcacggactacccggtcccgcactaatatgtctagcgttaaaacgcctgaaactgtagtccccactgcacccgagctccaaattagtacgtccaccgaccagccggtcactcccaagcccactagtcgcaccactcgttcacgcacaaatatgagtagcgtgaagaaccctgagtccacagtgccaattgcgcccgagctacccccctcaacatcaacagagcaaccagttactccggagccaacaagcagggcaacaagagggagaaagaacagatcgagtgggaaaacacccgagacactggtcccaacagctcctaagttggagccatccacctctacggaccagcccgtaacacctgagcctacttcgcaagctacccgcgggcggaccaatcggagttcagtcaaaacccccgagaccgtggtaccaactgcaccagaactgcagccttccacatccacagatcagccagtcacccctgagccaacctctcaggccactagagggaggacagaccgcagctccgtgaagactcctgaaacggttgtcccgacagctcccgaactacaggcaagcgcatcaacagaccaaccagtcacttccgagccaacgagtcgaactacacggggaagaaagaatcggtcttcggtcaagacccccgagacagtcgtaccggctgctcccgagttacaacccagcacaagcaccgatcagcccgtaacccctgagccgaccagccgagcgacaagagggagaacaaacaggtcctctgtcaaaaccccagaatccattgtgcctatcgcaccagaacttcagcctagcacttcaaggaatcagttggtgacccctgaacccaccagtcgggctactcggtgccgcaccaatagatccagtgtcaaaacccccgaacctgtggtcccaacggctccagagccccaccctactacatctacagatcagccagtgacccctaaacttacgagcagagctacaaggagaaaaaccaatcggtcttctgtcaaaactccaaaacctgttgagcctgcagcctccgacctggagccctttaccccaacggatcagtccgtgactcctgaggctattgcgcaggggggtcagtctaaaacgctgcgttcttctacagtccgggccatgcccgtgccaacaacaccagaattccagagcccagtgaccaccgatcagcctatcagcccggagcccattactcagccctcatgcattaagcggcagcgcgctgcaggaaatcccggctcactggcggctcctatcgaccataaaccttgctcagcaccactggaacctaagagccaggcttccaggaaccagcggtggggcgccgtccgagcagccgagagtctcacagcaatccctgaacctgctagcccacaactgctcgagacaccaatccacgcctctcagattcagaaagtggaaccagccggccggagcagattcacccccgaactacagcccaaagctagccaaagccgaaaacgcagcttggccactatggattcccctccccatcagaaacaaccccaacgcggggaagtgagccagaagacggtcatcatcaaggaggaggaagaggataccgctgaaaagcctggcaaagaagaggatgttgtgacacctaagcccggaaagcgcaagagagaccaggccgaagaggaaccaaacaggatcccaagtagaagtctcaggcgcactaagctgaatcaagagtcaacagcaccgaaggtgctgtttaccggggtggtagacgctcggggagaaagagctgtcctggcattgggaggcagccttgctggctcagccgctgaggcttctcatttggtgacagatcggatacgtcggactgtcaagttcctgtgtgccctcggcagaggtattcctattctctccttagactggttacaccaaagtagaaaggccgggtttttcctccctcctgacgaatacgtcgttactgacccagagcaggagaagaattttggattctctctgcaagacgcgctctcacgagctcgggaacgaagactcctggaaggatatgaaatatatgtcaccccaggagttcagcctccacctccccagatgggggagatcatcagctgttgtgggggcacatatctgcctagcatgcctagatcttataagccacaacgggtggtaatcacatgccctcaggacttcccccactgctcaatcccactgagggtggggttgcctctgctcagtcccgaatttttgctgacaggcgtgctgaaacaggaggcaaaaccggaggccttcgtgctgtcccccctggaaatgtcaagcacctag

SEQ ID NO: 194497 - DNA, 6270 bp, synthetic construct
  misc_feature 1..6270: note = Description of Artificial Sequence: Synthetic coding sequence
  source 1..6270: mol_type = other DNA
atggaggacacccaggccatcgactgggacgtggaggaggaggaggagaccgaacaaagtagcgagtccctacggtgtaacgttgagcccgtgggccgcctacacattttctccggcgcacacggccccgagaaagactttcccctgcatcttggtaagaatgtggtgggccggatgcccgactgctctgtcgccctgccctttccctctatttccaaacagcacgctgagatcgagatccttgcctgggacaaagctcctattctgagagactgcggctccctgaacggtacacagatactgcgccctccaaaagtacttagcccaggggtgtctcacaggctgagagaccaagagctaatattattcgctgatttgctgtgtcagtaccaccggcttgatgtatctctaccttttgtgtcgcggggtcctctgaccgttgaggaaaccccgagagtgcagggggagactcagcctcagcgcttgctgctggccgaagactctgaagaagaggtggatttcctgtctgaacgacgcatggtgaagaagtctagaacgaccagcagttcagttattgtgccagaatccgacgaagaagggcactcccccgtcctgggcggcctcggtcctcccttcgcattcaacctgaactccgatactgatgttgaagaggggcagcagccagctaccgaagaagcctcctcagccgcccggcggggagcgacagtggaagcaaagcagagtgaggcagaagttgtaactgagatccaactggagaaggatcagcccctggtaaaggagcgggataatgacaccaaagtcaaaagaggagctggtaacggagtagtccccgccggggtcattcttgagaggtcccagccccccggagaggactctgatacggatgtggacgatgattcccggccgcctggccgccctgctgaggtccacttggaacgggcacagcccttcggtttcatcgatagtgatactgacgctgaggaggaaaggattcccgccacgcccgtggtaatccccatgaagaagcgcaaaatattccacggggtggggacccgtgggcctggtgcaccaggcttagctcatttgcaggaatctcaggccgggtctgacactgacgtggaggagggaaaggcaccacaggccgtaccgctggagaagtcgcaggcttccatggtgattaactccgacaccgatgacgaagaggaggtgagcgctgctctgaccctggcccacctcaaggagagccagccagccatatggaatagggatgcggaggaggatatgcctcaaagagttgtcttgttacagcggtcccaaacaaccactgagcgggacagtgatactgatgtcgaggaggaggagctgcccgtggagaacagggaggcggtgctcaaagatcacaccaaaatccgggccctggttagggctcactctgaaaaggaccaacccccttttggcgactctgatgattctgtggaggcagataagtcttccccaggaatccacctcgagagaagccaagcatctactacagtggatatcaacacccaggtggagaaagaggttccccctggatctgccatcatacacatcaaaaaacaccaagtgtccgtcgaaggcacgaatcaaacagatgtcaaagcagtcggaggccctgcaaaactccttgtggtgtcccttgaagaggcttggcctttgcacggggactgtgagacagatgctgaggagggtacaagcttgactgccagcgttgttgctgacgttaggaagtctcagttgccggctgaaggcgacgcaggtgcagagtgggccgccgcagtgttgaaacaggaacgcgctcatgaagtaggtgctcagggcggcccccctgtcgcacaggtcgaacaggacctcccaatcagcagggaaaatctgaccgacctcgtagttgacactgacactctaggagaaagcacccaacctcagcgggagggagcacaggtaccaacaggaagggagcgtgagcagcacgtcgggggaaccaaggactcagaggacaactatggtgacagtgaagacctggatctgcaggccactcaatgttttctggagaaccagggccttgaagctgttcagagcatggaggacgaacccacacaggcttttatgctcacccctccacaggaactggggcccagccactgctccttccagaccacggggactcttgacgagccttgggaggtcctggcaactcaacccttttgccttcgcgaatctgaggattcagaaactcaaccgtttgatacacacctcgaagcgtacggtccctgcctctcgccgcctcgcgctatccctggagatcaacatccggaaagccctgtccatactgagcctatgggaatccaggggcgggggagacaaacagtggacaaagtgatgggcatcccgaaggaaactgcagaacgggttggccctgaacgggggccgctagagcgggagactgaaaagctgctgcccgagagacagaccgatgtaacgggagaggaggagctgaccaaggggaagcaggatcgcgaacagaaacagcttttggcaagggacacccagcgtcaggaaagtgacaagaacggagaaagcgccagccctgaacgcgatcgggagagtcttaaagttgaaattgagacaagcgaggagatccaggaaaagcaggtgcagaaacagactctgccttcaaaggcttttgaacgagaggtggagagacccgtggccaaccgtgagtgtgaccctgccgagctggaagagaaagtccccaaagtgattttagaacgggacactcaaaggggagagccagagggcgggtcccaggatcagaaaggtcaagccagttcaccaacacctgaacccggcgtgggcgctggggatctccccggaccaacttccgctcctgtgccctcaggctcccagtctggcggccgtgggagccctgtgagtcctcgtagacaccaaaagggcctgctgaactgtaagatgccacccgctgagaaagcttctagaatacgcgccgcagaaaaagtgtccaggggagatcaggagtcccccgatgcatgtctgccccctactgtacccgaggcccctgcaccaccccaaaagcctctgaactcccagagccaaaagcacttggcacctccaccgttgctctcccccctgcttccgtccattaaaccaactgtgagaaaaactaggcaggatggatcacaggaggccccagaggctcctttgtcaagcgaattggaacctttccacccaaagcccaaaatcagaacccgcaagagttctcggatgaccccattccctgccacttctgcagcccccgagcctcaccctagcacctccaccgcacagcccgtgaccccaaagcctacttctcaagctacgcggagccggactaataggtcaagcgttaaaaccccagagccggtggtgcccaccgctcccgaactacaaccgagtacctcaacggaccaacccgtcaccagcgagcccacatcgcaggtgaccagagggagaaagagtcggtcctctgtaaagactccagagaccgtggtcccgacagcacttgaactgcagccttctacaagtacggaccggcccgttacgtcggagcccaccagccaggcaactcgaggccgaaagaataggagcagtgtaaagactccagaacccgtcgtaccaaccgcgcctgaactccagccaagtacctccaccgatcagccagtcacctcagaacccacatatcaggcaacacgcggaaggaaaaaccggagttccgtgaagactcccgagcccgtggtacccaccgcccccgaactaaggccctccactagcaccgaccgcccagtcacccctaaacctacatctcgtaccactcgatcacggacaaatatgtccagcgtcaaaaccccggaaactgtcgttccgacagcaccggaactccagatttcaacaagcacggaccaaccggttacacccaagcctacctccaggaccaccagatccagaacaaatatgagttcagtgaagaatcctgagtccacagttcctatcgctcctgaactgccaccgtctacatctactgaacaaccggtgaccccggaacctacaagccgggcgactagaggacgcaagaatcgctcttccggcaagacccccgagacccttgttccaacggctcccaaattagagccctctacatccaccgatcaacctgtgacacccgaaccgacatcacaggctacaaggggcaggaccaatcgctccagcgttaagactcctgaaacagtagttccgactgcccccgaactccagccctccacatccactgatcaacctgtaacaccagaaccgactagtcaggctacacgcgggcggacggacaggagcagcgttaaaaccccagaaactgtggtgcccacggctccagagctgcaagcgtccgccagtactgaccaacccgtcacaagtgaacctacatcccgaactaccaggggtagaaaaaatcgatcttcagtgaaaaccccagagacagtggtaccagccgctccagagttgcagcctagcacaagcacagaccagcctgtcactccagaacctacctccagagctaccaggggtcgaaccaacagatcttcagtcaagacacctgagtccatcgtgcctatagcgccagagctgcaaccctctacctctaggaaccagctagtcactcctgaaccaaccagcagagccacccggtgcaggactaatcgttctagcgttaagactcccgaacctgtcgtaccgacggcacctgagccacaccctacaacctccaccgatcagcctgttaccccgaaattgacaagcagagccaccaggcggaagactaatcggtctagcgtgaagactcccaagccggtagaaccagccgcctccgaccttgagcctttcacgccaacagaccaaagcgtgaccccagaagctatcgcccaagggggccagtcaaagaccctgcgatcgtctaccgtgcgcgccatgccagtacctactacaccggaattccagtcccctgttaccactgatcaacccatatccccagaacccatcacccagccatcttgcatcaagcggcagcgcgccgccggtaatcccggctccctggccgcacccatcgaccataagccatgctccgcaccactggagcccaagtcacaggcatctcgcaaccagaggtggggcgctgtcagagctgcagagtcattgacagccattccagaacccgctagcccacagctcctggaaacgccgatacatgcttctcaaatccagaaagtcgagcctgccggacggtcacgcttcacacccgaactccagccaaaagccagtcaatcaaggaaacgctcacttgcaacaatggatagtccgcctcaccagaagcagccgcagaggggagaagtcagtcaaaaaactgttataataaaagaagaagaagaagacacagccgaaaaacccggcaaagaagaagacgtagtgacccctaaaccaggcaagaggaagcgggaccaggcagaggaggagccgaacagaattccatcccggagtcttaggcggaccaaactgaaccaagaaagtacagccccaaaagttctgttcaccggagtggttgacgcaaggggcgagcgggcggtgctagcactcggcggcagcttagcagggtcagctgccgaggcgtctcatctggtaacagataggatcaggcgcactgtgaagttcctctgtgcccttggtcgcggcatccccattctgtcactcgactggcttcaccagtctaggaaggctggattcttcctcccccctgatgaatacgtcgtcaccgaccccgagcaggaaaaaaacttcggctttagtctccaggatgccctgtctagggctcgcgaacgccggctcctggagggttacgagatttacgtgactccgggtgtccaaccccccccaccgcagatgggggagataatttcttgttgtggggggacttacctgccctctatgcccaggtcctacaagccccaacgggtcgtgatcacctgcccacaggactttccacattgtagcattcccttgcgtgtgggactgcccctcctgagtcccgaatttctgctgactggagtgttgaagcaggaggcaaaaccagaggcctttgtcttgagccccctggagatgtccagtacttag

SEQ ID NO: 194498 - DNA, 4968 bp, synthetic construct
  misc_feature 1..4968: note = Description of Artificial Sequence: Synthetic coding sequence
  source 1..4968: mol_type = other DNA
atgtaccaccggctggacgtgagcctgcccttcgtgagccggggccccctgactgtagaagagacccccagggtgcaaggcgagactcagcctcaaaggctgttattggccgaggattctgaagaagaggtggacttcctgagcgaaagacgtatggtgaagaagtctcgaaccacttcctcatcagtaattgtgccagaaagtgatgaagagggccactcccccgttctgggcggcctcggtcctccctttgcctttaatcttaatagcgatactgatgtcgaggaaggacagcagcccgccaccgaagaagctagctctgcggctagacgaggagctaccgtcgaggctaaacagtctgaggcagaagtcgtgactgagatccagttggagaaggatcagccactcgtgaaagagcgcgataacgacactaaagtgaagcggggggctggtaatggtgtggtgcctgcaggcgtgatccttgaaaggagccagccaccaggggaagatagtgatacggatgttgacgacgactccaggcctcctggacggccagccgaggtccatctggagcgcgctcagccatttgggttcatagattccgatactgatgcagaggaagaacgcatacccgccacccctgtagtgatccctatgaagaaaaggaaaatctttcacggagtcggaacccgcgggcctggcgcacctggtctcgcgcacctgcaggaaagccaggccggaagcgacacagacgtggaggaagggaaagcaccccaagctgtgccactagaaaagtctcaggcatcaatggttattaacagcgacactgacgatgaggaagaagtcagtgctgcgcttaccctcgctcacctcaaggagagccagcctgccatttggaatcgagacgcggaagaggacatgccacagcgggtggtgcttctgcagcggtcccaaactactacagagagggacagtgatacagacgtggaggaagaggagctccccgtggagaatcgggaggctgtcctgaaggaccatacaaagatcagggcattggtacgagctcattctgaaaaagaccagcctccctttggggacagcgatgattctgtcgaagcagacaagtcctcacccggcattcatctggagagaagccaggccagcactacagtcgatattaacacacaggtggaaaaagaggtgccaccagggtcggccattatccatataaagaagcatcaagtgtccgttgagggtaccaatcagactgatgttaaggccgtcggaggcccagcaaagctgctggtggtgagtttagaggaagcttggccactgcatggcgactgcgagacagatgccgaggaggggaccagcctgaccgcaagcgtcgtggccgatgtgagaaagagtcaactgccagccgagggcgacgcgggcgctgaatgggccgcagcagtgttgaagcaagagcgagctcatgaggtcggcgcccagggcggccctcctgttgcacaagttgagcaggacctgccaatctcccgcgaaaatctcaccgatctagtggtggacactgatacattgggagaatcaacccaaccccaacgagagggggcacaggttcctacgggccgggagagagagcagcatgtcgggggaaccaaggacagcgaagacaactatggggatagtgaagatttggacctccaggcgacacagtgttttctcgaaaaccagggactggaagtccagtctatggaagacgagcctacacaggccttcatgctgacccctccacaagagttgggaccttcccactgcagctttcaaacaaccgggctgcttaattgcaagatgccgcccgctgagaaggcctcacgcatacgagccgccgaaaaagtgtcacggggggatcaggaatccccagacgcttgtctaccccctactgtccccgaggcaccggctcctcctcagaaaccgctgaattctcagagccaaaagcacctggccccccctccactcctgagtcccctcttaccgtccatcaaacccaccgtgagaaaaactaggcaggacggaagtcaggaggccccagaagccccgctgtcatccgaactggagccattccatcctaaacccaaaatacggacccgcaaatcaagtcggatgaccccctttcctgccaccagtgccgcccccgagccacacccatcaacgagcaccgcacagcccgtgacccctaaacccacctcgcaggcgacgaggtcgcggaccaatcgaagcagtgttaagaccccagaacccgtggtgcccacagctcccgagctccagccctctaccagcacagatcagcctgttacctctgaacccacatcacaggtaactcgcgggcgaaaatccaggtctagcgtaaaaacccccgaaactgtcgtacccactgccctggagctgcagccctcaacctctacggatcggcccgttacatccgaacccaccagccaagcaacaagggggaggaaaaatcgctccagcgttaagacccccgagcccgtggtgcctactgctcccgaactgcagccctctacaagcacggaccaaccggtgacaagcgagcctacgtaccaggctacgaggggacgaaagaatcgcagcagcgtaaaaacaccagagcctgtcgtgcccaccgctccggagctgagaccctcaaccagcaccgacagaccagttacgccgaagccaacaagtcgcacgacccgatcccgtaccaatatgtccagtgtcaagaatccggagtcaaccgtgcccatcgcacccgaactgccgccatccacatctacagaacagccagtgacccccgaaccaacctccagagctactaggggcaggaaaaatcgctcatccggcaagactcctgagactttagttcctactgcccccaagttagagccatccacaagtaccgaccagcctgttactcccgagcctacatctcaggccacccgaggcagaacaaaccgtagcagcgttaagactccagagactgtggtgccgactgcacctgaactacaaccatctacaagcactgaccagccagtgactccagaacctaccagtcaagccacacgaggtcgcacagatcgcagcagcgtaaaaacccccgagacggttgttccgacagcaccagagctgcaggcctccgcttccacagatcaacccgtgacatccgagcctacaagccggaccacacggggacgtaagaatcgctcatccgtcaagacaccagagacggttgtgccggccgccccagagctgcagccttccacttcaacagaccaacctgtgacccctgagcccaccagcagggccactcgaggccggactaaccggtccagcgtcaagacgcctgaatcaatagtgccgatcgccccggagttgcaaccctccacatcccgtaaccaactagtgactcccgagcccacctcccgtgctacaaggtgtaggaccaaccgttctagcgtgaagactccagagcctgttgtccccacagccccagaaccgcaccccacgacatctaccgatcagcccgtgaccccaaagctgacgtccagagccacccggcggaaaactaatcgatcaagtgtcaagacccccaaacccgtagagccagctgccagtgatctcgaaccgtttactccaaccgatcagagcgtcacccctgaggcgattgcccagggcggccagagcaagactctccgttcgagcactgtgcgtgccatgcctgtgccaacaacaccagaattccaaagtcctgtgactacggatcagcccatttcccctgaacctattactcaaccatcctgcattaaaaggcagagggccgcaggcaacccgggcagtctcgccgccccaatcgatcacaagccgtgctccgccccgctggaacctaagagccaagcaagtagaaaccagcggtggggtgcagttagggctgccgagtcactcacagccatccccgagccagcctctcctcagctgttggagacacctatccacgcttcgcagatccagaaggttgaacccgccgggcggtcaaggtttacaccagaattgcagcctaaagcctctcagagtcgcaagagatcccttgcaaccatggactcacctccccaccagaaacaaccacagcgaggcgaagtgtcccagaaaactgtgataatcaaggaagaggaggaagacacagcagagaaacccggaaaggaagaggatgtggtcaccccaaagccagggaagagaaaacgagatcaagccgaggaggaaccgaacaggataccgtcgcgaagtctgcgaagaactaaactgaaccaggagtcaaccgcccccaaagttctctttactggtgttgtcgacgcacgcggagagcgcgccgtgcttgcactgggcgggtccctggctggaagcgccgccgaggcttcgcatctggtgacagatcgaattcgacgcacagtgaagtttttgtgtgctcttgggcgcgggattcctatactgagcctggactggctacatcaatcacgaaaagccgggttttttcttcctccagatgagtacgtggtgactgatcccgaacaggaaaagaacttcgggttcagcctgcaagacgcgctgtcgcgcgccagagaacggagacttctggaaggttacgagatttacgtcaccccaggagtacagccacctccaccacagatgggggaaatcattagctgctgtggtggtacataccttccatcgatgccaagaagctacaaaccacaacgggtggtcataacttgtccacaagattttccccattgctccattcccttaagagttgggcttcctcttctttcacctgagtttctgcttacaggggtactcaagcaggaagcaaagccagaggcatttgtgctgtcccctttagaaatgtcatccacttag

SEQ ID NO: 194499 - DNA, 489 bp, synthetic construct
  misc_feature 1..489: note = Description of Artificial Sequence: Synthetic coding sequence
  source 1..489: mol_type = other DNA
atggaggacacccaggccatcgactgggacgtggaggaggaggaggaaaccgaacagtcctccgagagtctgcggtgtaacgtggaacccgttggccggctgcacatcttctcaggggcgcacggaccagaaaaagactttccgctgcacctgggaaaaaacgttgtgggccggatgcctgattgtagcgtggcactccctttcccatccatctcaaagcagcacgctgaaatcgaaatacttgcctgggataaggctccgattctacgcgattgtggcagtctgaatgggacccagatactgcggcctccaaaggtgctctctcccggggtctctcaccgtctccgtgaccaggaactgatactgttcgcagatctcctctgtcagtaccaccgcctcgacgtcagcctaccatttgtgagccgaggtcctctgactgtggaagagaccccgcgggttcaaggcgaaactcagccacagcggctgtag

SEQ ID NO: 194500 - DNA, 342 bp, synthetic construct
  misc_feature 1..342: note = Description of Artificial Sequence: Synthetic coding sequence
  source 1..342: mol_type = other DNA
atggaggacacccaggccatcgactgggacgtggaggaggaggaggaaaccgaacagtccagcgaaagcctgcgctgtaatgttgagccggtcggccgattacatatcttttccggtgctcacgggccggagaaagattttcccctacacctgggtaaaaacgtcgtggggcgcatgcccgattgttctgtcgcgcttcccttcccatcaatatcgaagcaacatgctgagatcgaaatactagcatgggataaagcccccatcttgcgagattgtgggtcactgaacggtacccagattctgaggccacctaaagtactctctccaggggtgagtcactag

SEQ ID NO: 194501 - DNA, 342 bp, synthetic construct
  misc_feature 1..342: note = Description of Artificial Sequence: Synthetic coding sequence
  source 1..342: mol_type = other DNA
atggaggacacccaggccatcgactgggacgtggaggaggaggaggagaccgagcagagctcagaaagccttaggtgcaatgtcgagcctgtcgggcgactacatattttttcaggagcacacggcccggagaaggatttccctctacatttgggaaaaaatgtggtgggccgtatgccggactgctccgtggctttaccatttccttccataagcaagcagcacgctgagatcgagatcctcgcatgggacaaagccccgattctgcgtgattgcggctcccttaacgggacccagatcctcaggcctcccaaagttctgtccccaggagtttctcattag

SEQ ID NO: 194502 - DNA, 384 bp, synthetic construct
  misc_feature 1..384: note = Description of Artificial Sequence: Synthetic coding sequence
  source 1..384: mol_type = other DNA
atggaggacacccaggccatcgactgggacgtggaggaggaggaggagactgaacaatcaagcgagtccctgcgttgtaatgtggagcctgtgggtcgtctccacattttttccggggcccacggaccggaaaaggactttccccttcacctggggaaaaatgtcgtcggcaggatgcccgactgttccgtggcccttcccttcccgagcatctcaaaacaacatgcagagatcgaaatcctggcatgggacaaggcacctattctgagggactgcggctctttgaacgggacccagattctccgtcccccaaaggtcctatcgcctggcgtgtcacaccgcctccgcgatcaggagctcattctcttcgccgacctgctgtag

SEQ ID NO: 194503 - DNA, 489 bp, synthetic construct
  misc_feature 1..489: note = Description of Artificial Sequence: Synthetic coding sequence
  source 1..489: mol_type = other DNA
atggaggacacccaggccatcgactgggacgtggaggaggaggaggaaactgaacagagttcggaatcacttcgttgtaacgtcgagcccgtgggaagattgcacattttctccggcgcccacggacctgagaaggattttccccttcatttgggaaagaacgtcgtgggaagaatgccagactgttccgtggctttaccatttccttctatctcaaaacaacatgcagagatcgagatactggcctgggataaagccccaatactccgtgattgcggcagtcttaatgggactcagattttgcggccgcctaaagtcctgtcgcccggagtgtcccacaggttaagagaccaagagctaatcctttttgctgatttgctttgccagtaccaccgccttgatgtatccttgccgtttgtatcgagaggacccttgaccgtcgaagaaacgccacgcgtgcagggagagacacagccacagagattatag

SEQ ID NO: 194504 - DNA, 342 bp, synthetic construct
  misc_feature 1..342: note = Description of Artificial Sequence: Synthetic coding sequence
  source 1..342: mol_type = other DNA
atggaggacacccaggccatcgactgggacgtggaggaggaggaggaaacggagcagtctagcgaatctcttagatgtaatgtggagccagttggaagactgcatatctttagcggagcacacggacctgagaaagacttcccactccacctggggaaaaatgtggtgggcagaatgcctgactgttctgtggcactgcccttcccaagtatttcaaagcaacacgccgagatagagatacttgcctgggataaagctcccattttgcgggattgcggatctttgaacggaacccagattctgcgcccgcctaaggtcctgagccctggggtgtctcactag

SEQ ID NO: 194505 - DNA, 489 bp, synthetic construct
  misc_feature 1..489: note = Description of Artificial Sequence: Synthetic coding sequence
  source 1..489: mol_type = other DNA
atggaggacacccaggccatcgactgggacgtggaggaggaggaggaaaccgagcagagttcggaatcgcttaggtgcaacgtggaacctgtcgggagactacacatatttagcggtgcccatgggcctgagaaggacttcccactgcacctcggtaagaacgttgtagggcggatgcccgattgttctgtggcgctcccctttccatctattagcaaacagcatgctgagatcgagattcttgcgtgggataaggcgccaatactgagggactgtggctcactgaacggcacacaaatactgaggccacccaaagttctctcaccaggcgtgtcccatcgtctccgggaccaggagctgattttgttcgctgacctcctgtgccagtaccatcgcctagatgtttccctgcctttcgtgagtagaggccccctgacagtggaggagacaccccgcgtccaaggcgagacacagccgcaaagactgtag

SEQ ID NO: 194506 - DNA, 384 bp, synthetic construct
  misc_feature 1..384: note = Description of Artificial Sequence: Synthetic coding sequence
  source 1..384: mol_type = other DNA
atggaggacacccaggccatcgactgggacgtggaggaggaggaggaaacggagcagagcagcgagtcactccgctgcaacgttgagcctgtcgggcggctccatattttcagtggagcgcatgggcctgagaaggattttccattgcacttgggcaaaaacgtggttggtcggatgccagattgttctgtagctctgccgtttccctctatcagcaagcagcacgccgagatagagatcctggcttgggacaaagctccaatactgcgtgactgtgggtccttaaatgggacccagatattaagacctcctaaagtgttgtcaccgggtgtatcacacagactgcgtgatcaggaattaatcttgtttgctgacttgttgtag

SEQ ID NO: 194507 - DNA, 921 bp, synthetic construct
  misc_feature 1..921: note = Description of Artificial Sequence: Synthetic coding sequence
  source 1..921: mol_type = other DNA
tgacacgtgggcggcaccaaggacagcgaggacaactacggcgacagcgaagaccttgacctgcaagcaacccagtgctttctggagaatcaggggctggaagccgtgcaaagtatggaggacgagcctactcaggctttcatgctgactcccccccaggagctcgggccgagccactgtagctttcagacgacaggactcctgaactgtaagatgcctcctgcagaaaaagcttcacggataagagccgcagagaaggtttccagaggcgatcaggaatcccccgacgcctgcctgcctcctactgtaccagaggcgcccgccccacctcagaagcctcttaatagccagtctcagaagcacctagcccctccaccattgttgtctcctttgctcccttccatcaagcccactgttcgcaagacgaggcaggacggtagccaggaggcacccgaggccccactttcatcagagctagaaccatttcatccaaaaccaaagataagaacgcgtaagtcatctcggatgacaccctttccagcgacatccgccgcgccggagccccacccctccacctctaccgctcagcctgttacacctaagccaacttcacaagccacaaggtctagaactaacagatcctctgtcaaaacccctgagccagtggtgcccacggctcccgaattacaaccatccactagcacagaccaaccagtgacatcagagccgacaagccaggtgactcgcgggcgtaaatcacgctcgagtgtgaaaacacccgagactgtggtgcccacagccctagagttgcagccctctacaagcaccgatagacccgtgacttcagagcctacttcacaagccactcgagggaggaaaaacaggagctcggtgaaaactcctgaacctgttgtcccctag

SEQ ID NO: 194508 - DNA, 6270 bp, synthetic construct
  misc_feature 1..6270: note = Description of Artificial Sequence: Synthetic coding sequence
  source 1..6270: mol_type = other DNA
atggaggacacccaggccatcgactgggacgtggaggaggaggaggagacagagcaaagcagtgaatcactgaggtgtaacgttgagccagtaggccggcttcacattttctctggggcccacggccccgagaaggatttcccactacacctaggcaagaatgttgtgggtcggatgcctgactgtagcgtggccttgccatttcccagtatcagcaagcagcacgcagaaatagagatcctggcctgggataaagcccctattctgagggattgcggcagcctgaatggaacacagatcctgcggcctccaaaggtgttgtccccaggtgtttcccatcgtttgagagaccaggagctgattctctttgccgatttattatgccagtatcataggctggatgtaagccttcccttcgtgtcccgaggcccccttaccgttgaggaaacccctcgtgtgcagggagagacccagccccaaaggcttctcctggctgaggattctgaggaggaagttgactttcttagtgaacgccgtatggtaaaaaaatcacgcaccacttccagttccgtgatcgtcccggagtctgacgaagagggacacagccctgtcctgggcggattgggccccccgtttgcgttcaacctcaacagcgacacagacgtggaggaagggcagcagccagccaccgaggaggctagttctgcagcacgtaggggcgccacagtagaagccaagcagagcgaagctgaggtcgtcaccgaaattcagctggaaaaggatcaacctctggtgaaggaacgtgacaatgatactaaggtgaagcgcggcgccggcaacggtgtagtgccagccggggtaatactggaacggagccaacctcccggcgaagattcagataccgacgttgacgacgattcacggcccccagggaggccagccgaagtgcaccttgagagagcccagcccttcggctttatcgatagtgataccgacgccgaagaagagaggatccctgcaactcctgtggtaataccaatgaagaagaggaaaatcttccatggtgttgggactcgcggaccaggcgcgcccggtctagcccacctgcaggagagtcaggccgggtccgataccgacgtggaggaagggaaggcgccacaggcggttccactcgaaaagtctcaagcctccatggtgatcaattccgatacggacgatgaagaggaagtgtctgccgctctgaccctggcccacctgaaggaatcccaacccgcgatctggaaccgggacgcagaggaggacatgccccagcgcgtggtattgctgcagcgtagtcagacaacaaccgagagagactccgatactgatgtagaggaagaagagcttcctgtggagaacagagaagcagtccttaaggatcatactaagatcagggccctcgtccgcgcccattcagaaaaagatcagcccccgttcggagacagtgacgactctgtcgaggccgacaaatcttctccgggaattcacctcgaacgaagccaagcatctactacagtcgacatcaatacccaggtggaaaaagaggttcctcctggctccgccatcatccacattaaaaagcatcaggtctcagtggaagggaccaatcagacagacgtcaaggccgtgggcgggccggccaagctgctggtcgtgagcctcgaagaagcgtggcccctccacggcgattgtgaaaccgacgcggaggagggtacctctttgacggcatccgtcgttgcggacgtccggaagagccaacttcccgcagagggggatgcgggggccgaatgggcagcggccgtattgaagcaggagagggcccatgaggtgggagcgcaagggggacccccagtcgcacaggtggagcaggacctccccatcagccgcgagaatctgacggacctggttgtggatactgatacccttggggaatccacccagccgcaacgggaaggagcacaggtgcccaccggaagagagcgcgaacagcacgtcggtggcaccaaagactctgaagacaactatggggatagtgaagaccttgacctgcaggccactcagtgcttcctagaaaatcaggggctggaggcagtgcaatccatggaggatgagccaactcaggcgtttatgttaactcccccgcaagaactaggcccaagtcactgttcttttcagacaaccggtactctggacgagccttgggaagtcttggcaacccagccgttttgcttgcgggaaagtgaagatagcgagacacaacccttcgacacccacctcgaggcatacgggccatgtctttcacctcccagagctatccctggtgaccagcatccagagtccccagtgcatacggaaccaatggggatccagggcagagggcgtcagactgtggacaaggtgatgggcataccgaaagaaaccgccgaaagagttgggccagagagaggccccctcgagcgagaaaccgaaaagctgcttccagagcggcagactgacgtcacgggggaagaggagctcacaaagggcaagcaggatcgggaacagaagcaattactggcacgagatactcaaagacaagaatccgacaagaacggtgagtctgccagtcccgagagggatcgggagagtctcaaggtggaaatcgagacatctgaggagatccaagagaagcaagtgcagaagcagacattgccgtctaaagcattcgaaagagaggtcgaacggccagtcgccaacagggaatgcgaccctgccgaactggaggagaaagtgccaaaagtgatccttgagcgggacacacaacggggggagcccgagggaggctcacaggatcagaagggacaggcctctagccctacaccagaacctggcgtcggcgccggcgatctgcccgggcccacctccgctcctgtcccgagcggatctcaatctggtgggagaggttcaccagtgagtccccgacgacatcagaagggcctactcaattgtaagatgcctccagcagaaaaagccagcagaatccgggctgcagagaaggtgagcagaggcgatcaagaatctcccgatgcttgcctgccgccaacggtccccgaggcccccgcgcctccccagaaacctctgaactcccagagtcagaaacacctcgccccaccccccctcttgagcccactccttcccagcattaaaccaaccgtgcggaaaactcggcaggatggctctcaggaggctcccgaggcacccctttcatccgagctcgagccttttcatcctaagccaaagattcgcacaagaaagtcatcgagaatgacaccctttcccgctacgagtgctgcccctgagccgcatccaagcacaagcaccgcgcaacccgtaacccctaaacctacatcccaggccacaaggagccgaacaaatcggtctagtgtaaaaacccctgagccagttgtccccacggcccccgagctccagccatctacgtcaactgatcagcccgtgactagcgaaccgaccagccaagtgacgcgtgggagaaagagccggagcagtgtcaagacgccagagactgtcgtgcctaccgcactggagcttcagcctagcacatccacagaccgcccagtcaccagcgaaccgacatcccaagcaacacgcggaagaaagaaccgaagtagcgtgaaaacacccgagccagttgtgcccactgcgcccgaactgcaaccatcaacatctaccgatcaacctgtgacgtcagagcctacataccaggctacgcgcgggagaaaaaacagatcgtctgttaagacaccagagccagtcgtccccaccgcacctgaactgagaccctcaacctccaccgataggccagtgactccaaagcctaccagcagaactacccgtagtcggactaacatgtcgagcgtgaaaacgcctgaaaccgtggtgcccactgctccagagctgcaaattagtacatcaacagatcagccagtgacacctaaacccacatccagaacaacccgcagccggaccaatatgtcatccgtgaaaaaccccgagagcactgtgcctatcgcccctgaattgcctccttccacttctaccgagcagcctgtgacaccggaacccactagccgggccacccgagggcgcaagaatagatcctctggcaaaacccccgaaacactggttcctactgctccgaagctggaaccaagcacctccactgaccagcccgtcaccccagagccaactagccaagctacgagggggcggacgaatagatcatctgtcaaaacaccagaaaccgtggtcccaactgctcctgaattacagccctccactagtacagaccagccggtgacgccagagccgaccagtcaggctacgcgagggcggacagatagatcatcagtgaagacacctgagacggtcgtcccaactgcaccggaactgcaggcctccgcaagcacggaccagccagtaacatccgagccaacctcccggactactaggggtcggaaaaacagaagctctgtcaagaccccagaaacggtcgtgcctgccgccccggagcttcagccttcaacatccaccgaccaacccgtcacacctgagccgacaagccgtgcgacaaggggacgcactaataggtcgagcgttaagacgcccgagtccatcgtcccaatagcccctgaactccagccctcaacttctcgtaaccagttagttactcccgaacccacttctcgcgccaccagatgtagaaccaatagatcctccgtcaagacacctgaacccgtcgtacctaccgccccagagcctcaccctaccacgtctacagaccagccggtgactcctaagctgacttctcgagcaacacggagaaagaccaatagaagctctgttaaaacacctaagccagtggaacctgccgcaagcgatctggagccatttacccccactgaccaaagtgtgacaccggaggcaatcgcacaggggggtcaatcaaagactctgagatcttctaccgtaagggcgatgcccgtcccaaccacacccgagtttcagtcccccgtaactaccgatcagcccatcagcccagagcctattacacagccttcctgtataaaacgacagagagccgcaggaaaccccggcagcctggccgcccccatagaccataagccatgcagcgcccccctagagccaaagtcccaggcgagcaggaaccaacggtggggcgccgttcgagcagctgaatcgcttactgccatccctgagcccgcctccccgcagctcctcgagacaccaatacacgcttcacagatccagaaggtggaaccagcgggacgttcccggtttaccccggaactgcagcccaaagccagccagtcacggaaacggagtctggcaacaatggactcccctccacaccagaaacagccacagcggggagaagttagtcagaagaccgttattatcaaagaggaggaggaggacacagccgagaagcccggaaaagaggaggatgttgtcacgccgaagcctggaaagcgaaagagggaccaggcagaggaagaacctaatcgaatcccaagccgctcactgcgacggactaaattgaaccaggaatcgacagcccccaaagtcctctttacaggggtggtggacgccagaggcgagagggctgtgctcgcactgggcggaagcctcgccgggtcggccgctgaggcgtctcacctcgtcaccgacagaatccggcgcaccgtgaagtttctctgcgccttgggaagagggattcccatcctgagtctggactggctacatcagagcaggaaagctggattctttttaccgcccgacgagtacgttgtgacagacccagagcaggagaagaattttggcttcagcctgcaggatgctttgagtagggctagagagcgccgtctgctagagggatacgaaatatacgtgacacccggcgtccaaccgccacctccccagatgggcgagatcatctcttgttgtggcggtacatatctgccgtccatgccacgctcatacaagccccagcgagtagtgattacctgcccgcaggatttccctcattgctccattcctcttcgggttggcctacctttgctgagtcctgagtttctcttgactggggtgctgaaacaagaggccaagccagaagctttcgtcctgtccccccttgagatgagctctacatag

SEQ ID NO: 194509 - DNA, 5409 bp, synthetic construct
  misc_feature 1..5409: note = Description of Artificial Sequence: Synthetic coding sequence
  source 1..5409: mol_type = other DNA
atggaggacacccaggccatcgactgggacgtggaggaggaggaggagacggagcagtcctcggaatcattgaggtgcaatgtcgaacccgtcggacggttgcatatttttagtggtgcacacgggcccgagaaggattttcccctgcacctgggaaagaatgtagtgggaagaatgcccgattgcagtgtcgctctacccttcccctcgatttccaaacaacacgcagaaatcgagatcctggcctgggacaaagcccccattctccgcgactgcgggagccttaatggaacacagatcctgagacctcccaaggttctgagccccggggtgtcccaccgcttacgtgatcaagaactgatcctgttcgcggatttattgtgccagtaccaccggctagatgtcagcctcccctttgtgtctcgcggcccgctgaccgtggaggagacgccgcgggtccaaggcgaaacacaaccccaacgactgctgttagccgaagattccgaagaagaagtagactttctgtctgagagaagaatggtaaagaaaagccgtactactagttcatccgttatcgtgccagaaagcgacgaggaagggcatagccccgtcctggggggtttaggaccgccatttgcctttaacttgaactccgatactgacgtggaggaaggtcagcagcctgccacagaggaggcttcgtcagccgcccggcggggtgcaactgtggaagcaaagcaatctgaagcggaggtggtgacggagatccagctggagaaagaccagcccctggtgaaagaaagggataatgatactaaggtcaaacggggtgcgggtaatggggtcgttccagctggcgtgatcctagaaagaagtcaaccgccaggggaagacagcgatacagatgtcgatgacgattctcggccccccggacgtccggccgaggttcacctggaaagagcccagccatttggcttcattgactccgacaccgatgccgaagaagaaagaatccctgctacgcccgtggtaatcccaatgaagaagagaaaaatttttcacggcgtcggaactcgtggtcccggtgcccccggtttggcacacttgcaggaatcccaggcagggtccgataccgatgtcgaggagggcaaagctccacaggccgtaccactagaaaaatcccaggcgtccatggtgatcaacagtgacacggacgacgaagaagaggtgtctgcggccttgacgctggcccatctgaaggaatcccagcccgctatctggaatcgggacgctgaagaggatatgcctcagcgagtggtgttgctgcagagatctcaaacaaccaccgaaagagattctgacaccgacgttgaggaagaagaactccccgtggagaatagagaggccgtcctgaaggatcatacaaaaattcgggccttggtaagggcccatagcgaaaaggaccaacccccctttggcgattccgacgactctgtggaagctgataagagctccccaggcatccatctggaaaggagtcaggcgagcactaccgtcgacatcaacacccaagtggagaaagaggtgccccccggctctgccatcatacatatcaagaagcatcaagtttcggtggaaggcacaaaccagaccgatgtgaaggcagtcggggggcccgcaaagctgctagtggtatcactcgaagaggcatggccgctacacggggactgcgaaactgacgctgaggagggcacaagccttactgccagtgtcgtagcggatgtaaggaagtcacagctgcccgctgaaggtgacgcaggtgcagaatgggccgcagctgtcctgaaacaggaacgggcccacgaggtgggcgcccagggtggccccccagtcgcccaggtggagcaggatttgcctatctcccgcgagaaccttacagaccttgtggtggacacagacacacttggagagagtacacagccccaacgcgaaggagcccaggttccaaccggccgggagcgcgaacagcacgtgggcgggaccaaggattccgaagacaattacggagatagcgaggaccttgatttgcaagcaacacaatgctttctggagaatcaaggactggaagcagtgcagagcatggaggatgagccgacacaggcttttatgctcaccccaccacaggagctgggaccctctcactgtagctttcaaacaacaggcaccctagacgagccatgggaggtgctggccactcagcctttttgccttcgcgaaagcgaggatagtgagacccaaccattcgacacacatcttgaggcatacggcccgtgcctctctccaccacgcgcaatcccaggcgatcagcaccccgagtctcctgtgcacactgagcctatgggaattcagggtagggggcggcaaacggttgataaggtgatgggaatcccaaaggagacagcagagagggtcggacctgagcgtggaccactggagcgagaaaccgaaaagcttttaccggagcgccagaccgatgtgacaggtgaggaagagctcacaaagggcaaacaagaccgggagcagaaacaactgctggctagagatactcagcgccaagagagcgacaagaacggcgaaagcgcaagcccagagagagatcgggagagtctaaaggtggaaatcgaaacaagcgaggaaatacaggaaaaacaggtccagaaacagacccttccctccaaagcgttcgaaagagaggtcgaacggcctgtggccaaccgtgagtgcgacccagctgaattggaagaaaaggtccctaaggtgattttggaacgggacacacagaggggagagcccgagggcgggagccaggaccagaaggggcaggctagttcacccaccccagaacctggggttggcgccggagacctcccggggcccaccagcgcgcccgtgccaagtggctcccagagtggaggcagaggaagcccagtgtcaccccggaggcaccaaaaaggcctgctcaattgcaagatgccccctgcggaaaaagcaagccggatccgggcagcggaaaaggtatcccgaggcgaccaggaatcaccagacgcctgtctacctccgacggttccggaagccccagctcccccacagaagccactaaattcccagagtcagaagcatctagctccacctcccctcctgagcccgcttctccccagcatcaaacccaccgtgaggaaaactagacaggacgggtcccaggaggcaccagaggcaccactgagctctgagctcgagcccttccaccccaagccaaaaattaggactagaaaatcaagcaggatgacacctttccctgcaaccagcgccgcacccaagctggagcctagcactagcaccgaccagcctgtgacacctgagcctacttctcaggcgacacgagggcgtactaatcgttccagcgtgaagacacctgagaccgtcgtgcccacggcgcccgaactgcagcctagtacttcaacggaccaacctgtgaccccagagcctacaagccaggcaactcgggggcgaacagacagaagctcagtgaagactcccgaaactgtggtgccaacggctcctgagcttcaggcttctgcttccacagatcagccggtaacgtccgagccaacttcaagaaccacccgtggtcgtaaaaaccggagttctgtgaaaacgcctgagactgtggtcccagcagctcctgagcttcagcctagcacttctaccgatcagccagtgactcccgagcctacgagtagggcaacaaggggaagaacaaataggtcttctgtgaaaacccccgaatctatcgtgcctattgcgccagaactacagccctctacatcaagaaaccagctggtgaccccagaaccgacatcccgggcgacacggtgtcgaactaatagaagctcagttaaaactcctgagcccgtggtccctaccgcccctgagccacatcccactaccagcacagatcagccggtcacccccaaactcacttcccgggcaacacggcgcaagacaaaccgctcctctgtgaaaacacccaagcctgtcgagcctgccgcatcagacctggaacctttcacgcccaccgaccagagtgtgacccctgaggcgatcgctcaggggggccaaagtaaaactcttcgcagtagcaccgttcgcgccatgcccgtcccaaccactccagagttccagtcccccgtgaccaccgatcagcctatttccccagaaccaatcacccagccatcttgcataaaacgtcagagggctgccgggaatcccggctcccttgctgccccaattgaccataagccttgctccgccccgctggaacccaagtcacaggctagtcgcaaccaaagatggggagctgtccgggctgccgagtctttgacagccatacccgagcctgcttcccctcagcttctggagacaccaattcatgcctcacaaatccagaaagtagagcctgccggaagaagccggttcacccccgaactgcagccaaaggcttctcagtcccggaaaaggtcattagccaccatggattcccctccgcaccaaaagcagcctcagaggggggaagtctcccagaagacagttattatcaaggaggaagaggaagacactgctgagaaacccgggaaagaagaggacgtggttacaccaaagcccgggaagcggaaaagagatcaggccgaagaggagccgaaccggattccttcccgcagtctaagaagaacaaaacttaatcaggagtccaccgctcctaaggttctcttcacaggtgtggtggacgcacgcggagagagagctgtgctagcactggggggatctctggctggctcggctgccgaggcctcccatttggtcactgacagaatccgccggacagtaaagttcctctgtgcactgggccgtggcattccaatccttagcctggactggcttcatcagtccaggaaggccggcttttttctccctcctgacgagtatgttgtgaccgatccagagcaggaaaaaaacttcggattcagccttcaagacgccctctcccgagcaagagaacgcaggttattagagggttatgagatatatgtcactccgggcgtgcaacctcctccgccgcaaatgggcgagatcatctcatgttgcggcggtacctatctcccttctatgccgaggtcttataagccacaaagggtcgtgatcacctgcccacaggacttcccccactgttctatacccctgagggtcgggctgcccctcttatctcccgaatttctgctcaccggcgtcctgaagcaggaggccaagcctgaagcatttgtcttgagcccccttgagatgtctagtacctag

SEQ ID NO: 194510 - DNA, 342 bp, synthetic construct
  misc_feature 1..342: note = Description of Artificial Sequence: Synthetic coding sequence
  source 1..342: mol_type = other DNA
atggaggacacccaggccatcgactgggacgtggaggaggaggaggaaacagagcagtcatccgaatccctgagatgtaacgttgaacctgtggggagactacacatattcagcggggcacatgggccagagaaagatttccccttgcacctggggaaaaacgtggtggggcggatgcccgattgctccgttgcactccccttccccagtatcagcaagcagcatgcggagatcgagattcttgcttgggataaggccccaatcttgagagactgcggtagcttgaacggaactcagatcctacgccctccaaaggtactgtctcctggcgtcagccattag

SEQ ID NO: 194511 - DNA, 6270 bp, synthetic construct
  misc_feature 1..6270: note = Description of Artificial Sequence: Synthetic coding sequence
  source 1..6270: mol_type = other DNA
atggaggacacccaggccatcgactgggacgtggaggaggaggaggagacagaacaatcaagcgaaagtcttaggtgcaacgtggagcccgtcgggagactgcacattttctccggagctcacgggcccgagaaggatttcccgttgcatctgggtaaaaatgtggtgggcaggatgcctgattgctctgtagcgctgcctttccccagtatttcgaaacagcacgctgaaatcgaaattttagcatgggacaaggccccaatcttgcgggactgtggttctctcaacgggacacaaatcctgcgaccccctaaggttctgagccccggagtatctcaccggctgcgcgaccaggagttgatattattcgcggacctgctgtgtcagtaccaccgtctggacgtaagcctgccatttgtgtcgaggggacccctgacagtggaagagacaccaagagtacagggggagactcagcctcagcgcttgctgctcgctgaagattcagaagaggaggtggacttcctgtctgagcggcgaatggtgaaaaagtcccgcactacctccagtagcgtgatcgtgccagagtccgacgaggaaggacacagccctgtgctggggggactgggtccccccttcgcgttcaatttaaattccgacactgatgtagaggagggtcagcaacctgccactgaggaggcctcgtcagctgccagacgaggcgccaccgtagaagcaaagcagagcgaggccgaggttgtaaccgagattcaactcgaaaaggaccagccacttgtgaaagagcgggataacgataccaaagtcaagcgaggggctgggaacggtgttgtcccagctggagttatccttgaaagaagtcagcctcctggggaagattccgacacagatgtggatgatgacagccggcccccgggcaggccagctgaggtgcacctcgaaagagctcagcccttcggctttatagatagtgacaccgacgcagaagaagagagaatcccagctactcctgttgtgattcctatgaagaagaggaaaatatttcacggcgtgggtacaagagggcctggagcacccggcttggctcatctgcaggagagtcaggcaggttctgataccgatgttgaagagggcaaggcaccccaggctgtcccactggagaaaagtcaggcttcgatggttatcaactccgatacagacgacgaagaggaagttagcgcagccttgaccttggcccatctgaaggagtcacagcccgccatttggaacagagacgcagaggaagatatgccgcagcgggtggtcttactgcagcgcagccagaccacgactgaaagggacagcgatacagacgtggaggaggaggaactccctgtggaaaacagagaggcagttttaaaagatcacacaaagattcgtgcccttgtccgcgcccattctgagaaggatcagcctcctttcggagacagcgacgatagcgtggaggcagacaagtcttctccaggaattcatttagaacgaagccaggccagcacgaccgtagatattaacacccaggtagagaaagaagtgccaccagggtcggctatcattcatattaaaaaacaccaagtgtctgtggaaggaacaaaccagaccgatgtgaaagccgtgggtgggcctgcgaagttgctggtggtgtcgctcgaagaggcatggcccttgcatggtgactgtgagaccgatgccgaggagggcacttcgctgacggctagcgttgtggccgatgtgaggaagagccaattgcccgctgaaggtgatgcaggagccgaatgggccgctgctgtgctgaagcaggaacgagcccacgaggttggcgcacaaggcgggccaccggtcgcacaggtagaacaggacctcccaatctccagggaaaatcttaccgatttggttgtcgatacggataccttaggagaatctacgcagcctcagcgcgaaggagcccaggtcccgactggaagagagcgggagcagcatgtcggcggaactaaagactctgaagacaattacggcgatagtgaggatctcgacctacaggcgactcagtgtttcctcgaaaatcaagggctcgaggccgtccaatcaatggaggacgaacctacgcaagcattcatgcttacccccccacaggagcttggaccttcacactgcagctttcagaccactggtactctcgatgaaccctgggaggtgctcgccacgcagcctttttgtttaagggaatctgaggactccgagacgcagccatttgatacacatctggaggcgtatggtccatgcctgtccccacccagggccatccccggcgaccaacacccagaatccccagtgcataccgagcccatgggaatccagggacggggtcgacagaccgtggataaagtgatgggaattccaaaagaaactgccgagagagtaggtcctgagcgcggccctctggagcgggaaaccgagaaattgctaccagagcgacaaaccgacgtgaccggtgaagaggagctgactaagggcaaacaggatagagagcaaaagcagctgttagcacgcgatacacaaaggcaagaatcagacaagaatggcgagagcgcctctcctgagcgagatcgtgaatctctgaaagtcgaaatcgagacatctgaagagattcaggagaagcaagtgcagaagcaaactctcccttctaaagcgtttgaacgtgaagttgaaaggcccgtggccaatcgcgaatgcgatcccgcagagctagaggaaaaagttcctaaggtcatcctggaacgcgacacccaacgcggcgagccagagggaggatctcaggaccagaaggggcaggcctcaagcccaacccctgagcctggagtgggggcgggcgacctgcctgggcctacctccgcacctgtcccttcagggtcccaaagcggcggtcgcggatcacctgtttctcctcggaggcaccagaagggcctgcttaattgtaagatgccccccgccgaaaaagcctcccgtattagggcagctgagaaggtcagcaggggtgatcaggaatcccccgacgcgtgtctcccacctactgttcctgaagctcctgccccacctcagaagcccctgaactcacagagccagaaacaccttgccccacctccactgttatccccattattacctagtatcaaaccaaccgtgcggaaaaccagacaggatggatcccaggaggctccagaagcgccattatcaagtgaactggagccatttcatcccaagcccaagattcgcacccgtaaaagtagtcgcatgacacctttccccgctacatccgccgcaccagagcctcatccatcaaccagcacggcccagccggtcacccccaaacctacctcccaggcaacgcggtccaggactaaccgatcctcggtgaaaacacccgaaccagttgtgccgaccgctcctgaactccaaccttctaccagtaccgaccagcccgtgactagtgaacccacaagccaggtgacccgagggagaaagagtcggagcagcgttaagacccctgagaccgtcgtgcccacagctctggagctgcagccttctacctctacagaccggcccgtgacaagtgaacctacctcccaggcgacaagggggagaaaaaataggtcatcggtcaagacaccagagcccgttgttccaacagccccagaattacagcccagcaccagcaccgaccagcccgtgacatcagagcccacgtaccaggccacccggggccgtaaaaacagaagttctgtgaaaacgccagagcccgtggtacccacagccccagagctacggccttctacaagcaccgatcggcctgttacccctaaaccaacttcacggacaacaaggagtcgcacgaacatgtcttcggttaaaacccctgaaacagttgttcccacagcacccgaactccagatttctacgagcacagatcagccagtcacccctaagcccacgagcagaactacgcgctctaggacaaacatgtctagcgtgaaaaaccctgaatctacagtccctatcgctcccgaactaccaccctcaacaagtaccgagcagcccgtaactccagagcccacatctcgggctactaggggtagaaaaaaccgaagttcaggaaagaccccagaaaccctcgttccgacggcccctaaactggagccatccacttctactgatcaaccggtgactccagagcccacaagccaagccacacgtgggaggaccaatagatcctcggtcaaaaccccagagacagtcgtgcctactgctccggagctgcagcctagcacatctactgaccagcccgtcacacccgagcccactagccaggccacacgggggaggacggatcggtcttctgttaaaacgccagagaccgttgtccccaccgcccctgagctgcaagcctctgcatcaacggatcagcccgtcaccagcgagccaacttcacgcacaacccgcgggaggaagaatagatcaagcgttaagaccccagagaccgttgtgccggccgcccctgcattgcaacccagtacctcaactgaccagccggtcacccccgagcctaccagtagggccacgcgcgggcgaaccaaccgctcctccgttaagacccccgagagcattgtacctattgcacctgagctgcagcctagcacttctcgcaatcaactcgtcaccccagagcccaccagccgggctacgagatgtcgcactaacaggtcgagcgtaaagacacccgaacccgtcgtcccaacggctccggaacctcaccccaccaccagcactgaccagcctgttacccccaagctgacatctagggcaacccgccggaagacaaaccgcagctcagttaagactcctaaacctgtggaacccgctgcatctgacctcgagcccttcacacctactgaccagagcgttaccccggaggccatcgcccagggcgggcagtccaaaaccctcaggagctccacagttcgagccatgcccgtgcccacaaccccagagttccagtcacctgttaccaccgaccaaccgattagtccggagcccattacccagccatcttgcatcaagaggcagcgcgccgccggcaatccagggagccttgctgctcctatcgatcacaagccatgcagcgctcctctggagccaaagagccaggcttcccgcaatcaacggtggggcgctgtgagggcggcagagagcctcaccgccatccccgagcccgcctcaccccagctgctggaaaccccgatacacgcgtcacaaatccagaaggtggagcctgcagggcggtctcgttttacccctgaattgcagccaaaggcatcccagtcaagaaaacgaagtctggccaccatggacagccctcctcatcaaaagcagccacagcgtggggaagtgtcacaaaagacagtcatcatcaaagaggaggaagaagacaccgcagagaagcctggaaaagaggaggacgtggtgacacctaagccggggaagcggaaaagggaccaggcagaggaagaaccaaaccgtataccttcacggagtcttaggaggacaaagctcaatcaggaaagcaccgctcctaaagttctatttacgggcgtggtggacgcgcgcggggaacgcgctgttctcgcgctgggcgggagtctcgctgggtcagcggccgaagcatcacatctggtgacagaccggatcagacgcaccgttaagtttctgtgtgccttggggcgcgggatcccgatcttaagccttgactggctccatcagtctagaaaggctggattcttcctcccgcccgacgaatatgtggtcaccgacccggagcaagaaaagaatttcggcttttccttgcaggatgcgctgagtcgagcccgagagcgtcgcctgttggaggggtacgagatctacgtcacccctggggtgcagccccccccgccacagatgggagagataatcagctgctgtggcggcacatatctccccagcatgccaaggtcttataagccgcagcgtgtggtgattacttgcccacaggatttcccccattgcagtatcccgctacgcgtaggcttacccctactcagcccagagtttcttctcactggggtcctcaaacaggaagctaagccagaggcattcgtcctgtccccactggagatgtcgagtacctag

SEQ ID NO: 194512 - DNA, 738 bp, synthetic construct
  misc_feature 1..738: note = Description of Artificial Sequence: Synthetic coding sequence
  source 1..738: mol_type = other DNA
atggaggacacccaggccatcgactgggacgtggaggaggaggaggagaccgagcaatccagcgaatcccttagatgcaacgtagagcctgtaggacgcctgcacatcttcagtggagctcacggccctgagaaggattttccactgcatctgggtaagaacgttgtgggccgcatgcccgattgctccgtggcgctgccctttccatcaatttccaagcagcacgccgaaattgagattctcgcatgggataaagcccctattctgagagattgcggatcactcaacggaacccagattcttaggcccccaaaggtgctgtctccaggggtctctcacagactgcgggaccaggaacttattctgtttgctgatctgctgtgccaataccatcgccttgacgtgtctttgccattcgttagtcgtggcccactgactgtcgaggagaccccgagagtccaaggcgagacacaaccccagcgcctgctgttggccgaagattcagaagaggaggtggacttcctaagtgagcggcgtatggtaaagaaatcccgcactacctcctcttctgtgatagtgcctgaatctgatgaagaaggtcattcacctgtgctgggtggacttgggccccccttcgctttcaaccttaacagcgacactgacgtcgaggagggtcagcagccagctacagaagaagccagctccgctgcaaggagaggcgcaactgtagaggcatag

SEQ ID NO: 194513 - DNA, 342 bp, synthetic construct
  misc_feature 1..342: note = Description of Artificial Sequence: Synthetic coding sequence
  source 1..342: mol_type = other DNA
atggaggacacccaggccatcgactgggacgtggaggaggaggaggaaacagagcagagcagtgaaagcttgagatgcaatgtggagccagtgggacgacttcacatcttcagtggagcacatggtccagaaaaggactttccattgcatcttggcaagaatgtggtaggaaggatgcccgactgcagtgtggccctaccgtttccctctatatccaaacagcacgccgagatagagatcctggcctgggacaaagcccctatcctgagagattgtggaagtcttaacggtacccagatacttagaccccccaaggtgctctctccaggcgtgagccactag

SEQ ID NO: 194514 - DNA, 384 bp, synthetic construct
  misc_feature 1..384: note = Description of Artificial Sequence: Synthetic coding sequence
  source 1..384: mol_type = other DNA
atggaggacacccaggccatcgactgggacgtggaggaggaggaggaaacagagcagtcctccgaaagcctgcgatgtaacgttgaacctgtaggccgtcttcacattttcagcggcgcacacgggcccgaaaaagattttccactgcacttaggcaaaaacgtggtcggacgtatgccagactgtagcgttgctttgccttttccaagcatctcaaagcagcatgccgagatcgagattctcgcctgggataaggctcccatattacgggattgcggaagcttaaatggcacccaaatactgaggcctccaaaggtgctgtccccaggcgtgtcacaccgactgcgggaccaggaactcatcctgtttgccgacctgttgtag

SEQ ID NO: 194515 - DNA, 6270 bp, synthetic construct
  misc_feature 1..6270: note = Description of Artificial Sequence: Synthetic coding sequence
  source 1..6270: mol_type = other DNA
atggaggacacccaggccatcgactgggacgtggaggaggaggaggagaccgagcagagcagtgaatcactgcggtgcaacgtggagccagtgggaaggttacacatctttagtggagcacatggccccgagaaggacttccccctgcacctcggaaagaatgtggtgggaagaatgcctgattgcagcgtcgctttaccctttccatctatttccaagcagcacgcggaaattgaaatcctcgcttgggacaaggctcctatcctgcgagactgtggctcgctgaatggtacccaaatcctcaggccccccaaggtccttagtcctggcgtctctcaccgattgcgtgatcaggaactaatcctgttcgctgaccttctttgccagtatcaccggctcgatgtttctctgccattcgtgtctcgcggcccgctgacagtggaggagacccctcgcgtccaaggtgagacacagccacagaggctgttactggccgaggactccgaagaagaagttgacttcctgtctgagcgtcggatggtcaagaaaagccgaaccaccagctcctcggttatcgtgcctgaatcagacgaagaaggacatagcccagtgcttgggggtctgggccccccgtttgcgttcaatttaaatagtgacacagacgtcgaggagggccagcagcctgcaacagaggaggcatcgtcagctgctcggcggggagctaccgtggaggcaaagcagtccgaggccgaagtggtcacagagatccagctggaaaaggatcagcccctggtgaaggaaagggataacgataccaaagtcaagcggggcgccggcaacggcgtggtaccagccggtgtgatattggaaagatcccaacctcccggagaggattccgacacagacgtcgatgacgacagcagaccaccaggccggcctgccgaagtacacctggagcgcgctcagccgttcggctttatagattctgacactgatgccgaggaggagaggatccccgctaccccggtggtgattccgatgaagaagcggaaaattttccacggggtcgggacccgtgggccaggggcaccgggtttggctcacctccaggagtcccaggccggctccgacactgacgtggaggaaggtaaagccccacaggcagtgccgctcgagaagtctcaggcatccatggtgattaattcagatacggatgatgaagaagaggtgtcggctgccctgaccttggctcatttgaaagagtctcagcccgccatctggaacagggatgccgaggaggacatgccacagcgggtagtattactgcagcggagtcagactaccacagagcgcgatagcgacacggacgtggaagaagaggagctgcccgttgaaaatagagaggcggttctgaaagatcacactaagatcagggccctagtccgggctcatagcgaaaaagaccagccacctttcggcgactctgacgactcagttgaggctgacaaatccagccctggaattcaccttgaacgctctcaggctagtaccaccgtggacatcaacactcaagttgaaaaagaggtgcctcccggaagcgcaatcattcatattaagaaacatcaagtgtccgtcgaaggtaccaaccagacagacgtgaaagcggtcggagggccagcgaagctgctggtcgtgtccctggaagaggcatggccactccacggggactgcgagaccgacgcagaagagggaaccagtctgacagcctctgtagtagctgatgtaaggaagtcacagctcccagccgaaggggatgctggcgccgaatgggccgctgcagtactgaagcaagaacgggcccacgaggttggtgcccagggtggaccccctgttgctcaggtcgagcaagacctccccatttcgcgcgaaaacctgacagatctggtagtggacaccgacactcttggagaatctacccaacctcagcgggagggcgcccaggtgcccacaggtagggaacgggagcagcacgtcgggggaacaaaggatagtgaagataattacggcgactcggaggaccttgatctccaggccacccagtgctttctggagaatcaaggcctggaagccgtgcagtctatggaagatgagccgacccaagcgttcatgttaacccccccccaggaactgggaccatctcattgcagtttccagacaacaggcaccttggacgagccgtgggaggtgctggcgacacaaccattttgcctgagagaatctgaggatagcgagacccaaccttttgacacccacctggaggcttacggaccgtgcctgtctccgccacgggccatcccgggcgaccagcatccagaatctcctgtccatacagaaccaatgggcatccaggggcgcggaagacagacggtggataaggttatggggattccgaaagaaacagccgagagagtcggccccgagcggggaccgctggaacgagaaaccgagaagctgctccctgagcgtcagacagacgttactggcgaggaagagctcaccaagggaaagcaagacagagagcagaagcaattgcttgcaagagatacgcagaggcaggagtctgacaagaatggtgaaagcgcttctccagagagagacagagaatctctgaaggtggagatcgagacgtccgaggagatacaagaaaagcaggttcagaagcaaactcttccctccaaagcattcgagcgtgaagtcgagagaccagttgccaacagagagtgtgaccccgctgagctggaagagaaagtgcccaaggtgatcttagagcgggatacacagagaggggagcccgagggcggctcccaggatcaaaaggggcaggcaagttcgccaacccctgagccaggggtgggcgccggggacctgcctgggcccacaagcgcccccgtgccaagcggcagccaatctggcggaagaggcagcccagttagccctagaagacatcagaaaggactgctcaactgtaaaatgccgcccgctgaaaaggcatctcgcattcgagctgccgagaaggtctcgagaggcgaccaggagtcccctgacgcctgtctgcccccgacggtcccagaggctccagctcccccccagaaaccactgaatagccagagtcaaaagcacctcgctccgccccccctcctctctcccctcttaccgagtattaaaccaacagtgaggaagacaaggcaggacggttctcaagaagctcccgaggctcctctgtctagtgaactcgagccatttcatcccaaaccgaaaatcagaactcggaagagctcccgtatgacaccttttcccgcaacgagcgcggcccctgagccacatccctctacgtcaaccgctcagcccgtcacaccgaagcctactagccaggccacaagatcccgtacgaacaggagctccgtaaaaacccccgagccggtggtcccaactgccccagaattacagccatccacatccacagatcaaccagtcacctctgagccaacatctcaagtgacccgggggcggaagagcaggtcctccgtgaaaacacccgagacagtcgttcccactgccctcgagctgcaaccatctacatcaactgatcgccccgtgacaagtgaacccacctcccaggcgacaaggggacggaaaaaccgctcatctgtaaagacacctgagcctgttgtgcctactgcaccagaactccagccttctacctctaccgaccagcccgtaacgagcgaacctacataccaggccactcgcggcaggaagaacaggagctctgtaaaaacccctgaaccagtcgtacctactgcacctgagctcaggccaagcacctccactgatcgtccagtcacgccaaagccgacgtctaggacgacacgaagccgcacgaacatgtcctccgtgaaaacccccgaaacagtggtgccaactgcaccagagcttcagatctctacaagcaccgaccagccagtaacccccaaaccgacctcacggactacccggtccagaaccaatatgtccagtgtgaagaaccccgaatcaacagtacccatcgcgccagaactgccacctagcacatccaccgaacaaccagtgacccccgagcctacctcccgggcaacccgcggtcgcaagaatagatccagcggaaaaacaccagagactttagtgcctacagcccctaagctcgagccatctaccagcacagatcaaccggtgacacccgagcccacctcccaggctacacgcgggaggaccaatcgctccagcgtgaagacgccagaaaccgttgttcccactgcccccgaactgcagcctagcacatctactgaccagccagtcaccccagaacctacaagccaggccacgcggggccgcaccgaccgctcatctgtcaagacacccgaaaccgtcgtgccgacagctccggagttgcaggcgtcagcttcaaccgatcaacccgtcacaagcgaacctacttcccgtacaacccgcggcagaaaaaatagaagcagcgtgaagaccccagaaaccgtggtgcccgccgcccctgagctgcagcccagcacttccacagaccaacctgtcacccctgaaccaacttcgagggccacaagaggacgcacaaaccgctcctcggttaagacacccgagtcgatcgtgcctatagctcccgaactgcagccttcaaccagccgaaatcagctggtgacccccgagccaacaagcagagctactcgatgccggacaaaccgctccagtgtgaagacacccgagccggtcgtacccaccgcgcctgagccacaccccacaacctcaactgatcaacccgtcacccccaagctcacctcgagagcgactcggcggaagacgaaccgcagcagtgtcaagacaccaaagccagtggagcctgccgcatccgatcttgaaccctttacgcctactgaccaaagcgtcacacccgaagccatcgcccagggcggacagagcaagactctgagatcttccacagtgcgcgcaatgcccgtgcctacaaccccagagttccagtctcccgtgacaaccgatcaaccaatctcccctgaacctattacccagccctcgtgcatcaagaggcagagagccgccggaaatcccggcagcctcgctgctcccatcgaccacaagccatgcagcgcaccactggagcctaagagccaggcatcaagaaaccagaggtggggtgcagttagggccgctgagtccttaacggccatccctgagccagcgtccccacagcttctggaaaccccaattcatgcctctcagattcagaaggtagaaccggcagggcgcagtagatttacaccagagctgcagccaaaggcaagtcagagtagaaaacgttcacttgctaccatggattcaccccctcaccagaaacagccccagagaggcgaagtcagccagaagactgtcattatcaaggaagaggaagaggacactgccgaaaaacccggaaaagaggaggatgtggttacacccaagcctggaaaacggaagagagatcaggccgaagaggagccgaacaggattccatctcggagcctgcgcagaacaaagctgaatcaggaaagcaccgcaccaaaagttttgttcacgggtgtcgtggacgcaaggggggagcgtgctgtgcttgctctggggggaagcctggccggatccgctgcggaagctagccacttggtgacggacaggattcggcgaacggtgaaatttttatgtgccctaggaagaggaatccctatactctccctggattggttgcaccagagcagaaaggcaggcttctttctgcccccagacgaatatgtagtcaccgaccctgaacaagaaaagaatttcggtttctctctgcaggacgccctgtcacgtgccagagaaaggcggttgctcgagggttatgagatctacgtgacccccggagtgcagcccccccccccacaaatgggggagataatttcttgctgcggcggcacatacctcccctccatgcccaggtcttataagcctcaacgggtcgtgatcacttgtcctcaggacttcccacactgctccatccctttacgagtcggcctccctcttctttcccccgagtttctgcttaccggtgtccttaaacaagaagccaagccagaggcatttgtcctgtcccccttagagatgtcctctacatag

SEQ ID NO: 194516 - DNA, 489 bp, synthetic construct
  misc_feature 1..489: note = Description of Artificial Sequence: Synthetic coding sequence
  source 1..489: mol_type = other DNA
atggaggacacccaggccatcgactgggacgtggaggaggaggaggagaccgagcaatcatctgaatccctgaggtgcaacgtggaaccagtgggcaggctgcatatcttctctggagctcatggccccgaaaaagatttccccctacacctaggcaagaatgtggtgggaaggatgccagactgttccgtggccctgccctttcctagcattagtaaacagcatgccgaaatcgagatcctggcttgggacaaggcaccaattctcagagactgtgggtctctaaatggcacccaaattcttcgacccccgaaggtgctttcccccggcgtgtcccaccgcctgcgtgaccaggagctaatcctcttcgcagacctcttgtgccagtaccatcggctggacgtgagcctgccctttgtgtcgcgtggtcctctaacagtcgaagaaacaccacgagtacagggcgagactcaacctcagaggctgtag

SEQ ID NO: 194517 - DNA, 921 bp, synthetic construct
  misc_feature 1..921: note = Description of Artificial Sequence: Synthetic coding sequence
  source 1..921: mol_type = other DNA
tgacacgtgggcggcaccaaggacagcgaggacaactacggcgactcagaggatctggacttgcaggccacacagtgcttcctggaaaatcagggtcttgaggccgtgcagagcatggaagacgaaccaacccaggcctttatgctaacccctcctcaggagctcggaccttcacattgtagcttccagactaccggcttgcttaattgcaaaatgcctcccgccgaaaaggcaagcaggattcgggctgcggaaaaggtatccagaggggatcaagagtcccctgacgcttgtttgccgcctactgtgcctgaggcacccgcgcccccccagaagccgttgaattctcagagccaaaaacacctcgcgccccctcccctactgagtcccttgctcccatctataaagcctacagtgcgcaagactcgccaagacggatcacaagaagcacccgaggcccctctgtccagtgagctagaaccattccaccccaaacctaagatccgaacacgcaagtcttcacgcatgacaccatttccggcaacgtctgcagcgcccgaaccccatcccagtacctccacagcgcagcccgtgacaccaaagcctacatctcaagcaaccagatcccgaaccaacaggagctccgtgaaaactcccgaacctgttgtgcccaccgcccccgagttgcagcctagcacctcaacagatcagcctgtgacaagcgaacctacctcccaggttactcgcggcaggaaatctaggtcgtccgtaaaaacccccgaaaccgtcgtgccaacagctctggagctgcagccttctacgagtactgacagaccagttacctccgaacctacctcacaggccaccaggggacgaaagaaccgtagctctgtgaagacgcccgagcccgtcgtcccctag

SEQ ID NO: 194518 - DNA, 921 bp, synthetic construct
  misc_feature 1..921: note = Description of Artificial Sequence: Synthetic coding sequence
  source 1..921: mol_type = other DNA
tgacacgtgggcggcaccaaggacagcgaggacaactacggcgactccgaggacctagatctccaagctactcagtgttttctcgagaatcagggcctagaggccgtgcagtccatggaggacgagccaactcaggcctttatgttgacacctccccaggagctcggccccagccactgttccttccagacaactgggctgcttaactgtaagatgccgcccgctgaaaaagcatctcgcatcagggcagcggaaaaagtatctcgtggcgatcaggaatcgcctgatgcctgcctgccacctactgtcccagaagccccagctccaccacagaaaccactgaattcgcagagtcaaaaacaccttgctcctcccccgcttctgtcccctctgctgcccagtatcaaacccacagtgcgtaaaactcggcaagatgggagccaggaggctcccgaagctccacttagcagcgagttagagcctttccatcctaagcccaagatcagaacaagaaagagtagccggatgaccccctttccagcgacttctgccgcccctgagccacacccctctaccagcacagcacagccggttacaccaaagccaaccagccaggcaacacggagtaggaccaatagatcttccgtgaagacgcccgagcctgtcgtgcctactgcacctgagctgcagccttctacctccacagatcaacccgtgacgagcgaacctactagccaagttactcgcggtagaaaaagtagatcatcagtaaaaactcccgaaacagtagtacccactgccttggaactgcaaccaagcacaagcaccgacagaccagtcaccagcgagccaacgtctcaggccacaaggggccgcaagaatcggagctccgtaaagacacctgaaccagtggtgccatag

SEQ ID NO: 194519 - DNA, 384 bp, synthetic construct
  misc_feature 1..384: note = Description of Artificial Sequence: Synthetic coding sequence
  source 1..384: mol_type = other DNA
atggaggacacccaggccatcgactgggacgtggaggaggaggaggagaccgaacaaagttcggagtctttacgctgcaacgtggagcctgtgggccggttacatatattttcaggcgctcatggccccgagaaggactttcctttgcacctcggtaaaaacgtggtgggtaggatgccagattgcagtgtggccctgccctttccttcgataagcaagcaacacgcagagatcgagatacttgcttgggacaaggctcccatccttcgtgattgcggctccctgaacggaacccaaatacttaggccaccaaaggtcttaagcccgggggtcagtcatcgacttcgggatcaggagctgattttattcgccgacctgctgtag

SEQ ID NO: 194520 - DNA, 921 bp, synthetic construct
  misc_feature 1..921: note = Description of Artificial Sequence: Synthetic coding sequence
  source 1..921: mol_type = other DNA
tgacacgtgggcggcaccaaggacagcgaggacaactacggcgacagtgaagacctggacctgcaggctacccaatgctttctggagaaccaaggcctggaagctgtgcaatctatggaggatgaacctacacaggccttcatgctgacacctcctcaggagctgggtccatctcattgtagctttcagacgaccggcttactcaattgcaagatgccgcctgccgaaaaggcttcccgaatcagagcggccgagaaggtgagccgtggtgatcaggagtcgccagacgcgtgcttgccgccaacagtacccgaagcgcccgcgccgccacagaaaccactcaatagccaaagtcaaaagcaccttgcccctcctccactgctgtctccacttttgccttctatcaagcctacagtcagaaagaccagacaggatggatcacaggaagccccagaagcaccgttgtcaagcgagctcgaaccgtttcacccaaaacctaagattcgcacgaggaagtcatccagaatgacacctttccccgcgacttcggctgcccccgaaccccatccaagtactagcacagcacaacccgtaacccctaagccaaccagccaggcgacccgatcaagaacaaaccggagtagtgtgaaaactccagagcctgtagtgcctactgcacctgagctgcagccctctacctctaccgaccagccagtgacatctgaacccacaagccaggtgacgcgaggcaggaaatcccgcagcagcgtgaagactcctgaaacagttgtccctactgctctggagctgcagcccagcaccagcaccgacagacctgtcacttccgaaccaacgtcccaggctacccgcggcaggaaaaaccgctccagcgtgaaaacccctgagcctgtcgtgccctag

SEQ ID NO: 194521 - DNA, 489 bp, synthetic construct
  misc_feature 1..489: note = Description of Artificial Sequence: Synthetic coding sequence
  source 1..489: mol_type = other DNA
atggaggacacccaggccatcgactgggacgtggaggaggaggaggagacagagcaatccagtgagagtctgaggtgtaatgtggagcccgtaggacgcctgcatattttttcaggcgcgcacggacctgaaaaggactttcccttgcatctcggcaaaaatgtcgtcggtcgcatgcctgactgttctgtggccctcccttttccaagcattagcaagcagcacgcagagatcgagatcctggcctgggataaagctcccatcttgagggattgcggatcactgaacggtactcagatactgaggccaccgaaagttctaagtccaggtgtgtcgcataggcttcgtgatcaggaactgattctcttcgcagatcttctctgccaatatcataggctggacgtctccctgcctttcgtcagcaggggcccactgactgtggaagagacaccccgcgtgcagggcgaaacccagccacagcggctgtag

SEQ ID NO: 194522 - DNA, 6270 bp, synthetic construct
  misc_feature 1..6270: note = Description of Artificial Sequence: Synthetic coding sequence
  source 1..6270: mol_type = other DNA
atggaggacacccaggccatcgactgggacgtggaggaggaggaggagacagaacagtcgagtgagtccctcaggtgcaatgtcgaaccagtgggcaggttgcatatttttagcggtgcacacgggccagagaaggattttcctctgcacctcggaaagaatgtggtgggccgcatgcccgactgtagtgtggcattgcccttcccatccatcagcaaacagcacgccgaaatcgaaattctggcctgggacaaggcacccatactcagagactgtgggtccttgaatggcactcagattctgcgacctcccaaggtgttgtctcctggggtctcacaccgcctccgggatcaagagctgatcctgttcgcagacctgctctgccagtaccatcggctggatgtttccctgcctttcgtgtcccgagggccgctcacagtggaggagactcctcgagttcagggggagacacagccccagaggctcctgctagcagaggattccgaagaggaagtggacttcctttccgagcggagaatggttaagaagtctagaaccactagttcttctgttattgtgccagaatcagatgaagaaggtcactccccagtgctgggcggcctggggccccccttcgcgtttaacctgaactccgacactgacgtagaggaagggcaacaacctgcgacagaagaggcatcgagtgccgctcgacgcggagctaccgtcgaagccaagcagtcagaggctgaggtggtgacagaaatccagctggagaaggatcagccgctggtaaaagagagggacaacgatactaaggttaagagaggagccgggaacggggtggtgcctgccggagtgatcctggaacggagtcagcctcctggcgaggacagtgatactgacgtagatgatgactccagaccacccggcaggcccgcagaggtgcacctggagcgggctcaacctttcggctttattgattccgacacggacgcagaggaagagaggatacccgcgacccctgtggtaattcctatgaaaaaacgtaaaatcttccatggggtgggaactcggggccctggcgctcctggactagcccatctccaagaatcccaggcaggctcagacacagacgtcgaagaagggaaagcccctcaggctgttcctcttgagaaaagccaggcctctatggttatcaacagcgatacggatgatgaggaggaggtgtctgcagcactgaccttggctcatctgaaggagtctcagccggctatatggaacagagacgccgaagaggatatgcctcagagagtggttctgttgcagagaagccagaccaccacagagcgggattccgacaccgacgtggaggaggaagaattacccgtcgaaaatcgtgaagcagttcttaaggaccatacaaaaatcagagccctggttcgcgctcactctgaaaaagaccaaccgcccttcggtgatagcgatgattctgtggaggccgataagagctcccctggcattcacctcgaaagaagtcaggccagcaccacagttgacattaacacacaggtggaaaaggaggtgcccccaggatccgccattattcacatcaaaaagcaccaggtgtctgttgagggcactaaccaaacagatgtaaaagcagtcggaggccccgcgaagttactggtagtgtccctggaggaggcctggcctctgcatggagactgtgagaccgatgctgaagagggcacatccttgacagcttccgtggttgccgatgttagaaaatcccagttgcccgccgagggcgatgctggcgccgaatgggcagccgccgtgttgaagcaagagagggcccatgaagtgggagctcagggtgggccgccagtagcacaagttgaacaggacctgccaataagtcgggaaaatctgacagacttggtggtcgacacagatactttgggggaatctacacagccacaacgtgagggagcccaggttcccaccggcagggagcgtgagcagcatgtgggcggaaccaaggactcagaagataattatggtgacagtgaggatctggacctgcaggcaacccagtgcttcctcgaaaatcaagggctggaagccgtccaaagcatggaggacgagccaacacaggcttttatgctaacccctcctcaggagctgggaccgtcacactgcagcttccaaacaaccggcaccctcgatgagccttgggaagtgctggctacacaaccattttgcctgagagagagcgaagactccgagacgcagcccttcgatacacatttggaggcttatggcccatgcctttcccccccccgggcaatcccgggcgaccagcatccagagtcaccagtgcacacagaaccaatgggaattcagggaaggggaaggcagaccgtcgataaggtgatggggatacccaaggagactgcagagagagtcgggcccgaaaggggaccgcttgagcgcgagaccgagaaattgctgcctgagcgtcagaccgacgtaacgggagaagaggagctgaccaaggggaagcaggatcgcgaacagaaacagctactcgcgagggacacccagcggcaggaatctgacaagaatggggagtcagcctctccagaacgcgatcgggagtccctgaaggtggagatcgaaacctcagaggaaattcaggaaaagcaggtccagaagcagacattgcctagtaaggcctttgaacgcgaagtggagcgaccagtggccaatagagagtgcgatcccgctgagttggaggagaaggtgccaaaggttatactggaacgggatacccagaggggggagccagaaggcggcagtcaagatcaaaagggacaggccagctcccctacccctgaaccaggcgttggggcgggcgatcttcctggacctactagcgcacctgtcccctcaggaagtcagtcaggcggacgtgggtcccctgtaagccctcggcggcatcagaaaggacttttgaattgcaagatgcctcctgcagagaaagcgtcccgcatccgtgctgccgagaaggtatctaggggggaccaggagtcccctgatgcttgtttaccacccactgtgccagaagcccccgcccctccacaaaagcccctgaactctcaaagtcaaaagcacctcgccccacccccactgctctctcccttattaccatccatcaaaccaacagtgcgcaaaactcgtcaggacggtagccaggaagccccagaagcaccactctcatcagagctggagccatttcacccaaagccgaaaataagaacccggaagagctctcgaatgacacccttccctgctacctccgcagcccctgaacctcatccaagtacctctacggcccagccagtgactcctaaacctacttcccaggccacgagatcacgcactaaccggtcgagtgtaaagacaccggaacccgtggtgcccacggcccccgaactacaaccatccaccagtaccgatcaaccggtgacttccgaacctacgtcacaagtcactcgcggtaggaaatctaggtcctctgtgaagactcccgagacggtggttcccaccgccctcgagctgcagccgtccacctctacagaccgccccgtgacatcagaacctaccagccaggcaacacgtggccggaagaaccggtcaagtgtgaaaaccccagagccggtggtgccaaccgcaccagagcttcagccttcgacaagcacagaccagccagtgacttccgagcccacctatcaggcaacaagaggccggaagaataggtccagtgttaagacgcctgaaccagtggtaccgactgctcctgagctccgcccctccacctcgaccgatcgaccagtgacacccaaacccacttctcgcacaacacggtcccgcacaaatatgagctcggttaaaacccctgagaccgtggtccccacagccccggagctccaaatcagcaccagtacagatcagcctgtgacccccaagccaacaagtcgcacgactaggtcaagaacgaacatgagttcagtaaagaaccccgaaagcactgtgccaatcgcacctgaattgcctccatccacatctaccgagcaacctgtcaccccagaacccaccagcagagcaactcgcgggcggaagaatcgctcttctggcaagactccagagacactcgttccaaccgcccccaaactggagccgagcacttccaccgatcagcccgtgactcctgagcctacatcccaggccactaggggacgaacaaatcgcagttcagtcaagactccagaaaccgtggtccctaccgcccctgagctgcagccctcaacatctactgaccagcctgtcacacccgagcccacgagccaggctactagaggtaggaccgatagatcttccgtgaaaacaccggagacagtagtcccaaccgcgccggagttgcaggcgagcgcctctacggatcagcccgtgacatctgaacctaccagtcggactacccgaggaagaaaaaatagatcatcagtgaagactcccgaaactgtggttcctgcggccccggagcttcagccaagcaccagcaccgatcagcccgtgacaccggaacctacatcccgggccacacgagggaggaccaaccggagctccgttaagacccctgagtctatcgtccctatagcccccgagcttcagccttccacatctagaaatcagctggtcaccccagaaccaacttctagagccacaaggtgcagaacaaaccggagcagtgtgaagacccccgaacctgtggttcccaccgccccagaaccgcacccaactaccagcacagaccagcccgtcacccctaagctcaccagtcgcgcgacccgacgcaagacgaaccgcagcagcgtaaaaaccccaaagccagtcgaacccgcagcctctgacctcgagcccttcacccctaccgaccagagcgttacccctgaagcaatcgcacaggggggccagtccaagactctgcgctcaagtacggtgcgagctatgccagtcccaactacccctgaatttcagtcacccgttactaccgaccagcccatcagtccagaacctatcacacagccatcttgcattaagcgtcagagagctgccggaaacccaggcagcctcgctgcgccaatagatcacaaaccttgcagtgcccccctagaaccaaagtcacaggcgagcagaaaccagcgatggggggccgttcgtgccgcagagtctctgaccgccattcctgaaccagcaagccctcagcttctcgaaacgcccatccatgcatctcagatacagaaagtggaacccgccggacgaagccgttttactcccgaactccagcccaaggctagccaatccagaaaacgcagccttgcgactatggacagtcccccccaccagaagcagccacagaggggcgaagtctcacaaaagaccgtgattatcaaagaggaagaggaagatacagcagaaaagcccggaaaggaagaagacgttgtgacgccgaagcctggtaagaggaaacgcgatcaggcggaggaggaaccaaaccgaatccctagtaggtcgctcagacgaacgaagctgaatcaagaaagcacagcacctaaggtgctgtttaccggtgttgtggacgccaggggcgaacgcgccgtcctggccttaggaggctcccttgctgggagtgcagccgaggcatcccatttggtaacagaccggatcaggagaaccgtcaaattcctctgtgccctggggcgcggcatccccatcctctccctagattggctgcatcagtctaggaaagctggcttcttcctaccacctgatgagtacgttgtcactgatccggagcaggagaagaattttggtttttctctgcaggatgctttatccagggccagggagcgtcgcctgcttgaggggtacgagatatatgtgaccccgggagtgcagccacctccccctcagatgggggagataatctcatgttgcgggggcacttacttaccgagcatgcctagaagctataagcctcagagggtagtaattacttgtccacaagacttcccacactgttcgatcccattgcgtgtgggccttccacttctttcaccagaatttttgttgaccggagttctgaaacaagaggccaaacccgaggccttcgtactttctcctttagagatgagctctacctag

SEQ ID NO: 194523 - DNA, 735 bp, synthetic construct
  misc_feature 1..735: note = Description of Artificial Sequence: Synthetic coding sequence
  source 1..735: mol_type = other DNA
atggaggacacccaggccatcgactgggacgtggaggaggaggaggaaacggagcagagctcagagtcgctgcggtgtaacgtagagcctgtagggcgtctgcacatattctctggcgcccacgggccagaaaaggacttccccctgcacctcggcaagaatgtggtgggacgcatgcctgattgcagcgttgcactgccctttcctagtataagcaagcagcacgccgaaatcgaaatccttgcctgggataaggcccccattctccgagattgtggcagtctcaacggcacacagatactccgtcccccaaaagtcctcagtcctggggtgtctcatcgcctaagagaccaagaactgatcctgttcgccgatctgctctgtcagtaccatcgcctggatgtgagcttgccctttgtatcacgggggccgctaacagtcgaagagacccccagagtgcagggagaaacacagcctcagagactgttgctggccgaagattctgaggaggaggtggacttcctctctgagcgccggatggttaagaagtcccgtacaacctccagctctgtcatcgtgcctgaatccgacgaagagggccactcacccgtgctgggaggactcgggcccccttttgctttcaacctaaacagcgatacagacgttgaggagggccaacaaccacaccggggaggactgctaagttgccaaaaacgttgccactgtcggggctag

SEQ ID NO: 194524 - DNA, 384 bp, synthetic construct
  misc_feature 1..384: note = Description of Artificial Sequence: Synthetic coding sequence
  source 1..384: mol_type = other DNA
atggaggacacccaggccatcgactgggacgtggaggaggaggaggaaaccgagcagtcgtcagagtccctgcgttgcaacgtggaaccggtgggtcgactgcacatcttctctggcgctcatgggcctgagaaggacttccctttacatttgggaaaaaatgtggtagggcgcatgcccgattgcagtgtggccctgcctttcccttcaatctctaagcagcacgccgagatcgaaatcttggcttgggataaggccccaatcttgagggattgcggtagtttgaatggaacccagatactgagaccaccaaaggtgctaagtcctggagttagccacagactgagagatcaggaactgatcctttttgcagatttactgtag

SEQ ID NO: 194525 - DNA, 342 bp, synthetic construct
  misc_feature 1..342: note = Description of Artificial Sequence: Synthetic coding sequence
  source 1..342: mol_type = other DNA
atggaggacacccaggccatcgactgggacgtggaggaggaggaggagacagagcagtccagtgagagccttcgctgtaatgttgagccagttggccggctgcacattttttccggggcccacggtccagagaaggacttcccccttcatctcgggaagaacgtcgttggcagaatgcctgactgctctgtcgccctcccctttccctctatcagtaagcagcatgcggagatcgagatcctggcatgggataaagctcccatcctcagagactgtggcagcctcaacggtacccagatccttagaccgcccaaggttcttagcccaggggttagtcactag

SEQ ID NO: 194526 - DNA, 5409 bp, synthetic construct
  misc_feature 1..5409: note = Description of Artificial Sequence: Synthetic coding sequence
  source 1..5409: mol_type = other DNA
atggaggacacccaggccatcgactgggacgtggaggaggaggaggagaccgagcaaagctcagaatccctgaggtgtaacgtggagccagttggtaggcttcacatattcagtggagctcatggacccgaaaaagatttcccgctacacctgggaaagaatgttgtgggacgcatgcctgattgttccgtggccctgccattcccgtccatctccaaacagcatgccgaaattgagattctcgcttgggacaaggctcctattttgcgggattgcgggtccctcaacggcactcaaatccttagacctcctaaagtcttatccccaggagtgagtcatcgactgagggaccaggagctcatcctgttcgccgacctgctgtgccaatatcaccgcttggacgtgtctttgcctttcgtttcaaggggcccactgactgtggaagagacaccccgtgtccaaggagaaactcagccacagcggttacttctggctgaagactccgaagaggaggtggattttctctcagagagacgcatggtgaagaagagcagaaccacgtcgtcctctgtaatagtccccgaatctgacgaggaaggtcattctcctgttctgggcggcctaggtccgccgttcgcattcaatcttaattctgatactgatgtcgaagagggtcagcagcctgcaacagaggaggctagctccgccgccagaagaggtgccacagttgaggccaagcagagcgaagcggaggtggttactgaaatccagctggagaaggaccaaccactggtcaaagagagagacaatgacacaaaggttaagcgtggtgcgggcaacggggttgttccagccggcgttatcctggagagatcccagccccccggggaggattctgacaccgacgtggacgacgactcccgacctcccgggcgcccagcagaggtccatctcgaacgggcccagccgtttggtttcatagattccgacacagacgctgaggaggagcgcattcccgcaactcccgttgtgattccaatgaaaaaaaggaaaatcttccacggagttggaactaggggcccaggagcccctgggctggcccatttacaggagagtcaggccggtagcgacacagacgttgaagaaggcaaagccccacaggccgtcccactcgagaaaagccaagcgtctatggtgatcaatagcgatacagatgacgaagaggaagtgagcgccgccctgaccttagcccacctgaaagaaagtcagcctgcaatatggaatagggacgcagaggaggatatgccgcagcgggtggtacttttgcaacgctcccagaccacaaccgaaagggactccgataccgatgtggaggaggaggagctgcccgtcgaaaatagggaagccgttttgaaagatcacaccaagatccgggcgctggtcagggcccattcagaaaaggaccagcccccctttggcgatagcgacgattctgtggaggcagacaaatcttctcctggaatacatctcgaaagaagtcaggcttcaacaactgtcgacatcaacacccaggttgaaaaggaggtgccccccggctccgccatcatccacattaaaaaacatcaggtgtctgttgagggcacgaaccagactgacgttaaagccgtggggggacctgctaagctgctggtcgtctctctagaggaggcttggccgctgcatggagattgtgagaccgatgcagaggagggcacaagcttgactgctagcgtggtggcggacgttcggaagtcacagctgcccgctgaaggcgatgctggcgcagaatgggccgccgcagttctgaaacaggaaagggcacacgaagtaggtgcccagggtggcccgcctgtcgcccaagtggagcaggatctaccaatctcacgcgagaacttaaccgacttagtcgtagacaccgacaccttgggcgagagcacacagccgcagcgggagggcgcgcaggttcctaccggtcgggaaagagagcaacacgtgggtggcactaaagactctgaagacaattacggcgacagtgaggatcttgacctgcaggccactcagtgtttcctcgagaaccagggtttggaagccgtgcagagtatggaagacgaacctactcaggccttcatgcttacacctccccaagagcttggaccgtcacactgcagcttccaaaccacaggtacactggacgaaccgtgggaggtcctggcaactcagcctttttgcctgcgagagagcgaagattctgagacccagcccttcgacacccatttggaggcttatgggccctgtctctcaccgccccgtgccatcccaggggaccaacacccagaatctccggtgcacaccgagcctatggggattcagggaaggggacggcagacagtagataaagttatggggattccgaaagagacagctgaacgcgtcgggccggaacgcggaccccttgaaagagaaaccgaaaagctcctgcccgagaggcaaactgatgtgacaggcgaagaagagctgacaaaagggaaacaggatcgtgagcaaaaacagctcctggccagagacacgcagaggcaggaaagcgataagaacggcgagtctgcttctcccgagcgcgacagggagtcactgaaggttgagatcgagactagcgaggaaattcaggaaaagcaggttcagaaacaaaccttgccaagtaaggccttcgaacgcgaagttgagagaccagtggccaatcgggaatgtgaccccgcggaactcgaggagaaggtgccaaaggtgatcctcgaacgcgatacgcagcggggggaacctgaaggggggtcacaggatcagaagggacaggcgagcagtccaacaccagagccaggtgtgggggccggcgacctccctggccctacttccgcaccagtgccgtcagggtcccagtccgggggccgcggttcgccagtcagcccaagacggcatcaaaagggcctgctgaactgcaagatgccccctgccgaaaaggcatctagaatacgagcagctgagaaggtctctagaggtgatcaagaaagcccggatgcatgccttccacctaccgtgcccgaggcccccgctcctcctcagaagccccttaatagccagagccagaaacacttggcccccccgcccttgctttcgcctttgttgcccagcatcaagcctacggttagaaaaacacgtcaagacggctcacaggaggcccccgaggcccccttatcttccgaattggagccctttcaccccaagcctaaaatccgcacacgcaagtcttcgaggatgacaccctttccggctacttccgctgcccctaaactggagccctctaccagtacagatcagcccgttacccctgaacctacctcccaagcgactcgggggcgcacaaaccgtagttctgtgaagaccccggagacggttgttcccacagccccggaactccagccatcgacttctactgaccagcctgtaacccctgaacctaccagtcaagctacccgcggccgtactgataggagcagcgtgaagacacccgaaaccgtggttcctaccgctcctgaacttcaggcaagtgcatctactgatcagccggttaccagcgaaccgaccagccgtacaacacggggaaggaagaacaggagttctgtgaaaacgcctgagacagtggtgcccgccgccccagaactccagcccagtaccagtacagaccagccggttacccctgagcctacttccagggctactagggggcgaacgaacaggtcaagtgtcaaaaccccagaatctatcgtcccaatcgcacccgagctgcagcctagcacttccaggaaccagttagtgaccccagaaccaacttcccgagctacccgatgcaggacgaaccggtccagtgtgaaaactcccgaacccgtggttccaacagcgccggaaccacaccccaccacatcaacagatcagcctgtgacgccaaaactcaccagccgggccacgcgtaggaaaacgaacagatctagcgtgaagacgcctaagcccgtggagcccgccgcatcagacttggagccattcaccccaacggaccagtcggtgacccccgaagcgatagcacagggtggtcagagcaaaacgctccggtcttccacagtcagggcgatgcccgtgccgaccacccctgagttccaaagtccagtgacaacagaccagcccatctctcctgagcccataacacagcccagctgtatcaaaagacagagagccgcagggaacccaggcagcctcgccgctccgatcgaccacaaaccctgctctgcccccctggagcctaagagtcaagctagcagaaatcaacgttggggtgcggtgagggcagccgaatccctcaccgctatcccggaaccagcaagcccccagttgctggagactcctatccacgccagtcagattcaaaaagttgagccggccggtcggtcccgcttcactcctgagcttcagccaaaggcatcccagagcaggaagcgcagcctagcaaccatggactctcctccccatcagaagcagccgcagcggggtgaagtgagtcagaaaaccgtcatcataaaggaggaagaggaagataccgctgaaaagcctggcaaggaggaagacgtcgtcacccccaagccgggaaaaagaaagcgtgaccaggcagaggaggagcccaacagaatccccagtaggtccctccggaggactaagcttaaccaagaaagcaccgccccaaaagtgctattcacaggagtggttgacgctcggggcgaaagggccgtcttagccctcggcgggtctctggcaggctccgccgctgaggcctcccatctcgtgactgatcggatcaggaggacagtgaagttcttatgtgccctcgggcggggcattccaattttaagcctcgattggctccatcagagcagaaaagcaggcttctttctgccacctgacgaatacgtggtcacagacccagaacaagagaaaaacttcggcttctccctgcaagacgccctcagccgggccagggaacgtagacttttggagggttatgagatttacgttactccaggagttcaacctccacctccacagatgggagaaatcatcagttgctgcggggggacatatttaccatccatgccccgatcttacaaaccacagagagtggttatcacatgcccacaggacttcccccactgttctataccactgagggtgggactgccattactatctccggagtttttactgaccggggtcctcaagcaggaggccaaaccagaagctttcgtgctctccccactggagatgagctcaacatag

SEQ ID NO: 194527 - DNA, 735 bp, synthetic construct
  misc_feature 1..735: note = Description of Artificial Sequence: Synthetic coding sequence
  source 1..735: mol_type = other DNA
atggaggacacccaggccatcgactgggacgtggaggaggaggaggagacggagcaaagcagcgaaagcctccggtgcaacgtggagcctgttggccggctccatatattctctggggcccacgggccagaaaaagatttcccattacatctcggaaagaacgtcgtgggtcggatgccagactgttctgtagctctgcctttcccctccatatctaaacagcacgccgagattgagattctcgcttgggacaaagcgccaattctcagggactgtggctctttgaatggtactcagatcttaaggccaccaaaggtgctctctcccggcgtgtctcaccgcttgcgagatcaggagcttattctttttgccgacctgctctgccaataccatagacttgacgtgtctcttccttttgtgagtcggggtcctctgactgtcgaagagacgccacgggtccaaggggaaactcagccccaaaggctcttactggccgaagacagcgaggaagaggtcgatttcttgtctgagcggagaatggtgaaaaagtccaggacgacttcttcctctgtgattgtgcctgagtcagatgaagagggccattcccctgttctgggcggactcggtccccccttcgccttcaatcttaatagtgatactgacgtagaggagggacagcaacctcaccgaggcggcctcttatcctgtcagaagagatgtcactgccgtgggtag

SEQ ID NO: 194528 - DNA, 5409 bp, synthetic construct
  misc_feature 1..5409: note = Description of Artificial Sequence: Synthetic coding sequence
  source 1..5409: mol_type = other DNA
atggaggacacccaggccatcgactgggacgtggaggaggaggaggagacagagcagtcttccgagtcactgcgatgcaatgttgagcccgtgggccgactgcacatttttagcggcgcgcacggccctgaaaaagacttccctttgcatttaggaaagaacgtcgtgggtaggatgcctgattgcagcgtggctctgcctttccctagcatcagtaaacagcacgccgagatcgagatactggcctgggacaaagctccaatcctacgcgactgcggctcactgaatggaacccagatcctgagacctcctaaagtgttgagcccgggggtttcacacagactccgagatcaagagttaatcctttttgccgatctgctgtgtcagtaccacagacttgatgtgtcactcccctttgtctcgcgcgggcctctaacagtcgaagagacacctagggtgcaaggagagacacagccccaacgactcttgctcgctgaggattcagaggaagaggtggacttcctcagcgagaggcgtatggtaaagaagtctcgcacgacatcctccagtgtgatcgtgccagaatccgatgaggaagggcactcccccgtgcttggtggcctcggtcctcccttcgcattcaacctaaactccgacaccgacgtggaagaaggccagcagccagccactgaagaggcatcttcagctgcccggagaggggccaccgtggaagctaaacagagcgaagcggaggtggtgacagagatccagcttgagaaggaccagcccctggtgaaggaacgtgataatgacacaaaggttaaacgtggggccggcaatggcgtggtcccagccggtgtcatactggagcgcagccagccccctggggaagactccgacactgatgtggatgacgatagtcggccacccggaagaccggctgaagtacatcttgaacgcgcccagcctttcggttttatcgactctgacacagatgcggaggaagaaaggatcccggccactccggtggtgattccaatgaaaaaacgtaagatctttcacggggtgggcactcgaggcccaggcgcaccgggcctggctcaccttcaggagtcacaggcaggctctgacactgacgttgaagagggcaaagccccccaggcagtgcctctggagaagagccaggctagcatggtgatcaatagtgatacagatgacgaggaggaggtcagtgctgctctgacactggcgcatctgaaggagtcccaacctgcgatatggaatagggacgcagaggaagacatgccacagagggtcgttctactccaaagaagtcaaacgaccaccgagcgagacagcgacactgatgtcgaggaagaagaacttccagtagagaacagggaggctgtgctaaaagaccacactaaaatccgcgcccttgtcagggcccacagtgaaaaggaccagccgcccttcggggattccgatgactctgtcgaagctgataaatccagccctgggatccacctggagagatcacaggcttccacgactgttgatatcaatacccaggtggaaaaagaagtgcctcccggcagtgctataatccacataaaaaaacaccaagtctcggttgaggggacgaatcagaccgacgtaaaggccgttggcggtcctgccaagctgctcgtggtctcgctggaggaggcttggccactccatggggactgtgagacagacgcggaggagggtacttcattgactgcttctgtagtggcagatgtgcgcaagtctcagctgcccgccgaaggagacgctggggctgaatgggccgcagccgtgctgaaacaggaaagggcgcatgaggtgggcgcacaaggagggccaccagtggcccaggtggaacaggatcttcctattagccgggaaaatctgacagacttggtagtcgacactgacactctcggcgagtcaactcagccccaacgtgagggcgcacaggtccctacgggaagggaaagggaacagcacgtgggtggcaccaaagatagcgaggacaattatggggatagcgaggacctggaccttcaagccacccagtgttttttggagaaccagggtctggaagcagtgcagtccatggaagatgagcctactcaggccttcatgcttacacccccacaagagctcggcccctcacactgcagtttccagactacaggcactctagacgaaccgtgggaagtcttagccacccagcctttctgtctcagggagagtgaggacagtgaaactcaaccattcgacacccacttagaggcatacggtccctgccttagccctcctcgcgccatacccggcgatcagcaccctgagagcccagttcataccgaacctatgggcatacagggtagaggccgccagaccgtcgacaaggtcatgggcatcccaaaagaaacagccgaacgggtaggccctgaaaggggtccattagaacgggaaacagagaaactgctcccagagcgccagaccgacgtgactggagaggaagaactgacaaaaggtaagcaagatcgcgagcagaagcagcttcttgcccgtgatacccaacggcaagaaagcgataaaaacggcgagtctgcaagcccagagagagacagagagtcgctgaaagtggagattgagacatctgaagagatccaggagaaacaagttcagaagcagaccctgccctcgaaagcctttgaaagagaagtggagcgaccagtagcgaacagagaatgtgatccagcagagctggaagagaaggtcccaaaggtgatcttagaaagggatacacagagaggcgagccagaaggaggctctcaggaccaaaagggacaggcctcatccccaacaccagagcctggggtgggtgcgggcgaccttcctgggcccacgtccgcacctgtgccaagcggaagtcagagtggcggtaggggctcaccagtctcccctagacgccatcaaaagggcctgctgaactgcaaaatgccacctgccgaaaaggctagtcggatccgggctgctgaaaaggttagtagaggcgatcaggaatccccagacgcgtgcctgccacctaccgttccagaagctcccgcaccaccccagaaacctctgaactcacaatcccagaagcaccttgccccaccaccacttttgtcccccttgctgccctcaattaaacctaccgtgcgaaagacacgacaggatggaagtcaggaggctcccgaagcgccgctcagttccgagctcgagcctttccacccaaaaccaaaaatccgcacccgaaagagttcaagaatgacgccctttccggcaacgagcgccgccccaaaattggaacctagcacctcgaccgatcagcccgtgactcctgagcctacctcccaggctacccgtgggcgaacaaaccgcagcagcgttaagacaccagagacagtggtccccactgctccagagcttcagccaagcaccagtaccgaccaaccagtaaccccggaaccgactagccaggcaactcggggcagaacggacagaagttcagtcaaaacccctgagaccgtcgttcccacggcccccgaactgcaggcatcagccagtacggaccaaccagttacctctgagcccacatcgcgtactacacgaggccgcaagaaccgctctagtgttaagacaccggaaaccgttgtgccggccgctccggagctgcagcctagcacctcaacggaccaacccgtcacaccagagcctacaagccgggctacgagaggtcgaacaaaccgatctagcgttaaaacccctgagagtatagtgcctattgctcctgagttgcagccttccacaagccggaaccagctcgtaacacctgaacccacatccagggccactcggtgccgtacaaaccggtcttctgtcaaaacccccgagcctgttgtgcctaccgcaccagaacctcatcctacaacctcaacagaccagcccgttacgccgaagctcacctcccgagccacacggcgtaaaacaaatagaagttccgtcaagacgccaaagccggtggaacccgccgcctctgacctagagccattcacacctaccgaccaatccgtgacccctgaggccattgcacagggcggtcagagtaaaacgctgaggagctccaccgtccgcgccatgcccgtgccaaccacgcctgaattccagagtcccgtcacaacagaccagccgatctctcctgagcctattacgcagccttcttgtataaaacgccagcgggccgcagggaatcctggtagcctcgcagcccctatcgatcataaaccttgcagtgcaccgttggaacctaagagccaggcaagtagaaaccagcggtggggagcggtccgggcagctgaaagcctcacggcaattccagaacctgcctctccgcagctgctggagactccaatccacgcatctcagatacagaaggtcgagccagccgggcggtcccggttcactccggagctgcaaccaaaagccagccagtcccggaagcggtcgctagccacaatggatagtcctcctcaccagaagcagccccagcgaggcgaggtgtcacaaaagaccgtcatcatcaaggaagaagaagaagacaccgccgagaagccaggtaaagaagaggacgtggttactccaaaaccagggaagaggaagcgggatcaggcagaagaggagcccaatcgtatcccgagtagatccctgaggaggactaagctcaaccaggaatcgaccgcacctaaagttctcttcaccggcgtggtcgacgcacgtggagagcgggcagtgctggcgctcggcgggtccctggcaggctcagcggcagaggcttcgcacttggtgaccgaccggattaggagaactgtgaaatttctgtgtgcactgggacggggtatacccatcctttctttggactggcttcaccagtcccgaaaagcagggttcttcctgcctcctgatgagtacgtggtgacagaccctgaacaagagaagaacttcggcttctcactgcaggatgcacttagccgggcaagggaacgaaggctgctcgagggctatgaaatctatgtgactccaggggtgcagcctccaccgcctcaaatgggagagatcattagttgctgtggcgggacttacctgccgtccatgccaagatcatacaagccacagcgtgtcgtgattacgtgtcctcaggacttcccccactgttccatccccttgagggtgggtttaccgttattatcgccagagtttcttttgacaggtgtgctgaaacaggaagctaaacctgaggcctttgttctgtcccctctggaaatgtctagcacgtag

SEQ ID NO: 194529 - DNA, 735 bp, synthetic construct
  misc_feature 1..735: note = Description of Artificial Sequence: Synthetic coding sequence
  source 1..735: mol_type = other DNA
atggaggacacccaggccatcgactgggacgtggaggaggaggaggagactgaacaatcgtcagagagccttaggtgcaacgtcgaacctgtagggcgcctgcacattttttctggagcccatggccctgaaaaggatttcccgcttcacctgggcaagaacgtggtcggtcgaatgccggactgtagcgtggccctgccctttccgagtatctctaaacagcacgcagagatagagatcttggcctgggataaagcccccattctccgggactgcggcagcctcaacgggacccagatccttcgtccccctaaggttctgtctcccggggttagtcaccgactgcgggatcaagagctcatcctcttcgccgacctgctttgccagtatcacaggttggatgttagccttccctttgtgtctcgggggcccctaacggtcgaagagactccacgagtacaaggcgaaactcagccacagcgcttgttactggctgaggatagcgaggaggaagtggactttctgagcgaacgtagaatggtaaaaaaaagcaggactacttcatcctccgttattgtgcccgagagtgacgaggaggggcattctcctgtgctgggcgggttaggacccccttttgctttcaatcttaactcggacactgacgtggaagagggccaacagcctcatcgcggcgggctcctctcatgccaaaaaaggtgccattgtagaggctag

SEQ ID NO: 194530 - DNA, 735 bp, synthetic construct
  misc_feature 1..735: note = Description of Artificial Sequence: Synthetic coding sequence
  source 1..735: mol_type = other DNA
atggaggacacccaggccatcgactgggacgtggaggaggaggaggaaacagaacagagtagcgagtcattacgatgcaacgtggagcccgtcgggcggctgcacatcttcagcggagctcacggtccagagaaggatttccccctgcacctggggaagaatgtagtggggcggatgcctgactgctcagttgcactcccgttcccgtcaataagcaagcagcacgcggaaatagaaatcctggcttgggacaaagcaccgattctacgcgattgcggcagcctcaacggcacacagattctgcggccccctaaagtgctgtctcctggtgtgtctcaccgcctccgagaccaggagctgatcctgtttgccgatctgttatgccagtaccaccgcttggatgtgtctcttccattcgtgtccaggggtcctttgaccgtagaagagactccccgagtgcagggcgagacccagccacaacgcctgctcctggccgaggatagcgaggaagaagttgattttcttagcgagcgtagaatggtcaagaaatccagaacgacatcaagctctgtgatcgttccagagagcgatgaagaaggtcactcgccggtgctagggggactcggaccccccttcgcttttaaccttaactctgataccgatgtggaagaaggacagcagccgcatcgaggcggcctgctatcttgtcaaaaacggtgccactgtcgcggttag

SEQ ID NO: 194531 - DNA, 738 bp, synthetic construct
  misc_feature 1..738: note = Description of Artificial Sequence: Synthetic coding sequence
  source 1..738: mol_type = other DNA
atggaggacacccaggccatcgactgggacgtggaggaggaggaggaaacagaacaaagtagtgagtcacttcgttgtaatgttgaaccagtcgggcgcttgcacatcttttctggagcccacggtcctgaaaaggacttccctctgcacctggggaaaaatgtggtagggagaatgcctgattgctcagtcgcactgcccttcccctcaatttcgaaacaacacgctgagattgaaatactcgcgtgggataaggctcctatcttgagggactgcggctccttaaacgggacccagatacttcggccacctaaagttctcagccctggtgtgtcacacaggctccgggatcaggagctgattctttttgcggatctcttatgccagtaccaccgactggacgtttcactgcctttcgtctctagaggtcccctgacagtggaggaaacaccaagggttcaaggcgagacacagccccagcggctcttgctcgcggaagactctgaggaagaagtagatttcttgtctgaaaggcggatggttaaaaagtctcggaccacctcttcttctgtcattgttccagaatcggatgaggagggacattctcccgtcctgggcgggttaggcccccctttcgcttttaaccttaactctgacactgacgtggaggaaggtcagcagccagcaacagaggaggcgtccagcgccgccagacggggcgcgactgtggaagcctag

SEQ ID NO: 194532 - DNA, 5478 bp, synthetic construct
  misc_feature 1..5478: note = Description of Artificial Sequence: Synthetic coding sequence
  source 1..5478: mol_type = other DNA
atggaggacacccaggccatcgactgggacgtggaggaggaggaggaaactgagcagtcctctgaatctctacggtgcaatgtggagccagtgggccgtctccacattttttcaggagcacatggcccagagaaggatttcccacttcatctgggaaagaatgtggtgggaagaatgcccgactgcagcgtggccttgccattcccatcaatatccaagcaacatgctgaaattgaaatattggcatgggacaaggccccaatcttgcgcgactgtgggagtctgaacggaacacagatcttacggccaccaaaggtcctctctccgggggtgagccacaggctcagagatcaggagctgatcctcttcgccgatctcctgtgccagtatcacagactggatgtgagcctcccttttgtgagccgcggtcccttgactgtcgaagaaacacccagggttcagggagaaacccagccgcagaggcttcttctggctgaggattcggaagaggaggtcgactttctgtcagaaagaagaatggtaaaaaaaagcaggaccacttcctcaagtgtgatagttccggagagtgacgaggaagggcactctccggtgctcggaggcctcggccctccctttgccttcaacctgaattcagacaccgatgtagaggagggacagcagccagcaacggaggaagcatcaagcgctgcccgccggggcgcaaccgtcgaagccaaacagagcgaagccgaggtggttaccgaaatccaactcgaaaaggaccagcctctggtcaaggaaagagacaacgacacgaaagtgaaacggggagctggtaatggtgtcgtgcctgcgggcgtgatccttgagcgaagccaacctcctggagaggattccgacactgacgtcgacgatgattccagacctcctggcagacccgccgaggtgcatctcgagcgagcccagccatttggcttcatcgacagtgacactgatgcggaggaggagcgtatcccagctacaccagtggtgatccccatgaagaaacggaagatattccatggcgttggcacccgtggtcccggcgcgccgggtctggcacatctgcaggagagccaggccggttccgacactgatgtggaggagggaaaggccccacaggcggtgcccctcgagaagtctcaggcatctatggtgatcaacagcgatactgacgacgaggaagaagtcagtgctgcactgactctagcccatttaaaggagagccagccagctatctggaaccgggacgctgaagaggacatgccccagcgggtcgtactgctgcagaggtcgcagacgacgacggagcgcgatagcgatacagacgtcgaggaggaagagctccccgtggagaacagagaggccgtgttgaaagatcacactaagatccgcgctctggtgcgagctcacagcgagaaggaccagcctccatttggagattctgacgacagcgtcgaagcagataagagttcccccggtatccatcttgagcggagtcaagcttcgacgaccgtggatattaacacacaagtagagaaagaggtgccccccggctctgccataattcacattaagaaacaccaagtcagcgtggaaggtactaatcagaccgatgtcaaggcagtcgggggaccggctaagttactggtggttagcttggaggaagcttggccactccacggagattgtgagactgatgccgaggaaggcacctcactaaccgcatctgtcgtcgcggacgtgagaaagtcacagttgcctgcagaaggcgacgcgggggctgagtgggcagccgcagtgctgaagcaggaacgcgcacatgaagtgggcgctcagggaggaccaccagtagcccaggtcgagcaggatctccccattagtcgggagaatcttaccgacctcgtggtggacacagatacactcggcgagtctacacagcctcaaagagaaggcgctcaagtgcccaccggtagagaacgggagcaacacgtcggggggaccaaagattccgaggacaactacggagacagtgaggacctggatctacaagcgacacagtgctttctggaaaatcagggactcgaggcagtccagtcaatggaggatgaacctactcaagccttcatgctgacacctcctcaagaactgggaccctcccactgctcttttcagactaccgggcttctcaattgcaagatgcctccagcggaaaaggcctcacgaatcagggctgccgaaaaagtatcgcgtggtgaccaagaatcacccgatgcctgtctaccccctaccgtaccggaggcccctgctccgcctcagaagccactgaactcgcagtcccagaaacatcttgcaccacctcccttgctcagtccgctgctcccaagtatcaagcccaccgtcaggaagaccagacaggacggatctcaggaggcccctgaggcacctctgtcctccgaactagaacccttccaccctaaaccaaagattcgtactcggaaatcctccaggatgactccgttccctgcgacatccgcagccccggagccccaccccagtacctcaaccgctcagccggtcaccccaaagccaaccagccaagccactagaagccgcactaacagatcctccgttaagactcctgagcctgtggtacctacagctccagagctacaacccagcacttctacagaccaacccgtcacctccgaacccacatcccaggttaccagaggcaggaagagtcggagctccgtaaaaacaccggaaaccgtggtccccaccgccctagagttgcagccgtctaccagtaccgatcgacccgttacatctgaacccacctcccaagcgacccgtggcaggaagaatcggtccagtgtcaagactcctgaaccagttgttccgactgcacccgagctgcaaccttccacttctaccgaccagccagtgaccagtgagccaacttatcaggcaacgaggggtaggaagaaccggagcagcgttaaaactcccgagcccgtggtgcccacagctcctgagctgaggccttccactagcaccgacagacccgtgacccctaagccaactagtcggaccactcgatctcgcactaatatgagttctgtcaagaccccagagaccgtggttcccacagctccagagttgcagatcagcacatccacagaccagcctgtcacgcctaagccaacctcccgcaccactcggtctaggaccaacatgagttccgtgaaaaacccagaaagtaccgtgcccattgcgccagaactgccaccttcaacgtcaaccgagcagccagttaccccagagcccacttctagggccactaggggtaggaagaaccgctcatctggaaaaacgcctgagactctcgtgcccaccgcccctaaactggagccaagcacatctacggatcagccagtaactccagaacccacgtctcaagctacaagaggccggacgaatagaagttccgtcaaaacaccagaaaccgtcgtgcctacagctccggagctgcaacccagcacctctacagaccagcctgtgactccagaacctactagccaggcaacacgtggtaggactgaccggtcgtcagttaaaactcctgaaacggtggtgccaaccgcacctgaactgcaggcaagtgcatccaccgaccaaccggtgacatcagagcccacctcacggactactcgcgggagaaaaaataggagcagcgtcaagacacccgagacggtggtgcctgcggctcctgagctgcagccatccacctcgaccgatcagccggtcactcccgagccaactagccgagcaacaagaggcagaaccaataggtcctctgtgaagacccctgagtcaatagttcccattgcccccgagttacagcctagcaccagccgcaaccagcttgtgaccccagagcccaccagtcgagccaccagatgcaggactaacaggagcagcgttaaaacacccgagccggtcgtccctaccgcaccagagccccacccgaccacatctacggatcagcctgttaccccaaagctgactagcagggctactcggagaaaaacaaatcgctccagtgtgaaaactccaaagcctgtcgaacccgccgcttccgacctcgaaccttttaccccaactgaccagtcagtgacaccggaggcgattgcccagggaggccagtccaaaactctgaggtcctccaccgtgcgtgcgatgcctgtaccaacaacccccgaatttcagtcccccgtgactacagaccaacctatctccccagagccaattacgcaaccttcttgcattaaacgccagcgagccgccggcaatcccgggtcgctcgccgcccctatcgaccacaagccctgttccgcaccgctggagccaaagagtcaggcctcaaggaatcagagatggggcgcagttcgggccgcggagtctctgacagccatccccgagcccgctagtccacagctcctggagacacccattcacgcatctcagatccaaaaagtggaacctgctggccgttctagatttacacctgagctgcagcccaaggcctctcagagccgaaagcgatctctcgccacaatggactctccacctcatcaaaagcagccccagaggggtgaggtgagtcagaagaccgtcatcataaaggaagaagaagaggatacagccgagaagccggggaaagaggaagacgtggttaccccaaagcctggaaagaggaagcgagaccaagcagaggaagagccaaatcgcatccctagccggtcgcttcgccgcaccaagctaaatcaggagtctacggcgcccaaggttttattcacgggcgtggtggatgctcggggggaacgagctgtattggcactcggcggatctttagcaggctctgctgcagaagccagccacttggtgaccgacaggattcggaggacggtgaaattcctgtgcgcactggggcgcgggatcccgatcctgtctttggattggttacatcagagcagaaaagcagggttttttctacctcctgatgaatatgtggtgactgaccccgagcaggaaaagaatttcgggttctccctccaggacgccctctctcgcgctagggaacgaagactgctggaggggtacgaaatttatgtcacccctggtgtgcagccaccgccgcctcaaatgggggaaatcatttcctgctgcgggggcacgtatctaccctcaatgccccggagctacaaaccacagagggtggtaattacctgcccccaggactttcctcactgtagcatcccactgcgcgttggtctgccgctcctaagtcctgaattcttgttgaccggggtattgaaacaggaagccaagcccgaagctttcgtgctgtcccctttggagatgtcaagcacctag

SEQ ID NO: 194533 - DNA, 738 bp, synthetic construct
  misc_feature 1..738: note = Description of Artificial Sequence: Synthetic coding sequence
  source 1..738: mol_type = other DNA
atggaggacacccaggccatcgactgggacgtggaggaggaggaggaaacggaacaatcctccgaaagccttcgatgcaacgttgaaccagtcgggcgattgcacatcttttctggcgcgcatgggccagaaaaggactttccactgcatctggggaaaaatgtcgtcggtcgaatgcccgactgctctgtggctttaccatttccctctatcagtaaacagcacgccgaaatagaaatcctcgcatgggacaaagcccccatacttcgcgattgcggtagtcttaatggtacgcagatcctgcgccccccgaaggtcctgtcgcccggtgtctcccatagattgcgggatcaggagctgatcctgttcgccgacctgttgtgccagtatcataggctcgatgtcagcctacccttcgtttcccgaggaccgctcaccgttgaggaaacgccacgcgttcagggagagacgcagccacagaggctgcttctggccgaggactcggaggaagaagtagacttcctgagcgaacgaaggatggttaagaagtcccgcaccacgtcctctagcgtgatagttcccgaaagtgatgaagaaggacattctccagtgctgggcgggctggggcctccattcgctttcaacctgaactcagataccgacgttgaagaaggacagcagcccgctacagaggaggcctctagcgctgccagaagaggcgctactgtcgaggcatag

SEQ ID NO: 194534 - DNA, 5409 bp, synthetic construct
  misc_feature 1..5409: note = Description of Artificial Sequence: Synthetic coding sequence
  source 1..5409: mol_type = other DNA
atggaggacacccaggccatcgactgggacgtggaggaggaggaggaaacagaacagtctagcgaaagtctgcggtgcaacgttgaacctgtaggaaggctgcacatctttagcggagcccacgggccggaaaaagattttccactgcatctgggcaaaaacgtagtcggcaggatgcctgactgcagcgtggctctgcctttccccagtatcagcaaacagcatgccgagattgagatcctggcctgggataaggcaccaatcctacgggactgtggcagcctgaacggcacgcagattttgcggcctcctaaagtactatcgccgggcgtcagtcatcggctccgggaccaggagctgatcctgtttgccgacctgctttgtcagtaccataggctggatgtctcacttccattcgtgtccaggggccctcttacagtggaagagacaccacgggtgcagggggaaacacaaccccaaagattgctattagccgaagattcggaggaggaggtcgactttctgtccgaaagacgaatggtgaaaaagtctcgaaccacctcatcgagcgtgatcgtgcccgagtccgatgaagagggccacagtcccgtacttgggggcttgggtccacccttcgcgttcaaccttaattccgacacagatgttgaggagggccagcagcctgccacggaggaggcgagcagcgctgctaggcgtggagcgaccgtggaagcaaagcagtctgaggccgaggtcgtgaccgagattcagctcgagaaggatcagcccttggtgaaggaacgagacaacgatacaaaagtcaagcggggggcaggtaatggtgtggtacctgctggtgtgatcctggagcgctcacagcctccaggggaagattccgacaccgatgtcgacgacgattccaggcccccaggacggccagcagaggtgcaccttgaaagagcacaacccttcgggtttatcgactccgacaccgacgcagaggaggagcgcatccctgctacacccgtggtgattccgatgaagaagcgcaagatatttcacggagttggaaccagggggcccggcgcaccagggctcgcacacctgcaagagtcacaagcgggcagcgacactgacgttgaggagggcaaagccccccaggcagtgcccctggagaaatcacaggccagcatggtcataaactccgatacggacgacgaggaggaagtttccgccgcactgaccctggctcatcttaaagagagccaacctgcaatctggaaccgcgatgctgaagaagacatgccacagcgcgtcgtcctcttgcagaggtcccagaccaccacggaacgcgactctgacactgatgtggaggaggaggagcttcccgttgagaatagagaagctgtgttgaaagatcacaccaagatccgggcactggtccgcgcccatagcgagaaggatcagcctccttttggcgattccgacgactctgtggaggccgacaagagctcccctggtattcatctagagaggtctcaagccagcacgactgtggatattaacacacaggttgaaaaagaggtgcctccaggttctgccatcatacatattaaaaaacaccaggtgtccgtggagggaaccaatcaaactgatgttaaggctgttgggggacctgccaagcttttggttgttagtctcgaagaagcttggccacttcacggcgactgtgaaacggacgctgaagaggggacatcccttaccgctagcgtcgtggcagatgtgagaaaatctcagctgcccgcagagggagacgccggggctgaatgggccgctgcagtgctcaaacaagaaagagctcacgaggttggtgcacaaggcgggccccccgttgcccaggtggagcaggacctacctatttcccgcgagaatcttaccgacctggtggtcgacacggacaccctgggcgagtccacgcagccgcagcgggagggggcccaggtaccaactggcagagaacgagagcagcacgtaggtggaacaaaagatagcgaggataattatggtgatagcgaggatctggaccttcaggccacccaatgctttcttgaaaatcaaggactggaagctgtgcagagcatggaggatgagcctacacaggccttcatgctcacgccaccacaggagttgggcccatcccactgttcgtttcagactacggggactctcgacgaaccctgggaagtgctcgcgacacagccattctgtctgcgggaaagcgaagactccgaaacgcaaccatttgacacccacctagaagcctacgggccctgtcttagtccaccccgggccattcccggagatcagcatccagaatcccctgtccataccgagccaatgggaatacaagggaggggacgccagactgtagacaaggtgatgggtatccctaaggagaccgcagagagagtgggaccagaacgtggacccctggaacgcgagactgagaagctcttgcctgaaagacagacagacgtcacgggcgaggaggagcttacaaagggaaagcaagaccgggaacagaagcagctgcttgctcgggacacccagaggcaggaatcagataaaaacggcgaaagtgcctcccccgaacgagacagagaaagtcttaaggtggagatagaaacatccgaggagatacaggaaaagcaagtgcagaaacagaccctgcccagcaaagccttcgagagagaggtggagagaccggtagccaatcgagagtgcgaccccgcagaacttgaggagaaggtgccaaaagtcatcctggagcgggacactcagcgcggagagccggagggagggagccaagaccagaaagggcaggccagctctcctactccagagccaggggttggcgcaggggacctccccgggcccacttcagctcctgtgccttcaggatcacagtctggggggagaggatctcctgtgagccctaggcggcaccaaaagggacttcttaactgtaagatgccgcctgccgaaaaagcaagcagaattcgggcagccgagaaggtgagtcgcggagatcaggaatccccagacgcttgccttccaccgactgttccagaggcaccagcccccccacagaaacctctgaactcacaatcccaaaagcaccttgccccacccccgttactgtctcctttacttcctagtatcaaacccacggttcgaaaaacccggcaagatggaagtcaggaagccccagaggctcctctgtccagcgaactagaaccattccatccaaaaccgaaaatccggactaggaagtcctcccggatgacccccttccccgctacctctgctgctcctaagctcgaaccgagcaccagtaccgatcaaccagtaacgcccgagcctacatctcaagcgacaagagggaggaccaacagatcaagcgtgaaaacccctgaaaccgtggtgcccactgcccctgaacttcaacccagcacgtccaccgatcagcccgtgacacctgagccaacatctcaagcgacccgtgggcggaccgacaggtcctctgtgaagaccccagaaaccgtcgtgccaactgcccctgagctccaggccagcgccagtactgaccagccagtgacttccgagccaaccagcaggacgacccggggtcggaaaaatcgtagctccgtgaaaacccccgagacagtggttcctgctgccccggaactgcagccctctacaagcaccgaccaaccagtgaccccagaacccacttcgagggccacccgaggaagaaccaatcggagctcagttaagacacctgaatctatcgttccaattgctcccgagcttcagccttccacatcacggaaccagttggtaacaccagaacccaccagccgggccacacgatgccgcactaatcgttcctccgtcaagactcctgaacccgtcgtgccgacagctcctgagccgcaccctaccacatcaacagaccagccagtcactcctaaactgactagccgagcaacaagacgaaaaactaacaggtcttcagtgaaaactcccaaaccagtggagcccgcagcttctgatttggaaccattcacgcccacagaccagagtgtgacaccagaggcaatcgcacagggaggccaatctaagacactgcgctcgtctactgtgcgcgcgatgcctgtcccaactaccccagagtttcagtctccagttactacagaccagccaatctcacctgagcccatcactcagccaagctgtattaaacgacagcgggcagcaggaaacccgggaagcctggccgcacccattgaccataaaccatgctcagcccctcttgaacccaagtcccaggctagtcgtaatcagcgctggggcgccgtgcgggcagcagagtctctaacggcgatccccgaacccgcctcgccacaactgctggaaactccaatccatgcctcccaaattcagaaggtcgaaccagctggccgtagcaggtttactcccgagctgcagcctaaggctagtcagtctcgaaaaagatccctggcaactatggattccccgcctcaccaaaaacaaccacagcgaggcgaggtttcccagaagacggtgattatcaaagaggaggaagaagacacggctgagaagcccggaaaagaggaggatgtggtcacgccaaaaccaggcaaacggaaacgcgaccaggcggaagaggaacctaataggattccaagccggagcttgagacggacaaagctgaatcaggagtcaacagcgccaaaggtactgttcaccggcgttgttgatgcaagaggtgaacgtgctgtgctggccctgggcggatctctagccggctctgccgcagaggccagtcacctggtgactgaccggatcagaagaaccgtcaagtttctgtgcgcactggggcgcgggatacccatcctgtcacttgactggttacatcagagccgcaaggccgggttcttcctccccccagatgagtacgtggtgacagatccggagcaagagaagaactttggcttctccctgcaagacgcgctgtcccgggcccgcgagcgtcggctgttggagggatacgaaatatacgttacacccggcgtacagccccctcctccacagatgggggaaatcattagctgttgcggaggcacttacctcccatccatgccacggagctataagcctcagcgggtggtgataacatgtcctcaggattttccccactgctccattccactccgtgtgggcctgccgcttctgagcccggaattcttgctcacaggggttctcaaacaggaggccaaacctgaggctttcgtcctgagtcctttggagatgtcgagtacgtag

SEQ ID NO: 194535 - DNA, 738 bp, synthetic construct
  misc_feature 1..738: note = Description of Artificial Sequence: Synthetic coding sequence
  source 1..738: mol_type = other DNA
atggaggacacccaggccatcgactgggacgtggaggaggaggaggagacagagcagagttctgagtctttgcgatgcaacgtcgagcctgtgggtaggctgcacattttctcaggagcacatgggccagaaaaggatttccccctacatcttgggaagaacgtggtcggccggatgcccgattgcagcgtggctctgcctttcccttccatctctaagcaacatgctgaaattgagattcttgcgtgggacaaggctccgatcctacgggactgtggcagccttaacggaacccaaatccttcgaccgccaaaggtgctgtccccaggcgtgtcccacagactgcgcgaccaggagctgatccttttcgccgatctcttgtgccaataccacaggctggacgtttcactgcccttcgtgagccgagggcccttgacagtcgaggaaacgccacgggttcaaggggaaacccagcctcagcgcttgttgctggccgaagattccgaggaagaagtagatttcctttctgagcgaagaatggtgaagaagtcccgcacaaccagctcttccgtcatcgttcccgaaagcgatgaggaagggcacagtcctgtgctgggcgggttgggaccacccttcgctttcaatcttaactccgacaccgacgttgaggagggacagcagcctgccactgaagaagccagcagcgcagccaggagaggcgccacggtcgaagcctag

SEQ ID NO: 194536 - DNA, 5409 bp, synthetic construct
  misc_feature 1..5409: note = Description of Artificial Sequence: Synthetic coding sequence
  source 1..5409: mol_type = other DNA
atggaggacacccaggccatcgactgggacgtggaggaggaggaggagacggagcagagtagtgagagcctcagatgcaacgtcgagcccgtgggccgtctgcatatcttctcgggcgctcatgggcccgagaaggacttcccactgcacctgggcaagaatgtcgtgggtagaatgcctgactgttccgtcgcactgccattccctagcatctctaagcagcatgcagagatagagattctggcgtgggacaaagccccaatattgcgggattgcggcagcctgaatggcactcagattctgcgcccacccaaggtgctgtctcctggcgtgtctcacaggttgcgcgatcaggaacttattctgttcgcagatctgctgtgccagtaccatcgcttggatgtgtctctgcccttcgtatcgcgagggcctttaacggttgaagagacaccacgcgtccagggagagacccagccacagcgcttattgctggccgaggatagcgaggaggaggtggattttctgtcggaaagaagaatggttaagaaatcacggacgacatcctcatccgtcattgtccctgagtccgatgaggaggggcactctccggttctgggagggctaggaccacccttcgcctttaatctgaactctgataccgatgtggaggaggggcagcagccggccactgaagaagctagcagtgcagcacgcaggggggcgaccgtggaggccaagcagagcgaagctgaggttgtgaccgagatccagctagagaaagatcagccactcgtcaaagagagagataacgataccaaagtaaaaaggggggccggtaatggggtcgtcccagctggcgtcatcctcgagcgatcccagccccctggtgaggactccgataccgacgtggacgatgacagtcgcccacctggtaggcccgcggaggtacatctggagcgcgcccaaccgttcggcttcattgactcggatacagacgctgaagaagaacgcatacctgctactccagtggtgattccaatgaaaaaacgcaaaattttccatggagtgggtactcgcggccctggggcacccggcctggctcacttgcaggagagtcaagcaggaagcgatactgatgtcgaagagggcaaggcgcctcaagcagtaccgctggaaaagtctcaagcctccatggtcattaattcagatacagacgatgaggaagaagtgagcgctgcactgaccctcgcccatctcaaggaaagtcaaccagccatatggaatagggacgcagaggaagatatgccacaaagagtagtgctgctccagcgctcacagaccacgacagaacgggattcagatacagatgtagaagaagaggagctacccgtagaaaaccgagaagctgtgctgaaagaccatacaaagatacgggcccttgtgcgagctcatagtgaaaaagaccaaccacctttcggggacagcgatgatagcgttgaagcagacaaaagcagccctggtatccatcttgagaggtctcaagcaagtactaccgtggatataaatactcaggttgagaaagaggtccctcctgggagcgcaattatccacatcaaaaaacaccaggtatcggtcgaaggaaccaatcagaccgacgtcaaagcagtggggggcccagcaaaattgctggtggtttccctcgaagaagcatggcctcttcacggggattgcgaaaccgatgcagaggagggtacctccctcaccgccagtgtggtcgctgatgtgagaaagagccagctgccagccgagggagatgctggggcggaatgggctgcggccgtgctgaagcaggaacgcgcacatgaagtcggggcacaagggggtccaccagtggcccaggtggagcaggatctgccaataagccgcgagaacctgactgatttggtggtggacacagatacgttaggcgagagtacacagccccagagggagggtgctcaggtacctaccggccgggagagggagcagcatgtcggaggcactaaggatagtgaggataactacggcgattctgaagacctagatcttcaggctacgcaatgtttcctcgaaaatcagggactggaggcggtgcagtctatggaggacgaaccaacacaggcctttatgctaactccacctcaggagttgggccctagtcactgttccttccagacgaccggtacccttgacgagccctgggaggtgctggccacacagcctttctgtctgagagagagtgaagactcagagacgcagccatttgacactcatctcgaggcctatggaccatgcttgagccctccccgcgccataccaggcgatcagcatcctgagtcccccgtccatacagagcctatgggcatccaaggcagaggtcgccagaccgtagataaggtaatggggattcctaaggaaaccgcagagcgcgtagggcccgagaggggcccactggaacgggagactgaaaagctactcccagaaagacagactgacgtgaccggggaagaggagctcactaaaggcaagcaagatcgcgagcagaagcagctgctcgccagagatacccagaggcaggaatccgacaagaacggggagagcgcgagcccagagcgcgatcgggagagcctgaaagtagaaattgagacctccgaggaaattcaggaaaaacaggtccagaagcagacgctgccctcaaaggcttttgagagagaggtcgagagaccggttgctaatagggagtgcgatccagctgagctggaggaaaaagtacccaaagtaatactggaacgcgatacacaaaggggcgaacccgaaggcggcagtcaggaccaaaaaggccaggctagcagcccgacccctgagcctggcgtcggggctggcgacttgcctggtcccacctctgctccagtgccgtctggtagccagtcagggggaagagggtcccccgtgagtccccgccggcaccagaagggcctgctgaattgtaaaatgccaccggctgagaaagcttctcgcatcagagccgccgaaaaggtttcaagaggggaccaggaatcacccgacgcttgccttccacctacagtcccagaggctcccgctccgccgcaaaaaccactgaatagccagagtcagaagcatctggcccctccgccactgttgagcccactgttacccagcattaagcccaccgtccggaaaacacggcaggacggaagccaagaggctcctgaagctcccctgtcttccgagttagagccctttcatccgaaacctaagatcaggactaggaaaagctcgagaatgacccctttccccgccaccagtgccgccccaaaacttgaaccaagtacttcaacagaccagccggtgactcctgaacccacttctcaagccacccgcggacggacaaatagatcttcggtgaagacccccgagacggtggtgcctactgcacctgaactgcagccaagcacctctactgatcagccagtgacacctgagccgacaagccaggcgacgcggggaagaacagatcgaagctctgtaaaaacccccgagactgtggtcccaacagcgccagaactgcaggcttctgccagtactgaccagccagtcacgtctgagcctacgtccaggacaacccgcggtcgtaagaatcgttccagcgtgaagactcccgagaccgtagtacccgcggcacccgccctgcagccttccacgagtaccgaccagccagtcaccccagaaccgacatccagggctaccagagggcgcactaaccgctcctccgttaagactcctgaatcaattgtcccgatagcccctgaactgcagcctagtactagcagaaatcagctggtaacaccagagcctacctccagggccacaaggtgtcgtacgaaccgttcctcagtgaaaaccccggaaccggtagttccaacagctcctgaaccgcacccaacgacaagcacggatcagccggtcacccctaaactcacctccagggctaccaggagaaaaaccaaccgcagttccgtcaagacaccaaaaccagtcgagcccgctgcaagcgacctagaacctttcaccccaaccgatcagtctgtcaccccggaggccatagcccagggcggacagagcaagacactgcgctcctctaccgtccgcgccatgcctgtgccaactactcccgagttccaaagccccgtcacgaccgatcagccaatcagccccgaaccaataacacagccttcgtgcatcaaacggcagagggcggcaggtaatccaggaagtctggctgctcctatcgaccacaaaccttgtagcgcgcccttagagcccaagtcacaagccagtcgaaaccaaagatggggggccgtacgcgcagccgaaagtctcacagcgatcccagaacctgcctcgcctcaactgttagagactccaatccacgctagtcaaattcagaaggtggagccggcagggcggagccgcttcacaccagagctccagcctaaggcctctcagagcaggaaacgtagccttgctaccatggactcacctcctcaccaaaaacagccacaacgcggtgaagtgagccagaaaactgtgataatcaaggaggaggaagaagataccgcggagaaacccggaaaagaagaggatgttgtcacaccaaagccgggaaagaggaagcgcgaccaggccgaggaagaaccaaatagaattcctagccggtccctgcggcggacgaagctgaaccaggagtcaaccgcgccgaaggtgctgttcaccggcgtggtggacgcccgaggtgaacgggcagttcttgcgctcggcggatctctcgcgggcagcgcagcggaggcgagtcacctcgtcactgatcggattcggagaacagttaagtttctttgcgctctcggccgtggcattcccattctgtcattagactggctccatcagtcccgcaaggctggattctttctcccacccgacgaatatgtggttaccgatcctgagcaggaaaagaattttgggtttagtctgcaagacgctttgagccgggcacgagagcgcagactcctggagggctatgaaatctacgtgacccctggagtgcagccacccccaccacagatgggggagataattagttgttgcggggggacgtacctgccttctatgcccaggagttataaaccccagagagtagtcatcacctgtccgcaagatttcccccactgtagtattccactgcgggttggcttacctctactgtcccccgaattcctcctgacaggtgttctcaagcaagaggccaaacctgaggctttcgtcctctccccccttgaaatgtctagtacatag

SEQ ID NO: 194537 - DNA, 5478 bp, synthetic construct
  misc_feature 1..5478: note = Description of Artificial Sequence: Synthetic coding sequence
  source 1..5478: mol_type = other DNA
atggaggacacccaggccatcgactgggacgtggaggaggaggaggaaaccgagcagagtagcgagagcctccgttgcaatgtagagcccgtaggccggctgcatatcttctcaggcgcccatggccctgagaaggacttccctctgcacctggggaaaaatgtagtaggacgcatgccagactgctccgtagccttaccctttccaagcatctcaaaacagcatgcagagatcgaaatcttggcatgggataaggcccctatcctgcgcgactgtggctcactgaatggcactcagattctccgcccaccgaaagtgctgtcccctggcgtgtctcatcgactgagagaccaggagctgattctctttgcagacctgctctgccagtatcaccgccttgatgtttcactcccattcgtgtcccggggcccacttaccgtggaggagacacctcgcgtgcagggggagacccagcctcagcggttgttgttggcggaagattctgaagaagaggtcgacttcctgagtgagcggagaatggtgaagaaaagtagaacgacatcatcttcagtaatcgttccagagtccgacgaagaggggcacagccccgtgctaggtggtctcggtccacccttcgctttcaatttgaattcagatacggatgtcgaagaaggccagcagccagccaccgaggaggccagtagtgccgcaagacgtggcgcaacagtggaggctaagcagagtgaggctgaggtagtgacagagatacagctggaaaaggaccagccgctcgtgaaagaacgggataacgacacaaaagttaagaggggagccggcaacggggtcgtgcctgccggggtcattctggaacggtcccagccccctggtgaagactctgatactgacgttgatgacgactcaagaccaccgggtcgtccggccgaagttcaccttgaacgggcgcagccgtttggcttcatcgatagtgacaccgatgctgaggaggagcgtatacctgcaactcccgtggtgatacctatgaagaagcgcaagattttccacggtgtggggactaggggcccgggagcacctggactggctcacctgcaagagagccaggctgggagtgatacggacgtagaggaggggaaggcacctcaggccgtgcccctcgagaagtcacaggcgagcatggtaataaactcagacactgatgacgaggaggaggtgtccgcagcccttactctggcccacctgaaggagtcccaacccgccatctggaatcgcgacgccgaggaggatatgcctcagcgggtggtcttactgcagcgttctcaaacgacaacagaacgggacagcgacacagacgtggaggaggaggaactccccgtcgaaaatagagaagctgtccttaaagaccacacaaagatcagggccttggtgcgtgcccactccgagaaggaccagcccccatttggtgactctgatgactcggtagaggcagacaagagttcgcctggaattcacttagagagatcacaggccagcaccacagtcgacatcaacacccaggtcgagaaggaagtgcccccaggcagcgccattatccacatcaaaaagcatcaggtaagtgtggaggggacgaatcagactgacgtcaaggccgtgggaggccccgcgaaacttcttgtagtcagtctggaggaggcatggcctttgcacggtgactgcgagacagatgccgaagagggaactagtcttaccgctagcgtggtagcagacgtcaggaagagccaacttccagcggaaggtgatgctggtgcagagtgggccgcggccgtgttaaaacaggaacgagcgcacgaagtgggcgcacagggcggacctcccgttgctcaggtagagcaagacctgccaattagtcgcgagaaccttactgacctggtggtagatactgatactctcggcgagtccactcagccacagcgagagggcgcacaagtgccaactggtcgggagcgggagcagcatgtgggaggaactaaagacagcgaagacaactacggcgactccgaggatctcgacctccaggctactcaatgcttcctggagaaccagggcctcgaagcagtgcagtccatggaggacgagcccacccaggccttcatgctgaccccaccacaggaattgggaccttcccactgctcattccagacaactgggctcctgaattgcaagatgcctcctgcggagaaagcaagtcgtattagggctgctgagaaagtatcacgaggggatcaggagagcccagatgcttgcttgcctccaaccgtgcccgaagccccagcacctccacagaaaccgctgaactcccagtcccagaagcatctggccccgccacctctacttagccccctccttccaagtattaagcccacagtacgtaaaacgcgccaggacggctcacaggaagctcctgaagctcccctgagctcagagcttgagccttttcaccctaagcctaaaattagaacgcgcaagtctagtcgcatgacccccttccctgcaacctctgctgcacccgagccgcacccatccacaagcactgcccaaccagtgactccaaaaccgacatcgcaggccacgaggtcgcggacaaacaggagtagtgtcaagaccccagagccagtggtgcccactgcccctgaactccaaccctctacctcaactgatcagccggttacctccgagccaacttctcaggtgactcgcggcaggaaaagccgctcttccgtaaagactccagaaacagtagtgcctaccgcattagagctccaacccagcacttccacagatcgacccgttactagcgagccaacctcacaagctacccgcgggcgcaaaaaccgctcctctgtgaagacccccgagccagtggtcccgaccgccccggaactccagccatccacatccacagaccagcccgtcacaagtgagcccacgtaccaggccaccagaggacgaaagaaccgatcctctgtgaaaacaccagagccagtggtacctacagccccagaactgcgcccatcaacgagtacagatcggcctgttacccctaagcccacatccagaaccactcggtcaagaaccaacatgtcctcggtgaaaacccccgaaaccgtcgtgcctactgcgccagagcttcagatctcgaccagcaccgatcagcccgtgacccctaagcctacttcaagaacgactagatctcgcactaacatgagcagcgtgaagaaccctgaatccacggtgcctatcgcacctgagctgccaccgtccacgagtacagaacaaccagtcaccccggagccgacctctcgcgcaacaaggggtcgcaagaacaggagttctgggaagacaccagaaacacttgtgccaactgcccctaagttggaaccctccacgagcaccgaccagcccgtcactccagaacccaccagtcaggctactcggggcagaacaaaccggtcatcagttaaaacacctgagacggttgtgcccacggcccctgagctccagcctagcaccagcaccgaccagccagtcactccagagccaacgtcccaagccacgcgcggtcggacagatcggtcatctgtgaagacaccagagaccgtggtgcctaccgccccagaactgcaagcttccgccagtacagaccaacccgtgacctcagaacccacctcaaggaccacaagggggcgtaaaaatagatcctccgtgaaaacaccggagactgtggtgccagcagcaccagagttgcagccgtccacgagtacggaccagccagtgacaccagaacccacatccagagctacacggggacgcaccaaccggagtagcgtgaagacccctgaatcaattgtccccattgccccagaactgcaaccctccaccagtcggaatcaactggttactcccgaaccaacctcacgcgcaacgcgctgcagaaccaacagatcgagcgtgaaaactcctgagccagtggttcccaccgcacctgagcctcaccctaccacctccactgatcagccagtcactccgaagctgaccagtcgcgcgacccgaaggaaaaccaaccgttcctccgtgaagacacctaaacctgtggagccagcagctagtgacctggagccatttactcctacagaccagtcagttacgcccgaggcaatcgcccagggcggccagagcaagacacttagatccagcaccgtgcgcgccatgcccgtacccaccaccccagaatttcagtcccctgtcactacagatcagcccatctccccagagccaatcacacaaccctcatgcattaagaggcagcgcgcagcaggtaatcccgggtctctggccgctcccattgaccataagccttgctcggcaccattggagcccaagtcccaggcatctcggaaccagagatggggcgcagtccgggctgcagagtctctcacagccatccccgaaccagcctccccccagctgctcgagacgccaatccacgcatcccaaattcagaaggtagagcccgccgggcggtcccggtttactccagaattgcaacccaaagctagccaatcccggaagcgatcgcttgctacaatggactctccaccacatcagaaacagcctcagagaggggaggtgtcacagaagacagtgatcattaaggaggaggaggaggacacggcagaaaagccgggtaaggaagaggacgtggtgacaccaaagcccggcaaacgaaagagggatcaggctgaggaggagcctaaccggattcctagccggagccttcgccgcacaaaacttaatcaggaatccaccgctccaaaagtcttgtttacaggggtagtggatgcccggggcgaacgggccgtactggccttgggcggttccctggccggctcggccgctgaagcctctcaccttgtgactgatcgtattcgaaggactgtgaagtttttatgtgcactggggagggggatccctattctgagcctagattggctccaccagtcaaggaaggccgggttttttttgcctccagatgagtacgtggtgacagacccagagcaagaaaaaaactttgggttctcccttcaggatgctctaagcagagctagggagcgccgactgttggaggggtatgaaatttatgtgacccctggcgtacagccaccacccccacagatgggcgagataatttcttgttgcggaggcacctacctgccttcaatgccaagaagctataaaccccagagagtagttatcacatgtcctcaggatttccctcactgcagtatccctctgcgggtcggcttgcccctgctcagtccggagttcctcttgaccggggtactcaagcaggaagccaagccggaggcattcgtgctctccccactggagatgtctagcacttag

SEQ ID NO: 194538 - DNA, 4968 bp, synthetic construct
  misc_feature 1..4968: note = Description of Artificial Sequence: Synthetic coding sequence
  source 1..4968: mol_type = other DNA
atgtaccaccggctggacgtgagcctgcccttcgtgagccggggccccctgactgtcgaagaaaccccccgggtacagggggagacccaacctcagcggctcctattagcagaagattctgaggaggaggtagattttctctcagagagacgcatggtgaaaaagtcacggactacaagcagctcggtgatcgtgcccgagagtgatgaagagggacattcacccgttctcggaggattgggtccaccatttgcctttaatctcaattcagatactgatgtcgaagaaggacagcagccagctacagaggaagcttcaagcgcggcccgtcggggggccactgtggaggcaaaacagtccgaagctgaggtggtgaccgaaattcagttggagaaggatcagccccttgtgaaagagcgcgataacgacaccaaagttaagagaggcgccgggaatggggttgttccagccggagtaattctcgagagatcccagcctccgggggaggacagtgacactgacgttgatgacgatagcagaccacctggacggccggccgaggtccacctggagagggcacagcctttcggcttcatcgatagcgacacagacgccgaagaggaacgaattcctgccacacctgttgtgattccaatgaaaaagcgcaagatcttccacggcgtaggtacccgggggcccggcgccccgggcttggcacacctgcaggaaagtcaggctggttcagataccgatgtcgaggagggaaaggcccctcaggcggtgcctctggagaagtcgcaggcttctatggtcataaactccgatacagatgatgaggaagaagtgagtgccgctctgacgttggctcatttgaaggagtcgcagcctgccatctggaatcgagacgcggaggaagacatgcctcagagagtggtgctcctgcaacgctctcagacaactacggaaagagactcggataccgacgtcgaggaagaggagctccctgtcgaaaatcgagaggccgtgctgaaagaccatacaaagattcgcgccctcgtccgcgctcattccgaaaaagatcagcccccattcggggatagtgacgactctgtagaggccgacaaaagcagccccgggatccatctggagcggagccaggcgagtactaccgtggatattaatactcaagtagagaaggaggtaccaccaggctccgcgatcatacatattaagaaacaccaggtatcagttgaaggtacaaatcaaaccgatgttaaggccgtgggcggacccgccaagttactagtcgtcagcttggaggaggcatggcctttacatggggactgcgaaaccgacgcggaagagggcacctcactaaccgcaagcgttgtggccgatgtccggaaatcccagcttccagctgagggagacgctggcgcagagtgggcagccgcagtgctgaagcaggaacgggcccatgaggtcggggcgcagggtggacctcccgtggctcaagtcgagcaagacctccccatctccagggagaatcttacagacctagtggtggacacagatactctgggcgaaagcacacagccccagcgcgaaggcgcacaggtgccgaccggtcgtgagcgcgagcagcacgtaggcgggactaaagattctgaagacaactacggcgatagtgaggacctggacttgcaggctacccaatgtttcctggagaaccaggggctcgaagtacagtctatggaggatgaacctacacaagccttcatgctcaccccccctcaagagctaggcccgtctcactgctcgttccaaacaacagggctcttaaactgtaagatgcctccagccgagaaggctagccggatcagggctgccgaaaaggtatcccgcggcgatcaggagagccccgacgcatgcttgccacccacagtccccgaggcccccgcccctcctcagaagcctctcaattctcagagccagaaacatctggcacccccacccctgttgtctccattactgccctcaatcaaaccgacagtgaggaagactcgccaggacggaagccaagaagccccagaggcaccactgtccagtgagttggagccgttccatccgaaacccaaaatccggacccgcaaaagttcacgaatgaccccattccccgctacctccgcggctccagaacctcatccgagcacttcgacagcccagcctgttacacctaagcccacctcccaggctacgagatcgcgcacaaatagatccagtgtgaagacaccggagccggtggtccccaccgcaccagagttacagcccagtacaagcaccgaccaacccgtcacaagcgaacccacttctcaggtgacccgaggtcggaaaagtaggagttccgtgaaaactcccgaaacagtggttccaaccgcattagaactccagccgtctacctccacggatcggccagtaactagcgaacctacttctcaggccacaaggggacggaaaaataggtccagcgtcaagacacccgagccggttgtgccaacagcaccagaactgcaaccaagtacgtcaactgatcagcccgtgacttcagagccgacgtatcaggccactaggggaaggaagaatcggtcttcggttaagaccccggaacctgtcgtccctaccgcccccgaactccgccccagcaccagcacagacaggcccgtgacgcccaagccaacatccagaactactagaagccgtactaatatgtcaagcgttaaaaaccccgaatcgaccgtccctatagcccctgaactgcctccgtctacgtcaaccgaacagccggtgactcccgagccaacttctagggctacacggggcagaaagaatagaagctccggcaaaactccggaaaccctggtacctacagcccccaagcttgagccttccacatctactgatcagccagttactccggaacctaccagtcaggcaacgaggggacgtacaaatagatctagcgtgaaaacacctgaaacggtggtccctaccgcccccgagcttcagccctcgacttcaaccgatcagcccgtgactcccgagccaacaagtcaggctactaggggcagaactgatcgaagcagcgttaagacaccagagactgtggttccgacggcgcctgagctgcaagctagtgcttcaacagaccagccagtcacatccgagcccaccagtcggaccacccgagggcgaaagaataggtcttcagttaaaactccggagacggtggtgcctgccgcacccgagctccagcccagcactagtacagatcaacctgtgacccccgagccaacgagtcgcgccactaggggaaggacaaatcggtctagtgtgaagacgccagaaagcatcgtcccaatcgctccggagttacagccctctacatccagaaatcagcttgtgactcctgagcctactagtagggccacccgctgtcggacgaacagatcctctgtaaagactccagagccagtagtgccgacagcgcccgaaccacatcccaccacatcaacagatcagcctgttacgccgaagcttacctcccgtgctacaaggcggaagacgaaccgctcgagtgtcaagacacccaagccagtagaacccgcggcttctgatctggagcctttcactcccactgaccagtcagtcaccccggaagcaattgctcagggaggtcaaagcaagaccttgagatcctcaaccgtgcgggccatgccggtgcccaccacccccgagtttcaatctccggtgactacagaccagcctatctctcctgagcctattactcaaccgtcctgtatcaaacgccaacgcgccgccgggaaccctggtagcctggcggccccaatagaccataaaccatgttctgccccccttgaacccaagtctcaggcgtccagaaatcagcggtggggagcggttagagcagcagagtcactcacagctattccagagcctgccagccctcaattactcgagacgcctattcacgcatcgcagatccaaaaggtggaacctgctggccgcagtcggtttaccccagagctgcagcccaaagcatcccaatcccggaaacgcagccttgcaactatggattcacctccacaccagaaacaaccacagagaggggaggtcagccaaaagaccgtcatcattaaggaagaggaggaagacaccgccgagaagcccggaaaggaggaggacgtggtaacacccaaacctggaaagaggaagagagatcaggccgaggaggagccaaataggatacctagtagaagcctgcggagaaccaagttgaaccaggagagcacggccccaaaagtgctgttcacaggggtcgtggatgcgagaggagagcgagccgttttggccttgggagggagcctggctggcagtgccgccgaggccagtcacctagttacagacaggatcagacgaaccgtaaagtttctttgcgctctgggcaggggaattcctattctgtcactagattggctgcatcaaagcagaaaggccggattctttctgccccctgacgaatacgtagtgaccgatcctgagcaggagaaaaatttcggattttctctgcaggacgcattgtctcgtgccagagagaggaggttgctggaaggctacgaaatttacgttactcccggtgtgcaacccccccctccacagatgggcgagattatcagctgttgcggcggtacttaccttccgtccatgcccagatcgtacaaacctcagcgtgtcgtaataacctgcccccaggacttcccccattgctcgatccctctgagggttggactgcctttactatctccagaattcctcctcactggcgtcctgaaacaggaagccaaaccagaggccttcgtgctgtccccacttgagatgagttccacatag

SEQ ID NO: 194539 - DNA, 4968 bp, synthetic construct
  misc_feature 1..4968: note = Description of Artificial Sequence: Synthetic coding sequence
  source 1..4968: mol_type = other DNA
atgtaccaccggctggacgtgagcctgcccttcgtgagccggggcccgttgaccgtcgaggagacaccgcgggttcagggtgagactcagccacaacggctgttgctggccgaggattccgaagaagaggtagattttttgtcagaacgaaggatggtaaagaaatccagaaccacaagttcctctgtcatcgtgccagagagcgatgaggaaggccactcgccagtgctaggaggtctgggcccgccgtttgccttcaacctcaattctgacacagatgtggaggagggccaacagccagccaccgaggaggcttcgagcgcagctcgcaggggcgctaccgtagaagcgaaacagtccgaggcagaggtagttaccgaaatacagctggagaaggaccaacctttggtaaaagaacgtgacaacgacactaaggtgaagaggggcgctggaaatggggtcgtgccggccggcgtcattctggagaggtcccagccccctggcgaggattccgacaccgatgtggatgacgacagtcggccgcctgggaggccagcagaggtccatctggaaagagcccagcctttcggcttcatcgacagtgacaccgacgccgaagaggaacggatccctgctactcccgtggtgatcccgatgaagaaaagaaaaatctttcacggggtcggaacacgaggtccaggtgcacctggcttagcacacctccaagagtcacaggcgggcagtgacacagatgttgaagaaggcaaagcacctcaggcggtgccgctagagaagagtcaggccagtatggtcattaactccgataccgacgacgaggaagaggtttcagcggccctgacactcgctcacctaaaagagtcgcagccggccatctggaaccgggatgctgaagaagatatgccacaaagagtggttctgttgcagaggtcgcaaacgaccacagaacgtgattctgacaccgatgtcgaagaagaagagctgcccgtggagaatcgggaggctgtgctaaaagaccatacgaagatccgagcactcgttcgagcacactccgaaaaggaccaaccccctttcggtgattccgatgatagtgtcgaggctgacaaaagctcacctggcattcatctggaacgctcacaagcatccactaccgtcgacatcaatactcaagtggagaaagaggtaccacctggttccgccattatccatatcaaaaagcaccaggtctccgtcgaggggaccaaccagacagacgtgaaggctgtgggcggacccgctaaactgttagtcgtgagtctcgaggaagcctggcctctccacggcgattgcgagactgacgccgaagagggtacctcactaacagccagcgtagtggccgatgtgcgaaagagccaactgcccgccgagggggatgctggtgccgagtgggcggcagccgtgttgaagcaggagagggctcacgaggtaggtgctcagggaggcccgccagtggcccaagtggaacaggatctcccaattagcagagaaaacctaacagacctggtggtagataccgataccttgggtgaaagtactcagcctcagcgggagggggctcaggttcctactggacgggaacgggagcagcacgtcggtggtactaaagacagtgaggacaactacggagacagtgaggatctagacctacaggcaacgcagtgcttcctcgaaaatcaaggtttagaggtgcaaagtatggaagatgagcccacgcaagccttcatgctaactccaccacaggaactgggtccctctcattgcagtttccagacaactggcctcctcaattgtaaaatgccaccagctgagaaggcttctcggatccgtgccgctgagaaggtgtcccgcggcgatcaggaatcacctgatgcatgcctccctcctacggtgccagaagctccagcacctcctcagaagcctttgaactcgcaaagtcagaagcacctggcccccccacctctgctttctccactgctgccctcaataaaaccgacagtgcgcaaaacccggcaggatggaagccaggaggcccctgaagcccccctgtcatccgagctcgaaccttttcatcccaagccgaaaatccgaacccggaaatccagtagaatgactccatttcctgctacaagcgcagccccagaaccacaccccagcactagcacagcccaaccggtcactcctaagcccacctctcaggctacacgaagcaggaccaacagatcttctgttaaaaccccagagcccgtcgtgcctactgcccccgagctgcagccttcaacaagcaccgaccaaccagttactagtgaacccacctcccaggttacgaggggacgaaagtctcgctcatcagttaaaactcccgagaccgtggttcctaccgctctagagctgcaacccagcacaagcactgacagaccagtgacatcggagccaaccagtcaagctacccggggcaggaagaacaggtcttccgtgaagactccagagcccgtagttcctaccgctccagagcttcagccttctaccagcaccgatcagccagtgacctcggaaccgacgtaccaggccacacggggccgaaagaatcgcagttcggtgaaaacgccggagcctgtagtgccaactgccccagagctcaggccctctaccagcaccgaccgtcccgtcactccaaagccaacctcccgaacaacccggtccaggacaaacatgagctcagtaaaaaatccggaatccactgtgcccatcgcacctgagctgccgccgtctacatccactgaacagcctgtgactccagagcctacgtccagggcaacaagagggagaaaaaatagaagctcaggaaaaacaccggaaaccctggtgccaactgcgcccaagcttgagccaagtacgtcaaccgatcagccggtgactcccgagccaacctcccaggctacccgcggtagaaccaatcgttcatcagtgaagacgcccgaaacagtagtgcctactgcccctgagttgcaaccatcaacgtcaactgaccaacctgtcacccccgagccaacatcccaggcgacgcgagggcggacggaccgatctagtgtgaaaacccctgagaccgtggtccctacggcgccagaacttcaggcatctgcctcaactgatcaacccgtgactagtgaaccaacgtctagaaccactcgcggcagaaagaaccggtcctccgtgaaaactccggagacggtcgtaccagccgcacccgctttacaaccctcaacaagtactgatcagcctgtgacacccgagcccacttccagggctactagaggtcggactaatcgctccagtgtaaagacgcccgagtctattgtgcccatcgctccagagctccaaccgagtacttcccgaaaccagctggtaacccctgaacccaccagcagagccaccaggtgtagaactaatagatccagtgtgaaaacccccgagcccgtggtgcccactgcgccggagcctcacccaactacatctacggatcagccagtcacccctaaactcacttcacgcgccacccgcagaaagacgaacagaagttcagtgaaaacacctaagcccgtggagcccgccgccagcgacctcgagcccttcactcctaccgaccagagcgtaaccccggaagcaatcgcccaaggtggccagtcaaaaactctccgctcatccaccgtccgcgctatgcctgtacccaccaccccagagtttcagtctcccgtgacaaccgaccagccaatcagtcccgagccaattacgcaaccaagctgtataaagagacagcgggcggccggcaatcctggctccctcgccgcgcctatcgatcacaaaccttgctcggcccccctggaaccaaaatcccaagcctcacgaaatcagcggtggggcgccgtgagggctgctgaaagcctgacggccatacccgagccggcatccccacagttgctggaaacccctatacatgcctcacagatccaaaaggtagagcccgccggtagaagtcggttcaccccagaactgcagcccaaggcctcccagagccggaaacgatctttggctacaatggactctccccctcatcagaagcaacctcagaggggcgaagtctcacaaaagacagtcattataaaggaagaggaggaggataccgcggaaaagcctggcaaggaagaggacgtagtgacgcctaaacccggcaaaagaaaaagagatcaagccgaggaagaacccaaccggatcccctctcgctcattacgcaggacgaagctcaatcaagagtctacagcacctaaggtgctgttcactggagtggtggacgcacgcggggaacgggccgtcctggctttgggggggagcctggccggaagtgccgcggaagcaagccacctggtaaccgaccgtattagacggactgtgaagttcctctgtgctctgggacgggggattcctattctgtctctcgactggttgcaccagagtcggaaggccggcttcttcttgccccccgacgaatatgtggtgaccgaccccgagcaagagaaaaattttggttttagcttacaagacgccctctcccgtgcccgggaacgaagactccttgaagggtacgagatctacgtgacacccggcgttcagccgccacctcctcagatgggtgagattattagctgctgtggcggaacctacctgccttcaatgccgcgatcatataagccccagagggtggtgatcacctgcccccaagatttcccgcattgttctatacccctgagggtgggcctgccgctgctctcaccagagtttctcttgacaggcgtactgaagcaggaggcaaagccagaagcctttgtattgagccccctggagatgagctccacatag

SEQ ID NO: 194540 - DNA, 666 bp, synthetic construct
  misc_feature 1..666: note = Description of Artificial Sequence: Synthetic coding sequence
  source 1..666: mol_type = other DNA
atggaggacacccaggccatcgactgggacgtggaggaggaggaggagacagaacagagttccgaatctttacggtgcaacgttgagcctgtgggacggctgcatatcttcagcggtgcccacgggcctgaaaaggattttcctcttcatttgggcaagaacgtcgtcggaagaatgcccgattgttccgtcgctcttccttttcccagcattagtaaacagcacgctgagattgaaatacttgcttgggacaaggccccgattttgcgcgactgcggctccctgaacgggacacaaatactgtcttccagtctgccaccaccacagacgtccctccttcctctctccttaaggctcaggctactcggcgaagagcagatcgaccccctgagccgtcttcttaaacaactctccccacagccacttagctaccggctacccccacctcagacttccctctccccgctgtcacctcacttgggaccactgggcgaggaaaagataggaccgctttcccggccactaaaacagctctgcccacagcctctatcgtctagtctgccacctccccagaccaacctgagccctctatcccctcaccttgggcccctgggggccggccaaattggcccgttgagccgccctctgaaccaactatccctgtag

SEQ ID NO: 194541 - DNA, 666 bp, synthetic construct
  misc_feature 1..666: note = Description of Artificial Sequence: Synthetic coding sequence
  source 1..666: mol_type = other DNA
atggaggacacccaggccatcgactgggacgtggaggaggaggaggaaaccgagcagagtagcgaatcactaagatgcaacgtcgaaccagtcggacgtctccacatttttagcggtgcccacgggccagaaaaagacttccccttgcatctaggcaagaacgtagtgggccgcatgccagactgttctgttgcgctgccctttccctcaattagcaagcagcacgctgaaatcgaaatcctggcttgggataaagctcctatcctgagagactgcgggtcactgaatggcacacaaatcctgagcagcagcttaccaccaccacagacttcgttgctgcctctctccttgcgcttgcgcctcttgggggaggaacaaattgatcccctgagcagattgcttaagcagttgtcccctcagccactttcctaccggctgcctcccccacagacttcgctgagcccgctttctccacaccttgggcctctgggggaggagaagataggtcctctgtctcgtccactgaaacagctctgtccccagcctctgtccagttcattgcctccaccccagaccaatctgagtccactatccccccatctgggacccctcggcgctgggcagataggcccgctttcccgccccctgaaccaactgtctctctag

SEQ ID NO: 194542 - DNA, 738 bp, synthetic construct
  misc_feature 1..738: note = Description of Artificial Sequence: Synthetic coding sequence
  source 1..738: mol_type = other DNA
atggaggacacccaggccatcgactgggacgtggaggaggaggaggagaccgagcagtcttcagaaagtctacgctgtaatgtggagccagtcggaaggctacatatttttagcggagcccacggcccagagaaagactttccactacacctgggaaagaatgtggtgggtaggatgcccgactgtagcgtcgccttgcccttcccaagcataagcaaacagcatgccgagatcgaaatccttgcctgggacaaagctcctattctgcgagattgtgggtcattgaacgggacccagattcttaggccgcccaaagtgctaagtccgggcgtgagtcacagactgagagatcaagagctcatactatttgctgacctcctctgtcagtatcatcgtctggacgtttccctccccttcgtgagtagagggccgctaactgtggaagaaacccctagagtgcaaggggagacacagcctcagaggctgctgctggccgaggatagtgaggaggaggttgactttctttcagaacggagaatggtcaagaaaagcagaaccacctctagttctgtgattgtcccagagtcagatgaagaaggccactccccagtgctcggaggcctgggacccccatttgcctttaacctgaattccgatacagacgtcgaagagggccagcagccggcaacggaagaggcctcaagcgcagcccggcgtggcgcaactgttgaggcttag

SEQ ID NO: 194543 - DNA, 4968 bp, synthetic construct
  misc_feature 1..4968: note = Description of Artificial Sequence: Synthetic coding sequence
  source 1..4968: mol_type = other DNA
atgtaccaccggctggacgtgagcctgcccttcgtgagccggggcccactgactgtggaggaaacaccgagggtgcagggggagacccagcctcagaggctgctcctcgccgaagatagcgaggaggaggtggacttcctgagcgagcgtaggatggtaaagaaatcaaggaccaccagcagtagtgtgatcgtgcccgagagcgacgaggaaggccattccccagtgcttggaggcctaggtcccccatttgctttcaacctgaactccgatactgatgttgaggagggtcaacagcccgctactgaggaggctagctccgccgcacgaagaggtgccactgtcgaggccaaacagagtgaggcagaagtggttactgaaatccagctcgaaaaagatcagccgctagtgaaagagagggacaatgatacgaaggtcaaaaggggagccggcaacggagtcgttcctgccggagttattttagaacgcagtcagcctcccggtgaggactccgataccgatgtcgacgatgatagccgtccgcctgggaggccagccgaggtccatctagagagagcccagcccttcggatttatcgacagcgacactgacgccgaggaggagcggatccctgctacgcctgtcgtgatccctatgaagaaaagaaagatctttcacggggtcggcacacgaggtcccggggcgcctggtctggcccacctccaggaatcacaggctggctccgacactgatgtcgaagaaggaaaggcacctcaagcagtgccattagagaagagccaagcaagtatggtaattaatagtgatacagacgacgaggaagaggttagcgcggccctcactctggctcaccttaaagagagtcagcccgccatctggaatagggatgccgaggaagatatgccacaacgggtggtgttgttgcagcggagccagaccacaacagagagagatagcgacaccgacgttgaggaggaggaactgccagtggagaacagggaagctgtgcttaaggatcatacaaaaatcagagccctcgtcagagcgcactccgagaaggatcaacctcccttcggggactctgatgactccgtggaagcagacaagtcttctcctggtattcatttagaaaggtctcaagcttccaccacggtggatatcaacacccaggtggagaaagaagtaccacccggctctgccatcattcatatcaagaaacaccaagtctctgttgagggcacgaatcagaccgacgttaaagccgtggggggtcccgcaaaactccttgtggtgagcctggaagaggcttggcccctgcacggagattgtgaaactgatgcagaggagggcacctccttaactgcctccgtcgtagcggatgtcagaaagagccagctgccagcagagggtgacgcaggcgctgagtgggccgccgccgtgctcaagcaggaaagagctcatgaggtcggagcccagggaggcccacccgtagcccaggtggaacaggatctgcctatatctagagagaatctgacagacttagtcgtagacacagacacattaggggagagcacacagccacagcgcgagggggcccaggtccccaccgggcgagagcgggagcagcacgtgggtggcaccaaggattccgaggacaactatggggattctgaagaccttgatcttcaagctacacagtgtttcttagaaaaccagggcctggaggtacagtcaatggaggatgaacccacccaggccttcatgcttacacccccccaggagctcgggccatctcattgctcattccaaacaaccggactcctcaactgcaaaatgcccccagccgagaaggcgagtcgtatccgggcggcagagaaggtttctcggggtgaccaggagagcccagatgcatgtctgccacctacagttcccgaggcccccgcacctcctcagaaacccctcaatagccagagccagaagcacttggctccacccccgctgctgtccccactccttccatcaattaaacctaccgtgcgcaaaacaaggcaggacggatcacaggaggctcccgaagcccccctcagctctgagcttgaaccatttcatcccaaacccaagatccgcacccgcaaaagcagcagaatgacccccttccccgccacatcggctgcccctgagcctcatcccagcacctcaaccgcccagcctgttactccaaagccgacctcacaggcaacccggtcacgaacgaacagatcctctgttaagacacccgagccagtcgttcccaccgcaccagagctccagccaagtacatccactgatcaacccgtgaccagcgagcctacatcccaggtcacgcgaggcagaaagagcaggtcctccgtcaagacacctgaaaccgtggttccgaccgctctagagctgcagcctagcacatctactgatcggcctgttacctccgagcccacaagccaggccactcgaggaaggaagaatcgatcatccgtaaagactcccgaacccgtggtgcccaccgcccctgagcttcagcctagtacttctactgatcagcctgtgactagcgagccaacatatcaggctacaagagggcgcaagaaccgctcttcagtcaagacacccgaacctgtagtgcctactgcccccgagctgagaccctcgaccagcaccgataggccagtaacacctaaacctacttcacggacaacgagaagcaggaccaacatgagctcggttaagaatcccgaatctaccgtgccaatcgcccccgagctcccaccttccacctccactgaacagcctgtgacgcccgagcctaccagtcgagccacccgagggagaaaaaataggagttccggaaaaacccctgagaccctggtgcctaccgcccctaagcttgagccctcaacgtcgaccgaccagccagtgacgcctgagcccacctctcaagcaaccaggggcaggactaacaggtcatcagtcaaaacaccagagaccgtggtccccaccgcgcctgaactgcagccctccacatccacagaccaacccgtcacacccgagccaacttcccaggcaacacgtggacggacagatcggtcttccgtgaagacccctgagactgttgttccaactgcccctgaactacaggcatccgcaagcacagaccaacctgtcacgagtgaacctacgagcaggaccaccaggggccgcaaaaacagatcctccgtgaaaacacctgaaacggtggtcccagccgccccggagctgcagccatctaccagcaccgaccaaccagtgacccctgagccaacgagcagggccacacgtggcaggaccaatcggtcctctgtgaagacaccagagagcatagtccccattgcacctgagctccaaccctcaactagccggaatcagctggtaacccctgagcccacttcccgggcgacgcgctgccgtaccaaccgatcatcagtaaaaaccccggagccagtggtccctaccgcgcctgagccacacccaactacgtctacagatcagccggtgactccaaaactgacatcaagggccactaggagaaagaccaaccgaagttcagttaaaacccctaaacccgtggaaccggcagctagcgacctagagcccttcacacctacagaccaaagcgtcaccccagaggctatcgcccagggaggccagtcaaaaacgctgagatcttcaacagtccgcgctatgcccgttcctaccacccccgagtttcagtcccccgtgacaaccgaccagccaatatcacccgagcctattacgcaaccctcctgtatcaaaaggcagagggccgccggcaacccagggtctctcgctgcgcccatagaccataaaccctgttcagcaccacttgaacccaaaagtcaggccagcagaaaccaacgctggggtgctgtgagagccgctgagtcactcacggcaatcccagagccggcctcgccgcaactcctcgaaactcccatacacgcttcccagattcagaaagtggaaccagcgggcaggtctaggttcaccccagaactccaacccaaagcctcccagagcagaaaacgcagtcttgccaccatggattcaccaccccaccaaaagcagccccaaaggggtgaggtgtcccaaaaaacggttataatcaaggaagaggaggaggatactgccgagaaacctggcaaagaggaagatgtggtgaccccaaaaccaggcaagcgcaaacgtgaccaagcagaagaggagcctaacaggattccgagtcgatccttgcgacgcacaaaacttaatcaggaaagcacagcccctaaggtgctctttaccggagtggttgatgcccggggcgagagggccgtcctggctcttgggggcagcctggccggctctgcagccgaagcttctcacctggtgactgaccgtattagaaggacagtcaagttcctgtgcgccctggggagggggatccctatcctttcattggactggttgcatcagagccgcaaggcaggtttttttttgccccccgatgagtacgtggtgaccgatccagagcaggagaaaaactttggcttctccctgcaggacgccctctctcgggcccgggaaaggaggctattggagggctacgagatctatgtgacccccggcgttcagccgcctccaccgcaaatgggggaaattatatcctgttgtggagggacctatcttccatcgatgccaagatcctacaagccgcagagggtggtgataacttgcccacaggacttccctcactgcagtatccccctgcgggtcgggctgcctttactgtccccggagtttctcctaaccggcgtgctcaagcaggaagctaagcccgaagctttcgtcttgtcccccctggagatgagctcaacatag

SEQ ID NO: 194544 - DNA, 5478 bp, synthetic construct
  misc_feature 1..5478: note = Description of Artificial Sequence: Synthetic coding sequence
  source 1..5478: mol_type = other DNA
atggaggacacccaggccatcgactgggacgtggaggaggaggaggaaactgaacaaagtagcgagtctcttcgatgcaatgttgagcccgtgggccgcttgcatatctttagtggcgcccacggtcccgagaaagactttccgctccacctgggcaaaaacgtcgttgggaggatgccggattgttcagtcgctctgcccttccccagcatatccaagcaacacgctgagattgagattctggcgtgggacaaggcacccattctgcgggattgcgggtcactgaatgggacccagatcctccggccacctaaggttttgtctcccggcgtgtctcacaggctgcgggaccaggagttaattcttttcgccgatttactttgtcagtaccacaggttggacgtgagcctcccctttgtatctagggggccactgacggttgaagagacacctcgggtgcaaggtgaaacacagccccagcgccttttgctggcagaagattctgaggaggaggtagacttcttgagcgagaggcgcatggtgaaaaagagccgaaccacaagcagttcggtcatagtacctgaatcggacgaggaaggccacagtcccgtcctgggaggactgggccctcccttcgcgttcaacctgaattccgacacggatgtggaagagggccagcagccagcaactgaagaggccagctctgctgccagacgcggagcgactgtcgaggctaagcagtcagaggctgaggtggtcacagagattcagctggagaaggaccaaccactggttaaggagcgagataacgatacaaaagtgaagcggggtgcagggaatggagttgtcccagccggcgtgatccttgagaggtcccagccccctggggaggacagcgacactgacgtcgacgacgattccaggccacctggccgcccagcggaggttcacctggagagggctcaaccctttggattcattgactccgacacagacgccgaagaggaaaggattccagctaccccggtagtgattccaatgaagaaacgcaagatatttcatggggtgggcacacgcggtcccggcgcccccggacttgcacacctgcaagaatcccaagctggtagtgatacagacgtggaggagggcaaagcacctcaggccgtgcctctggaaaaatcacaggctagcatggtcattaacagcgacaccgatgatgaagaggaagtgtccgccgctctgacactagcccatttaaaagagagccagccagccatctggaaccgtgacgcagaggaggacatgccccaaagggttgtgctgttacagcggagccaaactacaacggagcgtgattccgacaccgacgttgaagaggaggagttgcccgttgagaatagagaggcggtcctcaaggatcataccaagatcagggcactggtacgcgcacattcagaaaaggaccagccaccttttggggactccgacgactcggtagaggctgacaagtcttcccctggcatccacctagagcgcagccaggcctctaccaccgtggatatcaatactcaggtcgaaaaggaagtgccccccgggtcagcaatcatacatattaaaaagcaccaagtgtccgttgaagggaccaaccagacagacgtgaaagctgtggggggtcctgcaaagttgctggtcgtatctttggaggaagcttggcctctgcatggggattgcgaaactgacgccgaggagggaacatccttgactgcctccgtagttgcagacgttcgcaaaagtcagttgccagccgaaggagacgcaggtgctgagtgggccgccgcagtcttaaaacaggaaagagctcatgaagtcggtgcccagggggggccgcctgtggcccaggtcgaacaagacctcccaatttcgcgggaaaacttgaccgacttagtcgtcgacacggatactctgggggagagtacacagccgcaaagggaaggtgcacaggtccctactggcagagagcgggaacagcatgttggcggtacaaaggacagcgaggacaactacggagacagtgaagacttggatcttcaagcaacacaatgctttttggagaaccagggccttgaagccgtgcaatccatggaggacgaacccacacaagcttttatgttgactccccctcaggaactcggcccgtcacactgtagcttccaaactaccggactccttaactgtaaaatgccacccgcggagaaagcgtccaggatcagggcagcagagaaggtgagccggggggatcaggagagtcctgacgcttgcttaccgcccaccgtgcctgaggcgccagcgccaccacagaaacccttaaacagccagtcccagaagcacctggccccacctcccctgttgtccccattgctgcccagcatcaagcctaccgtccgcaagactcgccaggatggcagccaggaggctcccgaagctccactctcatctgagctggaacccttccaccccaaaccaaaaatcagaacacggaagagctccaggatgactccttttcccgctacatccgccgcaccagaacctcatccatccacatcaacggcccagcccgtaacaccaaaacctacgtcacaggctacgagaagcagaactaacagatcatccgtgaagacccccgagccagtggttccaacagcccccgaactgcagccttccaccagtacagaccaaccggtgacctctgaaccgaccagccaggttacacggggccgaaagagccgttcttccgtcaaaacgccagaaactgtggtgcctaccgcccttgaactgcagccatctacatcaaccgatcgaccagtcactagtgagccgaccagccaggccaccaggggacgcaagaataggtcatcggtgaaaaccccggagccagttgtccctactgcacccgaactacagccaagcacatcgacagaccaacctgtgacatccgagcccacctaccaggcgacccgtggacgaaagaatagatcttccgtcaagacccctgagcctgtcgtgccaacggcccccgagctgcggcccagcacatctactgatagacctgtgacccctaagccaacttcaaggactactagaagtcgtactaatatgtccagcgtgaagacacctgagacggtggttcctacagccccagaactccaaatctccacttcaacagaccagccagtcacccctaagcccacgagcaggacgacacgtagccgaaccaatatgtcttccgtgaagaaccctgaatctaccgtcccgattgcaccagagctgccaccttcgacatctactgaacagcctgtgactccagagccaactagcagggccacaagggggcgcaagaatcgtagctctggcaaaaccccagagacactagtgcccactgcccccaagctggagccctctacctccaccgatcagcctgtcacccctgaacccacaagccaggctacaagggggaggactaaccgctcttccgtcaagactcctgaaaccgtcgttcccaccgcccccgagttgcagccatctactagcactgaccagccggttaccccagaacccaccagtcaagcaaccaggggccgcaccgaccgttcatccgtgaaaactccagagaccgtggtgccgaccgcacccgagcttcaagcgtctgcttcaacagatcagcccgtgacatcagagcctacatcaaggaccactcggggacggaagaacagatcttccgtgaagacccctgagaccgtggtgccagccgcacccgagctgcagccgtctacttctactgatcaacctgttacgcctgagcctaccagcagagctacaagaggacgaactaatcggtcttcagtcaagacgcccgaatcaattgtgccaattgcacccgagctgcagccatctacatccaggaaccagctcgtcactcctgagccgacctcccgagctactcggtgtcgcactaataggagttcagtgaagaccccggagcccgtcgtgcctactgccccagagccacaccctactacttccacggaccagccagtgacgcccaagttgactagcagggcaactcgtcgcaaaacaaataggtcaagcgtgaagacaccaaagccagtggaaccagccgcttctgacctggagccctttacaccaacggaccagtccgttacccctgaagctattgcacagggcggccagagcaagaccctccggagctctacggtgcgcgctatgccggttcctaccacacctgagttccagagtcctgttacaacagaccagcctatttcccccgaaccaattactcaaccgagctgcataaaacggcagcgagcagctgggaatcctggttccctggccgcgcccattgatcataaaccatgttctgccccactggaacccaagtcccaagctagtagaaatcagagatggggcgcggtacgcgccgctgagagcctgactgccatcccagaacctgcgtcgccccagctgttggagacccccattcatgcaagtcagattcagaaggtggaacctgcgggccgcagcagatttacacctgaactgcagccaaaagctagtcagagccgaaagagaagcctggccactatggattcgcctcctcaccagaagcagccccaaagaggggaagtgtcccagaaaaccgtgattataaaagaggaagaggaagatacggctgaaaaacccggcaaggaagaagatgtcgttacacccaagcctggtaagcgcaagcgtgaccaagctgaggaagaacctaacaggatcccctctagaagtttgcgtaggacaaaactcaatcaggagtctaccgcaccaaaggtgctgttcaccggggtcgtggatgccagaggggaacgggccgtcctggcactcggcggctcactcgccgggagcgcggctgaagctagtcacctggtcacagaccggatccgacgcacggtgaagttcttgtgtgccctgggacggggcatccccatactgtccttggattggctccatcagtcacgcaaggccggcttttttcttcctccggatgaatatgttgtcaccgatcccgagcaagaaaagaatttcggattttctttacaggatgcactctctcgtgcaagggaacgaaggctgctggaaggttacgagatttacgtcacccccggtgttcaaccacctccaccccagatgggtgagatcatcagctgttgtggagggacatatcttccttccatgccccgaagttataagccccaaagagtggtgatcacttgccctcaggacttcccacattgtagtattcctctgcgtgtgggccttccattgctgtcccctgagttcctgctgacgggcgtcctaaagcaagaagccaaacctgaggctttcgttctgagcccacttgaaatgagctcaacctag

SEQ ID NO: 194545 - DNA, 4968 bp, synthetic construct
  misc_feature 1..4968: note = Description of Artificial Sequence: Synthetic coding sequence
  source 1..4968: mol_type = other DNA
atgtaccaccggctggacgtgagcctgcccttcgtgagccggggccccctgaccgtcgaggaaactcctcgcgtccagggcgaaacccaacctcagcgcctgctgcttgcagaagattccgaggaggaggtcgacttcctgagtgaacgccgcatggtgaaaaagtctagaactactagtagcagtgtcattgtcccagagtcggacgaggaggggcattctccagtcctggggggtctcggaccgccctttgcgttcaatctgaacagcgatactgacgtcgaagaaggtcagcaacctgcaacagaagaagcttcctccgcagcccgtcggggggctaccgtggaggccaagcagtctgaggcggaggttgtgaccgagatccagctggagaaggaccaacctttagtgaaggagcgggacaatgacaccaaagtcaaacgaggggccggcaatggcgtcgtgcctgcgggagtgatcttggagcgttcccagccgccaggagaggattcagacacagatgtcgacgacgactcccgcccccccggtcgccctgctgaggtgcacctggaacgagcacaaccattcggcttcatcgattcagacaccgatgccgaggaagaacgcatccctgctacccctgtggttatcccaatgaaaaaacgaaagatattccacggtgtcggcactagggggcccggtgctcccggcctggcccatctacaggagagtcaggctgggtcagataccgacgtggaagagggcaaagccccccaggcggttcccctggagaagtcacaggcgtctatggtcattaacagtgatacggacgacgaagaggaggtatctgctgctctaacgctcgcccacctgaaagaatcccagcctgctatttggaatagagacgcagaagaagatatgcctcagcgtgtggtactcctacaaaggtcccagaccacaacagaaagagatagcgataccgatgtggaggaggaggagctccctgtggagaatagggaagccgttctgaaggatcacactaagatcagggccctggtgagggcccattcagagaaggatcagcctcccttcggcgactcagacgacagcgtggaagcggacaagtcctcaccaggaatccacctcgagagatctcaggccagcactaccgttgacattaacacccaggtggaaaaggaggtcccacccggcagcgccataatccacatcaagaagcaccaggtctcagtggaaggtacaaaccagactgatgtgaaagcagttggtgggccagccaagctgttggtagtatcccttgaggaggcatggccactgcatggcgattgtgaaaccgatgcagaggagggcacatcgttaaccgcttccgtcgtcgcagacgtcaggaaaagtcagctccccgccgagggcgatgcaggcgcagagtgggcggccgcagtgctgaaacaggagagggcccatgaggtgggtgcccaggggggaccccccgtggctcaggtagagcaggatctgcccattagtcgtgagaacttgaccgacctggtcgtggataccgataccttgggtgaaagcacacagccacagcgtgaaggagcccaggtgccaacgggacgcgagagggagcagcacgtcgggggaactaaggacagcgaggataattacggagatagcgaggacctggacttgcaggccacccaatgttttctggaaaaccagggactggaggtccaatctatggaggacgagcctacccaggcctttatgctcaccccccctcaggaactagggccctcccactgcagcttccagaccactggcctcttgaactgtaagatgcctccagcggaaaaggccagccgtattcgagctgcagaaaaggtcagccgtggcgaccaagagagccctgacgcctgtctcccgcccaccgtcccagaggcccccgcccctcctcagaagccacttaatagccaatcccaaaagcatttggcccccccaccactcttgagtcctcttctgccttctattaaaccaactgtgaggaaaacccgccaagacgggagccaagaagccccggaggcaccattgtcctctgagctggagccatttcaccctaagcctaagattagaacacgcaagagtagcagaatgacaccctttccagccacctcggctgcccctgaacctcacccaagcacatccactgcacagccagttactcccaaaccaacatcacaggcaacaaggtcgaggacgaaccgatcatccgtcaagacaccagaacctgtggttcctacggcacccgaactccagcccagtacaagcaccgatcaaccagtgactagcgagccaacttcccaagtcaccaggggacgcaaatctcggtcatctgtcaaaacaccagagacagtggtgcctactgctctggagttacagccctcaacaagcactgatcggccggttacaagtgaacctacttcccaagctactaggggcagaaaaaataggtcctcagtgaagactcccgagcctgtggtgcccactgctcctgagctgcagccttccacatcgactgatcagcctgtgacgtcagaacccacataccaagctacccgtggcagaaagaacagatcttcagttaaaaccccagagcctgtcgtacccactgcccccgaactgaggccctctacatccactgatcgccctgttacaccgaaacccacttctcgcacaaccagatctaggaccaatatgtcatcagtaaagaatcccgagagcaccgtaccaatcgcccccgaattgcccccctccacctctactgaacaacccgttactcccgaaccaactagccgtgcaacccgcggtcgaaagaatcggtctagtggaaaaacgcccgaaaccctggtccctaccgctcccaagctcgaacctagtactagcaccgatcagcccgtgactcccgagcccacttcacaagctaccagggggcgaaccaacaggagcagtgtaaaaacacctgagaccgtcgtaccgactgctcctgagttgcagccatcaacaagcaccgaccaaccggtaaccccggaaccgacttcacaggccacacgtggccggactgatcggtcatctgtgaagacgccagagaccgtggttcctactgctcctgagctgcaggcgtcagcatccaccgatcagccggtgacctctgagccgaccagccgcacaacacgtggtaggaagaaccgttcatctgttaagacccctgaaacagtggttcccgccgcacccgagctccagccatcaacctcgactgatcagcccgtaacaccggagccaaccagccgcgccactcgcggcagaactaacagaagctcggtaaagactcctgagtctattgtgccaatagcgcctgagctccaaccttctacctcccgcaaccaactggttacccctgagccaacaagcagagcgactaggtgtagaacaaataggtcatccgtgaagaccccagagcccgtggtcccaactgcccctgagccacacccaaccactagtaccgatcaacccgtgactcctaagctgacttccagggctacaagacgcaaaaccaaccgatcgtctgtgaagacaccaaaacctgtggagccggcagcttcagacttagagcctttcacgcctaccgatcagtcagtgaccccagaagcgatcgcacaaggagggcagagtaaaactctgaggagcagtacagtacgcgccatgcccgtgcctacaacgccggagttccagagtccagtaacaacagaccaacctatttccccagaacccatcacacagccatcatgcattaaaagacagcgcgcggccggtaatccgggtagccttgctgcacccatcgatcacaagccctgttctgcccccttagagcctaaatcacaggctagccgaaatcagcgatggggtgccgtgcgcgcagctgagagcttgacagccatcccagagcctgcatctcctcagttacttgagacgcccatccatgcaagccagattcagaaggtggagcccgccgggcggtcccgctttacgcccgaactccaacccaaagccagtcagtcacgcaagcgcagccttgctaccatggacagccccccacaccagaagcagcctcagaggggggaggtgtcgcagaagacagtcatcatcaaagaagaagaggaggacaccgccgagaagccaggaaaagaggaggacgtggtcactcctaagcccggcaaacgcaagcgggaccaggccgaagaagaacccaacaggattcccagtaggtcacttcggcggaccaaattgaaccaggagagcacagcacctaaggttttgtttaccggggtggtggacgctcgtggcgagcgcgcagtgctcgccctgggcggaagtctggctggcagcgcagccgaggcaagtcacctcgtcactgatcgaatccgtcgtactgtgaaattcttatgcgctctgggccgtggcatcccgattctcagtctggattggctgcaccagtcacgcaaagccggcttttttttacctccagatgagtacgtcgtcactgaccccgagcaagagaagaactttgggttttccctgcaggatgctctgtcccgagctagggagcgaaggctcctcgagggatacgagatctacgtaacacctggggttcagccacccccaccacaaatgggtgagataatttcttgctgcggcgggacttatttgccaagcatgcctcgctcatacaagccgcagcgggtagttattacatgtcctcaagattttccccactgcagcatccccctcagggttggcctgcccctgctaagccctgaatttttgttaaccggggtactcaaacaggaagcgaaaccagaagcatttgtcctctccccattagagatgagcagtacttag

SEQ ID NO: 194546 - DNA, 4968 bp, synthetic construct
  misc_feature 1..4968: note = Description of Artificial Sequence: Synthetic coding sequence
  source 1..4968: mol_type = other DNA
atgtaccaccggctggacgtgagcctgcccttcgtgagccggggccctctcactgtggaggaaacccccagagtgcagggtgagacacagcctcagcgcttgctccttgccgaggacagcgaagaggaggtggacttccttagcgaacgcagaatggtgaaaaaatcccgaaccacctctagctcagtcattgtgccagagagcgacgaagaagggcacagtcccgttctgggcgggctggggccccctttcgcatttaacctgaattccgataccgatgtggaagagggtcagcagccagccaccgaagaggcttcttcggccgccaggaggggcgctaccgtggaagcaaaacagagcgaggccgaggtcgtcactgagattcagctggagaaagaccagccactcgtcaaagagagggacaacgacacaaaggtgaaaagaggtgctggcaatggagtcgtcccggccggggtgatcctggaacgaagtcagccgcccggcgaagactccgatacagacgtggacgacgattctcggccccccgggaggcctgcagaagttcacctggaacgggcccagcccttcggtttcattgacagcgacacagacgcagaagaggaacgaatcccggccacccccgttgtaatccctatgaagaaaagaaagattttccatggcgtagggaccagagggcctggcgcccctggcctggctcatttacaagaatcacaggccggaagcgacacggacgtggaggaggggaaggctccgcaagccgtgccactagagaaatcacaagcaagcatggttatcaatagcgataccgacgatgaggaggaggtgtccgccgcactgactcttgcacacctgaaggagtctcagccggccatttggaatagggatgccgaagaagacatgccacaaagggttgtcctcctccaacgttcccagaccactaccgagagggattcggacactgatgtggaagaggaggaactgcccgtcgaaaatcgtgaggccgtgctgaaggatcataccaagatccgtgcccttgtcagagcacacagcgagaaggatcagccaccatttggtgattccgatgatagtgtggaggcagacaaaagttctccaggtatccacctggaacggtctcaggcttctacaacagtcgacatcaatacacaggtcgagaaggaggttccgcccggaagtgccatcatccacatcaaaaagcatcaggtgagtgttgaaggcaccaaccaaactgacgtcaaggcagtgggcggccctgccaagctccttgtcgtcagtcttgaagaggcctggccactgcacggcgactgtgaaactgatgcagaggaaggcacatccctgaccgcatcagtcgtcgctgacgtgaggaaaagccaactgcctgcagaaggagatgctggggccgagtgggctgcggccgtgctaaaacaggagagggcccatgaggttggcgcccagggcggaccgccggtggctcaggtcgaacaggatttaccaatctcacgggagaatctgaccgacctggtggtggataccgacacactgggtgagtctactcagccacagagagagggtgcacaggtgccaaccgggcgggagagggagcaacatgtcggcggtacaaaagattccgaggacaactatggggatagcgaagatttggacttacaagcaactcaatgtttccttgaaaatcaaggcctggaggtacagtcaatggaggatgagcccacacaggcgttcatgctgactcccccgcaagagctcggtcctagccactgcagttttcagacaaccgggcttcttaactgtaagatgccacccgcagaaaaggcatctcggatccgagcagcagaaaaggtgtcacgcggggatcaagaaagcccagacgcctgcctcccacctaccgtcccagaagcacccgctcctccgcagaagccactgaattcccagagccagaaacatctggcaccccccccactcctgagtccccttctgccttccattaaacccactgtgaggaaaacaagacaggacggcagtcaggaggcccctgaggcaccactgtcctccgagttggaaccgttccaccctaagcctaagatacgcacccggaaatcctcgcgaatgacgccgtttcccgcaacatccgccgcaccagagcctcatcccagtacatctacagcacaaccagtgaccccaaagcctacttcccaggcgacccggagtaggactaataggagctctgttaagacccctgaacccgtggtgcccacagcacctgaactgcagcctagcacgagcaccgaccagcctgtcacgtctgagcccacatcccaggtgactcggggtagaaagagcaggtcatcagtgaaaacgcccgagacagtggttcccaccgccctggaacttcagcccagcactagcaccgaccgccccgtaacgtccgagccaacgagccaagcgacccgaggccgaaagaatcgtagctctgtcaaaactcctgagccagtggtcccaactgcacctgagttgcagcctagcactagcacagaccaaccagtgacatctgaacctacttaccaggcaacgagaggccgaaagaatcggtcctctgtgaaaactccagaacccgttgtgccgaccgccccagagctgagaccctccacgagcaccgaccgcccagtgaccccgaaacccacgtctaggactacaaggtcccgaactaacatgtcatccgtaaagaacccagaatccacagtaccaattgccccagagctcccgccaagcacctcaactgagcagcctgtgaccccagagcctacttccagggccacacgaggaaggaaaaatcgtagctctggtaaaactccagagactctagtcccaaccgcgccaaagcttgagccaagcacaagcactgatcagcctgtaacgcctgagccgacttcacaggctacgcggggcaggacgaaccggagctccgtgaagacaccagaaacggtggtcccaactgcaccagaactccagccctccacatccactgaccaacccgtcactcctgaaccaaccagtcaagcaacacggggaaggacagaccgttcaagtgtgaagacccccgaaacagttgtgcctacagctcctgaactacaggccagcgcgtccacggatcagcctgtgacttccgagcctacctcaagaacaaccagaggcaggaaaaatcggtccagtgttaagaccccggagaccgtggtgccagctgctcccgagctgcaacctagtacctctaccgaccagccagttactcctgagcccactagcagagcgaccagaggtcgaacgaaccgatccagcgtgaagactccagagtctatcgtgcccatcgctcctgagcttcagccgtctacctcacggaatcagctcgtgacacccgagcctactagtcgcgccacacgctgtcgcacaaatcggtctagcgtgaaaaccccggagccggtggtgccaaccgcacccgagccccatccaacaacctcgacagaccagcctgtcactcctaaattaaccagccgggcaacccggcgcaaaacaaaccgctctagcgttaaaacaccgaagcctgtcgagccggcggcttctgacctcgaacctttcactccgacagatcagtccgtgacgcccgaggctatagcccagggaggtcagtcaaaaaccctgaggtctagtaccgtccgggcaatgccggttcctaccactccagagtttcagtctcctgttacgaccgatcagccgattagccccgaacccataacacagccttcctgcataaagcgccaacgggcggctgggaatcctggttcgcttgccgcaccgattgatcacaaaccttgttcagctccacttgagcccaagtcccaggcgtccagaaaccaaagatggggagccgttagagcagctgaaagcctcactgcaattcccgaaccagcctcccctcagcttctagaaaccccgattcatgcgtcccagatccagaaggtggaacccgctggccggtcccgtttcacgccagaacttcaacctaaggcctcccagtctagaaaaagaagtctggccaccatggactccccaccgcatcagaaacaaccgcagcgcggggaggtatcccagaagactgtgattatcaaggaagaggaggaagacacggcggagaaaccaggcaaggaagaggatgtcgtgacacctaaacctggtaaaaggaagagagaccaggcagaagaggaaccgaaccgtatcccaagccgctcccttcggaggaccaagctgaatcaggagagcacggcacctaaggttctgttcaccggggtggtcgatgctaggggggaacgagccgtcctggcacttggaggctctctggccgggtcagcggccgaggctagccatttagtgactgaccggatcagacgtacagttaagtttctatgcgcactagggaggggcataccaattttgagtctcgattggcttcatcagtctcgcaaggccggctttttcctaccccctgacgaatatgtcgtgactgaccccgaacaagagaagaatttcggtttctctctgcaggacgccttgtcccgagcgcgggagcgccgcttgctcgaagggtacgaaatatatgtaaccccaggtgtgcaaccccctcctccccagatgggggaaataatcagctgttgtggcggcacctatctgcctagtatgccgcgctcatacaagccccaaagggtagtcatcacatgccctcaggactttcctcactgctcaattcctctcagggtcggcctcccactgctctcacctgagttcctgctgaccggcgttttgaaacaggaggccaaacccgaggcttttgtcctttcccctctggaaatgtcttcaacctag

SEQ ID NO: 194547 - DNA, 735 bp, synthetic construct
  misc_feature 1..735: note = Description of Artificial Sequence: Synthetic coding sequence
  source 1..735: mol_type = other DNA
atggaggacacccaggccatcgactgggacgtggaggaggaggaggaaaccgagcagtcgtccgaaagcctgcggtgcaacgtggaacctgtcggcagattacatattttcagtggggcgcatggtcccgagaaggacttcccactccaccttggaaaaaatgttgttggcaggatgcccgactgtagcgtcgcactgcccttcccatcaatctccaagcaacatgcagaaatagaaattctcgcctgggataaagcacctatccttagagactgtggatctctgaacgggacccaaattctcaggccgcccaaggtgctgagcccaggcgtgagtcatagattgcgtgaccaggagctgatcctgttcgctgacctcctgtgtcagtaccaccggctggatgtgtctctgccgttcgtgtctagggggccactcaccgtggaagagactccccgggtgcaaggagaaacacagccccagcggttgctgcttgccgaagatagcgaggaggaggtggactttttgagtgagcggcgtatggttaagaagtcccgtacaacctctagcagcgtcattgtacccgagtcagacgaggagggacactctcctgtgctcggtgggctgggacccccttttgcattcaacctgaactctgataccgacgtggaagaaggccaacagccgcaccgaggtggactgctgagctgtcagaagaggtgtcattgtcgcggttag

SEQ ID NO: 194548 - DNA, 5409 bp, synthetic construct
  misc_feature 1..5409: note = Description of Artificial Sequence: Synthetic coding sequence
  source 1..5409: mol_type = other DNA
atggaggacacccaggccatcgactgggacgtggaggaggaggaggaaaccgagcaaagctccgagtctctgcggtgcaacgtcgagccagtgggtcgcctgcacatatttagtggcgcccacgggcccgagaaggatttccctctgcacctaggcaagaacgtggttggccgaatgcctgactgtagtgtggcccttcctttcccctcaatcagtaagcaacacgcagagatcgagatcttagcctgggacaaggctcccatcttgcgggactgcggctctctaaatggcacgcaaattttaagaccaccaaaagtcctgagccccggtgtaagccacaggctgagagaccaggagctgatcctgttcgctgacctcctttgccagtatcatcggcttgatgtaagtctcccattcgttagccggggcccattaaccgtggaggagaccccgagggtgcagggagagacccagccacagcgcttgttgttggctgaggacagcgaggaagaagtcgacttccttagcgaaagacgcatggtgaagaagtctcgaacgacctcttccagtgtgattgtcccagaatcggacgaggaggggcactccccagtgctgggaggccttggcccaccgtttgccttcaacttgaatagtgacacagatgtggaagaagggcagcagcccgccaccgaagaggctagctccgccgcccgaaggggagctacagtggaagccaagcagtccgaggccgaagtggtcacggagatccagctggagaaggatcagcctcttgtcaaagagagagataatgacacaaaggtcaagaggggcgcggggaatggtgtggttccagctggggtcatcctggaacggtctcaaccccctggagaggactccgatacggacgtggatgatgacagtcgcccacccggtcggccggctgaagtacacctcgaaagggcacaaccatttggctttatcgattccgacaccgacgccgaggaggagcggattcctgctactcctgttgtgatacctatgaaaaaaagaaagatttttcacggggttgggacaagagggcctggggcccccgggctggcccacctgcaagaaagccaggcgggctcagatactgacgtggaagaaggcaaagccccccaggctgttccactggagaagagccaggcttctatggttattaatagcgacacagatgatgaagaggaagtttctgcagccctgacactcgcgcacctgaaggagtcacagcccgctatatggaacagggatgccgaggaagatatgccgcagcgcgtggtcctcctgcagaggtctcaaacgactactgaacgggattccgacaccgatgtggaagaggaagagttgcccgtggagaaccgggaggctgtactcaaggaccacaccaagatccgcgcgctcgttcgggctcactctgagaaggaccaacctccattcggtgacagcgacgacagcgtggaggcagacaaaagctctcccggcatacatctcgaacgttcccaggccagcacaactgtggatatcaatacccaggttgaaaaagaagtgccgcctggaagcgcgattattcatatcaaaaagcaccaggtgtccgtggaggggactaatcaaacagatgtgaaggccgtcggcgggcccgccaagctcctggtggtgagtctggaagaggcgtggcctctgcacggggactgtgaaactgatgctgaagaaggaacgagccttacagcatctgtggtagctgatgtgcgcaaaagccaactgcccgccgagggtgacgctggcgcagagtgggcagccgctgtgttgaaacaggagcgggcccacgaggtcggtgcacagggcgggcctccggtggctcaagtagagcaggatttgccaatttcacgcgagaacctcacagacttagtagtcgacactgatacattaggggaaagtacccaacctcagcgggaaggagcacaggttccaaccgggcgcgaacgcgaacagcacgtaggcggcaccaaagacagcgaagacaattatggtgactctgaagatctggacctgcaggccacacaatgtttcctggaaaatcagggtctcgaggctgtgcagagtatggaagatgagcctacccaggcctttatgctcacgcccccacaggaactgggcccgtcacattgctcattccagacgacagggactctcgacgagccatgggaggtgttggctacacaaccgttctgtttgagggagtcagaggactccgagacacagcccttcgatacgcatctagaagcttacgggccatgccttagcccacctagggctatccctggagaccagcacccagaaagtccagtacacacagagccaatgggcatccagggccggggcaggcagactgtcgataaagtgatgggaattccaaaggaaaccgcagagagagtggggcctgaaaggggccccttggagagagagacagagaaactgttgcctgagaggcaaacagatgtgacgggcgaggaagagcttacgaaaggcaaacaggacagagagcagaagcagctcctcgcacgcgacactcaaagacaagagtccgacaagaatggtgagagcgcttctcccgaaagggacagggaatccctcaaggtcgagatcgaaacgagcgaagaaattcaagaaaagcaggtgcagaaacagacactgccgagcaaagcttttgaacgagaagttgagcgacccgtggcaaacagagagtgcgacccagcggaattggaggaaaaggtccccaaggtgattctagagcgggacactcagaggggagaacccgagggcggctcccaagaccagaagggtcaggcgtcctcaccaacccctgaaccaggtgtgggagccggagatcttcccggtcccacaagcgccccagtgccatctggcagtcagagtggcggaagagggtccccggtctctccacgacgccatcaaaaggggctcctcaactgtaagatgcctcccgccgaaaaagcatccagaatcagggccgcggaaaaggtcagtcgcggggatcaggaaagcccagacgcttgcctgcctccaactgtccccgaagctcccgcccctccacagaagcctctgaacagccaaagtcaaaagcatctggccccgcctccattgctctctccactgctgcccagcattaagcctactgtgagaaagacacggcaagatggcagccaagaggcacccgaagctcctttaagcagtgaactcgaaccatttcaccctaagccaaaaatcaggacccgaaaaagttctcggatgactccctttcccgctacgtcggcagcgcccaagttggagccatcgacatcgacagaccaaccggtgacccccgagcccacgtctcaagctaccaggggccgcacaaacagatccagtgtaaagactcctgagaccgtggtgccaaccgccccagagctccagccaagtacctcaacagaccaacccgtcacccccgaacccactagccaggctacccgaggccgtaccgaccgctcttccgtgaaaacacctgagactgtggttcccacagctccagagctgcaggcctcagcatcaactgatcagcccgttacatccgaacccacatcgcgcacgacacgagggaggaaaaatagatcaagtgtgaaaacccctgagaccgtggtgcctgctgccccagaacttcagccttccacttctacagatcagcctgtgactccagagcccacatcccgggcaacccgaggacggacgaaccggtccagtgtgaaaacacctgaatctattgttccaattgccccagagttgcaaccaagcacctctcgaaatcagttagtgactccagaaccgacaagccgcgcaaccaggtgccgaaccaaccgatccagtgtgaagactcccgagccagtcgtccccacggctcctgaaccacatccgaccacttccactgaccaacctgtgactcctaaactcacaagccgcgctactagacggaagacaaaccgtagcagcgtcaaaacacctaagccagtcgaaccagcagcctccgacctcgagcctttcacccccacagatcaatcagttactcccgaggcaatcgcgcagggaggccagagtaagaccctccggtcaagtacagtccgagcaatgcccgttccaacaactcctgaattccagtcaccagtgactaccgatcagcctatttctcctgaacctatcactcaaccctcatgtatcaagaggcaacgtgccgccggcaatccaggctctttagctgccccaattgatcacaaaccatgcagcgcaccacttgaacctaaatcgcaggcttctcggaatcagaggtggggtgccgtgcgtgccgccgagtccttgaccgcgattccagagccggcctctccgcagctgctggaaacgcccatccatgcatctcagatccaaaaagtggaaccggcaggccgctccaggtttactcccgagcttcagcccaaggccagtcaaagcagaaagagaagcctggctacaatggatagcccaccccaccagaaacagccccagaggggcgaagttagtcaaaagactgtgattattaaggaggaggaggaagatactgccgagaagccagggaaagaggaggatgtggtgacaccaaaacctgggaaaaggaaacgggaccaggccgaggaggagcccaacagaatcccatcccgctcgctcaggcgcacaaagttgaatcaggaatccaccgccccaaaggtcctcttcacaggcgtcgtcgacgcccgcggcgaaagagccgttctcgccctaggaggatccttggcaggcagcgcggccgaagcaagccatctggttacagatagaatccggcgaactgttaaattcctgtgcgcactcggaaggggcattcccatcttgagccttgactggctgcaccaatctcgtaaagccggattctttttgccacctgatgaatacgtggttacagatcctgagcaagaaaaaaacttcggatttagccttcaagatgctctgagtcgtgccagggagagaagactactcgagggctatgagatctatgtcacacccggtgttcaacccccacctccacagatgggagagattatatcttgttgcggcggtacatatctacccagcatgccccggagctacaagccgcagagagtggtgataacctgcccccaggacttcccccattgttccattccactgcgcgtcggcctccccttgttgtctccagagttcctcctgacaggcgtcctgaagcaggaggcgaaaccggaggccttcgtcctgtctcccctcgagatgtcatcaacgtag

SEQ ID NO: 194549 - DNA, 4968 bp, synthetic construct
  misc_feature 1..4968: note = Description of Artificial Sequence: Synthetic coding sequence
  source 1..4968: mol_type = other DNA
atgtaccaccggctggacgtgagcctgcccttcgtgagccggggcccacttactgtcgaagagacaccacgggtccagggcgagacacagccgcagagactcctgcttgccgaggatagtgaggaggaggtagacttcctgtcagaaaggcgaatggtaaaaaagtcccggaccacctcttcatcagtcatcgttcctgaatccgatgaggaggggcactcacccgtgctgggcgggctgggccctcctttcgcctttaaccttaacagcgataccgacgttgaggagggtcaacagccggcgactgaagaggccagctccgccgcccggcggggagctacagtggaagccaaacagtccgaagcagaagtggtcactgagatacagctggaaaaagaccagcccctggttaaagaacgggataacgataccaaagtgaaaagaggcgcaggcaacggagtggtgcccgccggtgttattctggaaagatctcaacccccaggcgaggactcggatactgacgtagatgacgactccagaccacccggcaggcctgctgaggtgcatctggagagggctcagccattcggctttatcgacagcgacacagatgccgaagaagaaaggattccagccacgcccgtggtcatcccaatgaaaaaacggaaaatctttcacggcgtaggtacaagaggcccaggcgctcccggcctcgcccatcttcaggagtcccaggcgggttccgataccgacgtggaggagggcaaggcaccgcaggctgtccccctggagaaatcccaggcttcgatggtcatcaactctgatacagatgatgaagaagaagtcagtgctgctttgacgctggcacacctcaaagagtcacagccagctatatggaatagggacgccgaggaagacatgcctcagcgagttgtgctactgcagagaagccaaacgaccacagaacgcgacagtgacaccgatgtggaagaggaggaactacccgttgagaatcgagaggccgtcctcaaggatcacaccaagataagggcactagtaagagcccatagtgagaaggatcaacccccatttggcgattcggacgactccgtcgaagctgacaaatccagtcctggcatccacttagagcgctctcaggccagtactactgtagacataaatacacaggtcgagaaggaggtccctccaggtagcgctataatacacatcaaaaaacatcaggtcagtgtggagggcaccaatcagactgatgtgaaggctgtgggtggtcccgcgaagctgctagtcgtaagcttagaggaagcttggcctctccacggagactgcgagaccgacgccgaagagggaaccagccttacggcctctgttgtggctgatgttcgaaagagccagctgccagcagagggtgacgccggcgcggaatgggcagcggccgtcctcaaacaggagcgggcccacgaagttggggcccagggaggacccccagtggcacaggtggagcaagacctacctattagtcgagagaacctgactgacctagtggtggatacagatacactgggggaatcaacacaaccacagagggaaggagcccaggtgccgaccggaagagagagggagcaacacgttggcgggaccaaagactccgaagataactacggagactctgaagatcttgatctacaagcgactcagtgtttcttagaaaatcaggggctggaagtccagtccatggaggacgaacccacccaggcttttatgctgacgcccccccaggaattaggaccaagtcattgctcttttcagacaacgggcctgctaaactgcaaaatgcctcctgctgagaaggcttctagaatccgagccgccgagaaagttagccgaggagatcaagagagtcccgatgcatgtctcccaccgacagtccccgaggctcccgcgcctccgcagaagcccctgaatagtcagagccaaaaacaccttgcaccgccaccattactgtcgcccctactgccctcaattaagccaaccgtccggaagacacggcaggacggatcccaagaggccccagaggctcctttaagcagcgaactggagcccttccaccccaaaccaaagatccgtactcgaaaatcttccagaatgactccattccccgcaacatcggccgcccccgagccacacccgtcaacctccactgcgcagccggtgacgccaaagccaaccagccaggcgacccgctcacgaactaaccgatcttcagtgaaaacccccgaacccgttgtccccacagcgcctgaacttcagccatccacttctacggaccaaccagtgacgtcggaacctactagccaagttacccgcggccggaaatcgcgaagctctgtgaagacacccgagacagtggtgcccactgcactagaacttcagccatctacatcaacagatagacccgttaccagtgaaccaacgtcccaggctacccggggtaggaaaaaccgctcttctgtgaaaacacccgaaccagtcgtccctaccgctcccgagttgcagccttccacgagtactgaccagcctgtaacatccgagccgacctatcaagcgaccagaggccggaagaaccggtcttccgttaaaacccccgagcccgtggttcccacagccccagaacttagaccctcaacatccactgaccgcccagttaccccaaagcccacttcccgaaccacacggagccggacgaacatgtcaagtgtgaaaaatcccgagagcactgtccctattgcacccgagctgccaccctccacttctacagaacagcccgtgacgcctgagcccacgtctagagccacccgcggtcggaagaatcgcagcagcggcaaaacccccgaaaccctggttccgacagcgcccaagttagaaccttccacatctactgaccaaccggtgacgccagagcccaccagtcaggcgaccaggggccggacaaacaggtcatccgtcaaaacgccagagaccgtggtccccaccgctcctgaactgcaaccttctacctcaacagatcagcccgttaccccagagcccaccagtcaggcaactcggggcaggacagataggtcttcagtcaaaacccccgaaaccgtggtcccaaccgctccagagctccaggccagtgccagcaccgaccagccagtgacctctgaacccacatctagaaccactcggggtaggaagaatagaagttccgtgaagacacccgagacggtcgtgccagctgccccagaactgcagccgtctacaagcacagaccagcccgtgaccccggagcccacttcaagggcaactaggggaaggacaaataggagcagcgtgaagacacccgagtccatcgtcccaattgcaccagagctgcagccaagtacctcacggaaccagctggtcaccccggagcctacctcacgggccacccgctgcagaaccaaccgctcatccgtgaagacaccagagccagtggttcctactgcgcccgagccacacccgactacatctaccgaccagccagtcacccccaaattgactagtcgtgccacgcgcagaaaaaccaatcgcagtagcgtaaagacgccgaagccagtggagccggcggcctctgatctggaaccattcacaccaacagatcagagcgttacccctgaagctattgcacaggggggtcagtcaaagactttacggtcttctaccgtcagggccatgcctgtgcctacaacacctgagtttcaatctcctgtcacaacagatcagcctatctccccagagccgatcacccagccctcgtgcatcaagcgccagcgggccgccggtaatcccgggtcccttgcggctccaattgaccacaaaccctgtagcgccccattggaacctaagagccaggccagcagaaaccaaaggtggggagccgtaagagcagcggagagtttaacagctatcccagagccagctagtccacagctgctcgagaccccaatccacgcttcccaaatccaaaaagtggaacccgcaggcaggtcacgctttacaccagagctgcagcctaaggcttcacagagtagaaaacggtccttggctaccatggatagtcctccacatcagaagcagccacaaaggggggaggtcagtcagaaaacagtcataatcaaggaggaggaggaggatactgccgagaagcctgggaaagaggaagacgtcgttaccccaaaacctggaaaacgcaagcgggatcaagccgaagaggaacctaatcggatcccatccagatctctgcggaggacaaaattgaaccaagagtctacagcaccgaaagtgttgtttacaggcgttgttgatgcccggggtgagcgcgccgtcctagccctgggcggatcgctggccggttcggccgcagaagcctcacatctcgtgactgatcggatcaggcgaactgttaagtttttatgcgccctcggtagagggatccctatcctgagcctggactggctgcatcaaagccgcaaggctggcttttttctaccccctgacgagtatgtggtgacagaccctgagcaggaaaagaatttcggattcagcttacaggacgccctgagtcgcgcaagggaacgtaggctgctggagggctatgaaatttacgttactcctggggtccagcctcccccaccccagatgggagaaatcataagctgctgcggcgggacgtacctcccgtcaatgcccaggtcgtataaacctcaaagggtcgttattacctgtccacaagatttcccccactgttctattccactccgagtagggctgcctctactctccccagagtttctgctgacgggagtgttaaaacaggaagctaagccagaagcgtttgtgctgagcccattggaaatgagtagcacctag

SEQ ID NO: 194550 - DNA, 5409 bp, synthetic construct
  misc_feature 1..5409: note = Description of Artificial Sequence: Synthetic coding sequence
  source 1..5409: mol_type = other DNA
atggaggacacccaggccatcgactgggacgtggaggaggaggaggaaaccgaacaaagtagcgagagcttgagatgcaatgtagaacccgtagggaggcttcatattttcagcggagctcatgggccagaaaaggattttcccttgcacctgggcaaaaatgtggttggtagaatgccagactgtagcgtggctcttccctttccgagcatatccaagcagcatgccgagatcgagatccttgcctgggataaagccccaatcctgagggattgtggctcgctgaacggaacgcaaatcctgaggccccccaaggttttgtcccccggagtgtctcaccgcctaagagatcaggagctgatcctcttcgcagatctgctctgccagtatcatagactagacgtcagccttcctttcgtgtcacgcggtccactaacagtcgaggagactccaagggtgcagggcgagacccagccacaacgcctgcttctagccgaagactcagaagaagaagttgattttctcagtgaaaggcgtatggtgaaaaaatctcggaccacttcctcgtccgtgattgtgccggagagtgacgaggagggtcattcccccgtgctggggggactgggccccccctttgcatttaacctgaactcagataccgacgttgaagaagggcaacagcccgccactgaggaagcatctagcgcagccaggagaggtgccacagtcgaggccaaacaatctgaggctgaagtggtaacagagattcaacttgagaaagatcaacccctggtgaaggagcgagataacgacaccaaggttaaacggggcgctggtaacggcgtggtgcctgccggggtcattctcgaaagaagccagccaccaggagaggacagcgacacagatgtagatgatgattcacggccacccggacgtcctgctgaggtgcacttggagagagcacagcccttcggcttcatcgacagcgacacggacgcagaagaggagagaatccccgccactccagtggtgataccgatgaaaaaacggaagatctttcacggtgtgggcaccagggggccaggagctccagggttagcccacctgcaggagtcccaagcagggagcgacaccgatgtggaggaaggaaaggcgccacaggcagtgcccctcgagaagtcacaggcttcaatggttattaactcagatacggacgatgaagaggaggtctctgcagcattaacgctcgctcacttgaaggagtcccaacccgccatatggaacagagacgctgaggaggacatgcctcaaagagtagtgctgttacagcgctcccaaacaaccacagagagggactccgacactgacgtcgaagaggaggaacttccagttgagaaccgggaagcagtgctgaaagatcacacaaaaatccgagctctggtgagagcccatagcgaaaaggaccagccccctttcggcgattctgatgattcagtggaagctgacaagtccagccccggaatccatttagagcgcagtcaagccagcactaccgtcgacataaatacccaggtggagaaggaggtacccccggggagcgccataatccatattaaaaagcaccaggtttctgtggagggaacaaatcagacagacgtaaaggcagttggtgggcctgccaaactgctagtcgtgtcattggaggaggcctggccccttcacggggattgcgaaactgacgccgaagaagggacatctctgactgccagcgtggtcgctgatgtccggaaatcacagctgcccgctgagggcgacgccggtgctgagtgggccgctgctgttctaaagcaggaaagggcccacgaggtcggtgctcagggcggaccccccgtggcacaggttgagcaggatctgcccatctctcgcgaaaacctcactgatctggtcgtggataccgacacacttggcgaaagtacccagccacaaagagagggagcacaagtgccaacgggccgcgaacgggagcagcacgtcggtggcacgaaagatagtgaggataactacggggatagtgaggacctagatttgcaagccacacagtgcttcttggaaaaccaaggtctggaggctgtacaatcaatggaggacgaaccaactcaggcttttatgctcacacctccacaggaactgggcccgtcccattgttccttccaaaccaccggcactctggatgagccgtgggaagtacttgcaacgcaaccattctgtttgagagagtccgaggacagcgagacacagcccttcgacacacaccttgaggcctacggcccctgcttgtctcccccccgcgctattccaggggatcagcaccctgagtctccagtgcatacagagccaatgggaatccaggggagagggagacagaccgtggacaaagtcatggggattcctaaggaaaccgccgagcgtgtcggaccagagcggggccctctggagcgggaaacagaaaaactgcttccagaaaggcagacagacgtcactggcgaagaagaactcacgaaaggtaaacaggatcgcgaacaaaaacagctcctggctagggacactcagcggcaggaatctgataaaaacggggagtccgccagtccggaacgcgatagggagtctcttaaagtcgaaatagaaacttccgaggagattcaggaaaaacaagtccaaaaacagaccttgccctccaaggcctttgaaagagaggttgagagacctgtcgcgaacagggagtgcgatcccgcagaactggaagagaaggtcccgaaagtgatactggaaagagatacacaaaggggggaacctgagggaggctcacaagatcagaaaggccaggcatcaagtccgacaccagaacccggtgtaggggccggtgatcttcccggcccgacaagcgctccagtgcctagtggaagccagagcggagggaggggcagccctgtcagcccccgaagacatcaaaagggattactcaattgcaagatgccacccgccgaaaaagccagtagaatacgagcggccgagaaggtatcacgcggcgaccaagagtctccggacgcttgtttaccgcctacagtgcccgaggctcccgccccacctcagaagccattaaacagtcaatcacaaaagcacctggccccaccacctctgctgtcgcccctgctcccatcaatcaaacctaccgtcaggaagacgcgacaggacggatcccaagaggccccagaagccccattgagctctgaactcgagccttttcatcctaaaccgaagatcaggacacggaagtccagccgaatgactcccttccccgcaacatcagccgcccctaagcttgagccaagcacaagcacagatcagcccgtgacgcctgagccaaccagccaggctactagaggaagaaccaacagaagctccgtgaagacacctgagactgtcgtgcccaccgcgccagagctacaacccagtacatcaacagatcagcctgtcacgccagagccaacctctcaggccacaagagggagaacggatagaagctccgtgaagaccccggagaccgttgtcccgacagcaccggagctacaggctagtgctagtacagatcagccagtgacaagcgagcctacaagcaggaccaccaggggacggaagaaccgcagtagcgttaaaacccccgaaacagtggtgcctgctgcacctgaactgcagccatctactagcaccgaccaaccagttaccccagagcctacatcacgtgccacaagagggcgcacgaaccggtcaagcgtgaagaccccagagagtatagtacctatcgctcctgaacttcagccctcaacttctagaaatcagctcgttacacccgagcccacttctagagctacccgctgtagaaccaatcggtctagcgtgaagacaccggaaccggtggtccccaccgctcctgagcctcacccaaccacaagtacagatcagcccgtgactcccaaactgacatcccgtgctacccggaggaagactaaccgttcctcagtgaagaccccgaaacccgtcgagccggcagcgtctgaccttgagcccttcactccaacagatcagagcgtgaccccagaggccatagcccagggaggccagtctaagacactccggtcctctactgtgcgagctatgcctgtgccaacaacaccagaattccagagccccgtcactaccgatcagccaatatccccggaacccataacccagccctcctgtatcaagcgacagagagccgctggtaatcctggatctctcgccgcccctatcgaccataagccttgttccgccccattggaaccgaagagccaagcttcaagaaatcagagatggggggcggtgagagctgcagaatcgctgaccgccatccctgagcccgctagccctcagctgctggagactccaatccatgcatcccagatccaaaaggttgaaccagctgggaggtctcgcttcacacctgagctccagccaaaggcgagccagagccgaaagcgcagcttggcgactatggactcaccgccacatcaaaagcagccacaacgcggagaagtatctcaaaagactgtgattataaaggaagaagaggaagatacagccgaaaaacctggaaaggaggaggacgtcgtgaccccaaaaccaggcaaacgtaagcgggaccaagccgaggaagaaccgaatcgcatcccaagccggagcctgcggagaaccaagctgaatcaagagtccaccgcacccaaggtgctgttcaccggggtggtggatgctcggggagagcgagcagtactcgccttaggcgggtccttagcaggatccgccgcggaagcctcacatctcgtgacagacagaatccggagaaccgtgaaattcctttgtgcgctaggcagggggataccgatcctgagtctcgattggttgcaccagtctcgtaaagccggattcttcctgcctccggatgaatacgttgttaccgaccccgagcaggagaaaaattttggattcagcctccaggacgccttgagcagagcccgggagcggagactcttagaggggtatgaaatatatgtcactcctggcgtccaacctccacctccccaaatgggggagatcatcagttgctgcggcggcacttacctgcctagcatgccgaggtcctacaaaccgcagcgggtagtcatcacatgtcctcaggacttcccccactgctctatccctctccgcgtcggcctccccctgttgtctcccgaatttctccttacaggggtgctgaagcaagaagctaaacctgaggcctttgtgctgtctcctttggaaatgagcagtacgtag

SEQ ID NO: 194551 - DNA, 666 bp, synthetic construct
  misc_feature 1..666: note = Description of Artificial Sequence: Synthetic coding sequence
  source 1..666: mol_type = other DNA
atggaggacacccaggccatcgactgggacgtggaggaggaggaggagaccgagcagtcatcagaaagtctgcgctgcaacgtggagcctgtgggcaggttgcacatcttctctggagctcacggccccgagaaggattttcctcttcaccttggcaaaaatgtcgtgggtcggatgcccgactgctctgtcgctttaccctttccatccatctccaaacagcatgccgagattgaaatactagcgtgggataaggctccaatcctgcgggattgcgggtcgcttaatggtacacaaatcctctcctcgtcgctgccaccgccacagacgtcccttctccccttgagcctgcgtctccgtctgctgggcgaagaacagatcgaccccctgagtcgcctgctgaaacagctgtcaccccagcctctgagttaccgactaccaccccctcaaacatcattgtctcccctctcgcctcatctgggccccctgggtgaagagaagattggccctctgagtagacctctgaaacagttgtgcccccaaccactgaggtcttccctgcccccacctcaaactaatctgtcccccctttcccctcacctcggtcctctgggggctggtcagataggaccactgtctcgtcctctgaaccaattaagcctatag

SEQ ID NO: 194552 - DNA, 666 bp, synthetic construct
  misc_feature 1..666: note = Description of Artificial Sequence: Synthetic coding sequence
  source 1..666: mol_type = other DNA
atggaggacacccaggccatcgactgggacgtggaggaggaggaggaaactgaacaatcctccgagagcctccggtgcaacgttgaacccgtgggtaggctgcacatcttctcgggcgcccatggccccgaaaaggacttccctctgcacttaggcaaaaacgtggtgggaagaatgcccgactgttcggtggccctgcccttcccaagtatctcgaaacaacacgcagagatcgaaatcctcgcctgggacaaagcccctattctgagggattgcggcagcctgaatggcacccagatcctgtcttctagcctcccgcccccacaaacatccctgctgcccctgtctctccgcctacgactgttgggcgaagaacagatcgaccctttgtctaggcttttaaaacagctgagcccccagccactcagctacagactgccgcctcctcagacttccctgagccctctgagtccacatctgggaccccttggtgaagagaagattggtccactgagcagaccgctgaagcagctctgcccccagcccctgtcatcatcactcccacccccgcaaacaaatttatctcctctgtctcctcacctgggccctctgggggcgggtcagatcggcccactgagccggccactgaatcagcttagtctgtag

SEQ ID NO: 194553 - DNA, 738 bp, synthetic construct
  misc_feature 1..738: note = Description of Artificial Sequence: Synthetic coding sequence
  source 1..738: mol_type = other DNA
atggaggacacccaggccatcgactgggacgtggaggaggaggaggaaaccgagcagagttctgagtcactgaggtgtaacgtggagccagtcggccgcctacatatttttagcggggcacacgggccagaaaaggatttccccctgcatttggggaagaacgttgtagggcgcatgcccgactgctctgtggcactgccctttccctccatatctaaacaacatgctgagattgaaatcctcgcttgggacaaagcgcctatcctccgcgattgtggatcactcaacgggacgcagattctccggccacccaaagtgctcagccctggcgtgtcccacagacttcgggatcaagaactcatcctgttcgccgatcttctctgccagtaccatagattggacgtgtccctgccttttgtctccaggggccccctgacggtcgaagaaacacctcgtgtgcagggcgagactcagccccagcgcctcttgcttgccgaggatagtgaagaggaggtggatttcctcagcgaaaggcgaatggtgaagaaatctcggacaacttcttcatccgtgatcgtccccgaatcagatgaagaaggacattcacctgtcctgggcgggcttgggccacctttcgccttcaaccttaactctgacactgacgtggaagaagggcagcagcccgcgaccgaggaggcctcatccgctgcccgaagaggcgccactgtggaagcctag

SEQ ID NO: 194554 - DNA, 5478 bp, synthetic construct
  misc_feature 1..5478: note = Description of Artificial Sequence: Synthetic coding sequence
  source 1..5478: mol_type = other DNA
atggaggacacccaggccatcgactgggacgtggaggaggaggaggaaacagaacagagcagcgagagcctcagatgcaacgttgagcctgttggaagactgcacatcttctctggagctcatggtcctgagaaagactttccactgcacctggggaaaaatgtggtgggcagaatgccggattgcagcgtggccctgccgttcccctcgatatccaagcagcatgccgagatcgagattctagcttgggataaggcaccaatcctcagagactgcggctcactgaatggaacacagatcctgcgtcctcctaaggtgctgtctcctggtgtgagccaccgtctgagggatcaggaactcattctgtttgcagacctcttgtgtcagtaccatcgactggacgttagcctgcccttcgtctctcgaggccccctcaccgtggaggagacgccgcgcgtacagggtgagacacagccacagagattgttactggctgaggattccgaagaggaggtcgatttcttgtcggagcgcaggatggtgaagaagtcgaggaccacatcttctagtgtgatagtaccagaatccgacgaagaagggcactcaccggttcttggcggcctgggcccaccttttgcctttaacttgaatagcgacacagatgtcgaagaaggccagcagcctgctaccgaggaggcatccagtgcagcgcgcaggggggccactgtagaggccaaacagagcgaggctgaggtggtcacagagattcagctggaaaaagaccagcccttggtcaaggagcgtgataacgacactaaagtgaagagaggcgcgggcaacggcgttgttccggctggggtgatactggagcggtctcaacccccaggtgaagactctgatactgacgttgatgacgactccagaccgcctggaaggcctgcagaggtccacctggagcgggcgcagccatttgggtttatagacagcgataccgacgcggaagaggaaaggatccccgccactccagtagtgattcctatgaaaaaacggaaaatatttcatggcgttggaactagaggccctggcgcccccggccttgcacacctgcaggaaagtcaagccggcagcgacaccgatgttgaggaggggaaagctcctcaagccgtgcccctcgagaaatcccaggcatctatggtgatcaatagtgatactgacgacgaagaggaagtatcagccgccctcaccctggctcatctgaaagaaagtcaacctgccatctggaatagagatgccgaggaggacatgcctcagagggtcgtcctgttgcagcggagccagacgacgactgagcgggattcagacaccgacgtcgaagaggaagagctgcccgttgagaatagggaggcagtgctgaaggaccatacaaagatcagagcgctggtgagagcccacagcgaaaaagatcagccccctttcggcgattctgatgactctgtcgaagcggacaagtcatcaccgggcatacacttggaaaggtcccaggctagtaccacagtcgatatcaatacccaggttgagaaagaagtcccacccggctccgcgatcatacacatcaaaaagcaccaggtttcagtcgagggcaccaaccagactgacgtaaaggccgttggtggccccgccaagctcttagtggtgagccttgaggaggcctggccccttcatggagactgcgagaccgatgccgaggagggcacttcccttaccgcctccgtagtggccgatgtgagaaagagtcagttacctgcagaaggggacgcgggcgccgaatgggcggcagccgtgttgaagcaagaacgagctcacgaggtgggggcacagggaggccctcccgtggctcaagtggagcaagatctgcccattagtcgcgagaacctaacggatctggtggtggacacagatacattgggggagagtacgcagccacagcgggagggagctcaggtcccaaccgggagagaaagggaacagcatgttggtgggacaaaggacagtgaggataactacggagactccgaggaccttgatctacaggctacacaatgtttcttagaaaatcagggtctggaggcagtgcagagcatggaagatgagcccacccaggcattcatgcttaccccgccacaggaattggggcccagccattgcagctttcagacaactggattgctgaattgcaaaatgcctcctgccgaaaaagcatcgcgaatccgtgccgccgagaaagtctctcgcggagaccaggagtctcctgacgcctgcttgcccccaactgtgcccgaggcacccgcccctccacagaaaccactcaattctcaaagccagaaacacctggctccgcccccactgctttctcctttgttgcctagcattaagcctactgtcagaaaaactcgacaggacggctcacaggaggcacctgaagcacccctaagctctgagctcgagccctttcatccaaagccgaagatcaggacccgcaagtcatccaggatgacccccttccctgccacatcagccgctcctgagccacacccaagcacttccacagcacagcccgtcacacccaaacccacatctcaggccaccagatccaggaccaatcggagcagcgtcaagactccagaacctgtcgtaccgactgcaccagaacttcagccatcaacatccacagaccaacctgttacatcagagccaacctcgcaggttaccaggggtcgcaagagtcgatcaagtgtcaaaacacctgagacagtcgttccgaccgctctggagctgcaaccatcaacctctacagatcggccagtcaccagtgaacccacttcacaagccacccggggcagaaaaaacaggtccagcgtgaagacacccgagccagtggtacctactgcacctgagctacagccgagcacttctaccgaccaacctgtgacatctgaacccacctatcaggccacacggggcagaaagaaccgatcttccgtgaagacaccagagcctgtggtgccaaccgcacctgaattacgtccttccacttccaccgatcggcccgttacccccaaacccacctcacgcaccacccggtctagaaccaatatgtcctcagtcaagacaccagagactgtagtaccaacagctccagaattacagataagcacgagcacggatcagccagtcactcctaagccgacctccaggacaacgagaagccgaaccaacatgtcttccgtgaagaaccccgagagcaccgttccaattgcaccagagctccccccttctacgagcacagaacagcctgtcaccccagagccaacctcaagggcaacccgcggccgcaaaaatcggtccagtggcaagacgcccgaaaccctggtgcccactgcccctaagctggaaccctcaactagcacggaccaaccagtcacacctgagcccacctcccaggccacccgcggacggactaaccgttcttctgtgaagacacccgagacagttgtacccacagccccagagctgcaaccaagcacctcaactgatcagcccgtcacaccggaaccaacctcacaggcaacgagggggagaactgaccgctcaagcgtgaaaacgcccgaaactgtcgtgccgaccgcacctgagcttcaggcatccgcatcaactgatcagcccgtcacatccgagcccacttcacggaccacacggggcaggaaaaatagaagctcggttaaaacccctgaaacggttgtcccagcagcacctgaactgcagccaagcaccagcaccgaccagcccgtcacccctgaacccactagccgggccacaagagggcggacgaatagatcatcagtaaaaactcctgaatctatcgtgccaattgcgccagagctccagccctccacaagcaggaaccagttagtgactcctgagcctaccagtcgggcgacgcgatgccggaccaaccgcagctctgtaaaaacccccgaaccagtggtacctactgctcccgagccacatccgacaactagcacagatcagccagtgactccaaagttgacctcccgcgccaccaggaggaaaactaatcgcagcagcgtcaagactcccaagccggttgagccagcggccagtgatctggaaccctttactccaaccgatcagtcagtcactccggaagccatcgcacagggcgggcagtccaaaaccctgcggagctccactgtacgagccatgcccgtgcctacaacacccgagttccagtccccagtaacaaccgaccagccaatttccccagaacccattacccaaccaagctgcatcaaacggcagcgtgccgccggcaaccccggatcccttgcagcccccattgatcataagccctgttcggcccccctggagcctaagtcacaggcttcaaggaaccagcggtggggcgccgtacgagctgcggagtccctgacagcaatccctgagcccgcctcaccccaactgcttgaaactccaattcacgccagtcagatccagaaagtcgagcctgccgggcgctctagattcacccccgagctgcaaccaaaagcctctcagtcacgtaagaggtctttggcgactatggacagcccacctcatcaaaaacagccccagcgcggtgaagtctctcagaagaccgtgatcattaaggaggaggaggaggataccgccgaaaagcccggcaaggaggaggatgttgttactcccaaacccgggaaaaggaagagggaccaggcagaggaagaacctaataggattcccagtcggagcttacgccgcactaagcttaatcaggaatcaacggcacctaaagtgctctttactggggtcgttgacgccagaggggagcgcgcagtactcgctttgggcggaagcctggccggctccgctgctgaagccagccacctggttaccgaccgcattagacgcaccgttaagttcctttgcgccctgggacgaggaatccccatactgtcactggactggctgcaccaaagccgtaaagctggcttcttcttacctcccgacgaatacgttgtcaccgaccctgagcaggagaaaaacttcggtttctccctgcaggacgctctgagcagggcccgtgagagaaggctcctggagggttacgagatttacgttacacccggagttcagccgccacctccccagatgggcgagatcatatcttgttgtggaggcacctatctgccttccatgcctagatcatataagccacagcgggtcgttatcacttgcccacaggacttccctcactgttcaatccctttaagagtgggcctcccactcctatcacccgagtttctcttgaccggagtgctgaaacaggaggcgaagccagaggcctttgttctgtcccccttggagatgagctctacctag

SEQ ID NO: 194555 - DNA, 735 bp, synthetic construct
  misc_feature 1..735: note = Description of Artificial Sequence: Synthetic coding sequence
  source 1..735: mol_type = other DNA
atggaggacacccaggccatcgactgggacgtggaggaggaggaggaaacggagcagtctagtgagtcactgagatgtaacgtggaacccgtggggaggctccatattttcagtggagctcatggaccggagaaggattttccactccatctcggaaagaatgtggtaggacgcatgcctgactgctccgtggcactaccttttccgagcatttccaaacagcacgcagagatagaaatcctggcctgggataaagctcctattttgcgagactgtggatccctcaacggaacccagattctgcgcccaccaaaagtactgagtccaggagtcagccaccgtcttcgggaccaagaactaattctctttgccgacttgctgtgccagtaccaccggctggacgtttcacttccattcgtttccagggggcccctcaccgttgaggaaacgccccgggtccaaggcgaaacacagccgcagaggcttctgctagccgaggactcagaggaagaagtggattttctttccgaaaggaggatggtaaagaagagtaggacaacctcttcatccgtcatcgtgcctgaaagtgatgaagaaggacatagccccgtgctgggtggattgggccccccatttgcgttcaacctaaatagtgataccgatgtcgaggagggacagcagcctcatcgcggaggcttgttaagctgccagaagcggtgccactgccgtgggtag

SEQ ID NO: 194556 - DNA, 735 bp, synthetic construct
  misc_feature 1..735: note = Description of Artificial Sequence: Synthetic coding sequence
  source 1..735: mol_type = other DNA
atggaggacacccaggccatcgactgggacgtggaggaggaggaggagacggaacagagcagcgagtccctaaggtgcaacgttgagcctgtggggcgtctgcatatttttagcggagcacatggtcctgagaaggacttccctctgcacctcggtaagaacgttgtggggaggatgccggactgttcggttgcattgccctttcctagcatttccaaacagcacgcggagatcgagatacttgcctgggacaaggctcctatactgagggattgtggttctctcaatggaacacagattttgagaccacccaaggtgttgtctcccggcgtgtctcatcggcttcgcgatcaagagcttattctttttgctgacctgctctgccaataccatcggctggacgtttcgttgccgtttgttagccgcggacccctcactgtagaagaaactccaagagtgcagggcgaaacgcaacctcagcgactcctgctggcagaagactctgaggaagaagtggacttcctgagcgagcgtcggatggttaagaagtccaggaccacaagtagcagcgtaattgtgccagagtccgacgaagagggtcattccccagtccttggcggtttgggccctccatttgctttcaatctcaactctgataccgacgttgaggagggacagcagccacaccgcggcgggcttctatcctgccaaaagaggtgccactgccgtggctag

SEQ ID NO: 194557 - DNA, 666 bp, synthetic construct
  misc_feature 1..666: note = Description of Artificial Sequence: Synthetic coding sequence
  source 1..666: mol_type = other DNA
atggaggacacccaggccatcgactgggacgtggaggaggaggaggagacagagcagtcttccgaatctctgcgctgtaatgtagagccagtgggtcggctgcacattttcagcggcgcccatggccctgagaaggatttccctctacatctggggaagaacgttgtgggcagaatgccagactgttctgtggcactaccctttccatcaatcagcaagcagcatgctgagatcgagatcctcgcatgggacaaagctcctatattgagggattgcggcagtctaaatggaacccagattctcagctcctctctgcccccgcctcagacttcactgctgcctctgtcactgaggttgcgcctcttaggcgaagagcaaattgatccattgagccgcctgcttaagcagctcagcccgcagcctctgtcttaccgactgcctccaccacaaacgtctcttagcccgctctcccctcatctgggaccccttggggaggaaaaaatagggccgctgtccaggcccctgaaacagctttgtcctcagccgctcagcagttcccttccaccaccccagacaaatctgtctccgctgagcccccatttgggcccactgggtgctggccagatcgggccactcagcagaccactgaaccagctgtccttgtag

SEQ ID NO: 194558 - DNA, 666 bp, synthetic construct
  misc_feature 1..666: note = Description of Artificial Sequence: Synthetic coding sequence
  source 1..666: mol_type = other DNA
atggaggacacccaggccatcgactgggacgtggaggaggaggaggaaaccgagcaatcttcagaaagcctgaggtgcaatgtagaacccgttgggcggctccatatttttagcggggcccatggccctgagaaggattttcctttacacttaggcaagaacgttgtgggaagaatgccagactgcagcgttgccctgccgtttccgagcatttccaagcaacacgccgaaatcgaaatcctggcttgggataaggcgcctatcctgagagattgtggttctctgaacggcactcaaatcctgagtagctcactgccaccacctcagaccagccttctccctttatcattgcggttgcgcttactcggtgaggaacagatcgatcccttatcgcggcttttgaaacagttgtcgccacagcctctcagctatcggctccccccacctcagacctctctgagccctctctctccccacttagggccgctgggcgaggagaaaattgggcccctctcacgacctctgaagcagctgtgtccgcagccgctcagcagctcactgcctccgccacagactaatctcagccctctctccccccacctgggtcctctgggggcgggtcagattggaccgctgtccaggcctctcaaccaattatctttgtag

SEQ ID NO: 194559 - DNA, 5478 bp, synthetic construct
  misc_feature 1..5478: note = Description of Artificial Sequence: Synthetic coding sequence
  source 1..5478: mol_type = other DNA
atggaggacacccaggccatcgactgggacgtggaggaggaggaggaaaccgaacaatctagcgagtccctaagatgcaatgtcgagccggttgggcggctccatatttttagtggagcccatggtcctgaaaaagactttcctctgcatctcggcaaaaatgtggtaggtcgtatgccagattgttcggtggctctgccattcccgtcaattagcaagcagcacgctgaaattgagattctcgcatgggacaaggcgcctatcctgcgcgattgcggcagtctcaatgggacgcaaatactgaggcctccaaaagtactctctcccggggtgagtcacaggttacgggatcaagagcttatactgttcgcagacttgctgtgtcagtaccatcggctagatgtgagcctgccctttgtgagtcgaggacctctgaccgtagaggagactccgagagtgcagggtgaaacccaacctcaaaggctgctgctcgctgaggactctgaagaggaggtggatttccttagtgagaggagaatggttaagaagagcaggaccacctccagttcggttatagtgccagagtccgacgaggagggtcactcgcctgtgctgggcggcctgggcccgcccttcgcgttcaaccttaacagcgacactgacgttgaggagggacagcagcctgctaccgaagaagccagttctgccgcgaggaggggggcaactgtggaagcaaagcagagtgaagccgaagtggtgactgagatccagcttgagaaggaccagcctttagtcaaagagagagataacgataccaaggtaaaacgcggagcaggcaatggagtcgtacccgccggagtgattcttgaaagaagccagcctccaggagaggactctgataccgacgtcgacgatgactcgagaccacctggccggccagcagaagttcacctggaacgagcccagcccttcggcttcattgactctgacactgatgcagaagaggaacgtataccagcgacaccagttgtgatcccgatgaaaaagcgcaagatattccacggagtcggaactcgcggaccaggggcgccggggcttgcccacctccaggagagtcaggcaggcagtgacacggatgttgaggagggtaaggctccccaggccgttcccctagagaagagtcaggcaagtatggtgatcaactcagatacggacgatgaggaggaagtgtcggcagccctgactctcgcgcacctaaaggagagccagccagctatatggaaccgggacgcggaggaggacatgccacagagggtggtgctcctgcaacggtctcagaccaccaccgaacgggactctgatacagatgtggaggaggaggaacttccggtggagaatcgcgaagccgtgctgaaggaccatactaaaataagagccctcgtgagagcccatagtgagaaggatcagccccctttcggcgattccgacgatagcgtcgaagctgataaatcatcccctggcattcacctagaaaggagccaggccagtaccacagtcgatattaatacccaggtggaaaaggaagtcccacctggttccgccatcattcatattaagaaacatcaggtcagcgtcgagggcactaaccagacggatgtcaaagcggtagggggccctgccaagctgcttgtggtttcactggaggaggcctggcccctccatggtgactgcgagactgacgcggaggaaggcacaagtctgaccgcctctgtagtcgcggacgtgaggaagagccagttgcctgccgagggcgacgcaggcgctgaatgggcggcagccgtcctcaagcaggaacgcgcccatgaagtgggtgctcaggggggaccccctgtggctcaggtcgagcaggacctgccaatctccagggagaatctaaccgatctggtggttgacacagatactctgggagagtccacacagccgcagagagagggggcgcaggtgccaacgggcagagaaagagagcagcacgtcggagggactaaggatagcgaggacaattatggcgattcggaagacctcgacctccaggccacccagtgctttctagagaaccaaggacttgaggctgtccagagcatggaggacgagcctacacaggctttcatgctcacccctcctcaggaactcgggccatctcattgttcgtttcagacaactgggctcttaaactgcaaaatgcctccagccgaaaaagcgtcccgcatccgcgcggccgaaaaggtgtctagaggtgaccaagagtctcccgacgcctgcctgccacccacagtccccgaagcgccggctccccctcagaagcctcttaactcccagtctcaaaaacatctcgcacccccacccttgctgtcccctctgctcccctctataaaaccaacagtgagaaaaaccagacaagacggaagccaggaagctcctgaagcccccctgagcagtgagcttgagccattccacccaaagcccaaaattagaacacggaaatccagccgcatgaccccatttcccgccacttccgccgcacctgaaccacatccttccacctctacagctcagccagtcacacccaagcccaccagccaggccacgagatctcgaactaaccgttcctccgtgaaaaccccagaaccagtcgtgccgaccgctcctgaactccagccgtcaaccagtacagaccagcctgtcacaagtgagccaacctcccaggtaactagaggcaggaagtcaagaagcagtgttaagacacccgagacagtggtgcctaccgccctggagcttcagcccagcactagtactgacaggccagtcacttcagagcctaccagtcaagccacgcgcgggcggaagaatagatcctccgtgaagacacccgaacccgttgtacctacagcacccgagctccagccttccacatcaactgaccagccagtgacttcagaacccacgtaccaggccacccggggaagaaaaaacagatccagcgtgaagacaccggagcctgtggtgcccaccgccccagagctcaggccatcaacatcaaccgatcggcctgtgaccccaaaaccaactagccggacgacccgatctaggactaatatgtcaagtgtgaagactccagaaaccgtcgtcccaacagcacctgagctccagatatcaacgtctaccgaccagcccgttacacccaagcctacatccagaacaaccagaagccgtactaacatgtcctctgttaaaaatccagagtcaacagtcccgattgcccctgaactccctccaagcactagcacagaacagcctgtgacgccagaacctaccagccgggccactcgggggaggaaaaataggagcagcggtaagactcccgagactcttgtcccgacagcgcccaagttggaaccctctaccagcacagaccagccggttacacctgagcctaccagtcaagctacaaggggcaggaccaacagatcttccgtgaaaaccccagaaaccgtggttccaacggcccccgaactgcagcccagcacgagtactgatcagccagtgacaccggaacccacctctcaggccacgcggggaagaactgatcgctcaagcgtcaaaacccccgagacagtagtgccaactgctccggaattacaagcctccgctagtactgatcagcctgtgacttcagaacctactagtcgaactaccaggggcagaaagaacaggtcctctgtcaagacacccgagacagtggtgccagctgcacccgaactacagccctccacatctacagatcaacctgtcacccctgagcccaccagtcgggccacaaggggcaggaccaaccgcagctccgttaagactccagaaagtatcgtgcctattgcacctgagttgcagccttctacttcgagaaatcagctggtgacccctgagcctacgagtcgcgcgactagatgtcggacgaacagaagctctgttaaaacgcccgaacctgtggttcctacagcccctgagccgcatcctaccacttccacagaccagccggtcactcctaagctcaccagtagagcaacacggcgaaagacaaatcgctcttcagttaagacgcctaagcctgttgaacccgcagctagcgacctggaacctttcaccccaacggatcaaagcgtaacgcccgaggcaattgcacagggcggccagtccaaaacccttagaagctctacggtacgggcaatgcctgtacccactaccccagaatttcagagccccgtgaccactgaccagcctatctcacccgagcctatcacacagccatcttgcattaagaggcaacgcgccgctgggaatcctggctctctggcagcccctatcgaccacaagccatgcagtgcaccactggagccgaagagccaggcgagtcgcaatcagcgttggggggctgtccgtgcggcggaaagtttgacggccattccagagcctgcctcaccccagctgttggagacacctattcacgccagtcagatacaaaaggttgagcccgcaggccgtagccggtttaccccggaactccagcctaaggcaagtcagtctcggaagcgcagtctcgccactatggatagtccacctcatcagaaacagcctcagcggggagaagtttctcagaagaccgtgatcatcaaggaagaagaggaggatacagccgagaaacctgggaaagaggaagatgttgttacacccaagccaggcaaacgtaaacgggatcaagctgaggaagagccgaataggatcccctcccggagcttgcgacgcaccaaactgaatcaggagtccacggcgcccaaagtgctgttcaccggggtggtagacgcccggggggaacgagccgtgctggcactgggcgggagtctggccggctccgcggcggaggcatcccaccttgttactgacaggatacggcgtaccgttaagtttttgtgcgcgctgggcagaggaataccaatcctgtcactcgattggctgcaccagagccgcaaggcaggcttcttcctcccccccgacgagtatgtcgttacagaccccgaacaggagaagaatttcgggttctccctccaggatgcgctgtcacgcgctagagagcggcgtctgttggaaggatacgagatttatgtcacacctggcgtccaaccccctcccccccagatgggcgaaattatctcttgttgtggcgggacgtacctgcctagcatgcctcggagctacaagcctcaaagagtggtgatcacctgcccccaagattttccccactgttctattcccctgagggtggggttgcccttactcagcccggagtttctcctcacaggcgtgctcaagcaggaggcgaaaccggaggccttcgtgctttcgccgttagagatgagcagtacctag

SEQ ID NO: 194560 - DNA, 738 bp, synthetic construct
  misc_feature 1..738: note = Description of Artificial Sequence: Synthetic coding sequence
  source 1..738: mol_type = other DNA
atggaggacacccaggccatcgactgggacgtggaggaggaggaggaaacagagcaaagctccgaaagcttacgctgtaacgtggaacccgtgggcaggttgcatatcttcagcggcgcacacgggcccgaaaaagatttcccactccaccttggaaaaaacgtggttggcagaatgcctgattgtagcgtcgcactgccattcccaagtatttctaagcagcacgcagagatcgaaatcctggcatgggataaagcacctatcttgcgcgactgcgggtctttgaatgggacacagatactgaggcctcctaaggtgctgtcacctggagtgagccacagacttagggatcaagagcttattcttttcgctgatctactgtgtcagtaccatagactggacgtaagcttgccatttgtctccaggggccctttgactgttgaagaaactccccgcgtacagggtgaaactcaacctcaacgacttctgcttgctgaagactcagaggaggaggttgattttctctcagagcgccggatggtgaaaaagagtagaacaacgtcttcttctgtcatcgtgcccgagtccgatgaggaaggccattcacccgttctgggtggcctcgggcccccatttgcctttaacctcaactctgacacagacgtagaagaagggcagcagcccgcgacagaggaagctagcagtgccgctagacggggcgccacagtggaggcttag

SEQ ID NO: 194561 - DNA, 2238 bp, synthetic construct
  misc_feature 1..2238: note = Description of Artificial Sequence: Synthetic coding sequence
  source 1..2238: mol_type = other DNA
atggcctgccggcagcggggcggcagctggagccccagcggctggttcaacgccggatggtctacatataggagcatatccctgttctttgcactggtgactagcggaaattccattgacgtgagccaactagtgaatcctgcctttccaggcactgtgacatgcgatgaacgcgagatcacggtggaattccccagctcacctgggactaagaagtggcatgcctctgttgtggatcccctgggattagatatgcccaactgtacgtacattttggaccctgaaaagctcactcttagagccacatatgataattgcactcggagggttcacggcgggcatcagatgaccatccgtgtgatgaataactctgccgctttacgacacggggccgtgatgtatcagtttttctgccccgccatgcaggtcgaagaaactcaaggcttgtcagcttcaactatttgtcagaaagactttatgagcttctccctgccaagggtgttcagtggtttggccgacgacagtaaggggaccaaagtgcagatgggctggtcaatcgaagtgggcgatggtgctcgcgctaagactctgacactcccggaggcaatgaaggaggggttctcccttttgatcgacaatcaccggatgacctttcatgtgccgttcaacgcaactggtgtcacacattacgtgcaaggcaactcacatttgtatatggtcagtctgaagctgacgttcatatcccctggccagaaagtgatatttagctctcaggctatatgcgcaccagatcccgtgacatgtaacgctacacacatgacattgacaatccccgagtttccaggcaagctgaagtctgtcagctttgaaaaccaaaacattgacgtcagtcagctacacgacaatgggatagacctggaagctaccaacggcatgaagctccacttctccaagacattactcaagactaagttatctgaaaaatgcctgctccaccaattctatctggcctctctgaagctgacattccttcttcggccggagactgttagtatggtcatctatcctgagtgcctgtgcgagagtccagtgagtatagtcacaggagaactgtgtacccaagatggcttcatggacgtcgaagtttattcttatcagacacagccggccttagacctgggaactctgagagtgggcaacagcagctgccagcccgtcttcgaagctcaatctcagggtctagtgcgctttcacattcccctcaacggatgtggcactagatacaaatttgaggatgacaaagtcgtatacgaaaacgagatccacgctctctggacggatttccctccctctaaaatctctcgtgacagtgagttccgtatgaccgtgaaatgttcgtacagtaggaacgacatgctgcttaacatcaacgtggaaagcctgacaccccccgttgcttcagtcaaattgggcccgtttacccttatcttgcagtcttatcccgacaatagttaccaacagccatacggagaaaatgagtacccgctcgtacggtttttgaggcagccaatctacatggaggtgagggtgctaaatagggacgaccccaatatcaagcttgtgcttgacgattgctgggctacttctactatggacccagactcctttccacagtggaacgtcgttgtggacggttgtgcatacgatctggacaactatcagacgacatttcaccccgtcgggtctagtgtaacacaccccgatcattaccagagatttgacatgaaggcctttgcttttgttagcgaggcgcacgttctgtcatctcttgtctattttcactgcagcgccttgatttgtaaccggttgtcaccagattcaccactctgttccgtgacatgcccagtgagctccagacacagaagagcgactggcgccactgaggccgagaaaatgacagtgtctttgccaggcccgattcttctcctttccgatgatagcagcttcaggggggtaggctccagtgatctgaaggcatctggaagcagtggagagaaaagccgttccgagacaggtgaagaggtgggcagccgaggcgctatggacacaaaggggcataaaacagccggggacgtggggtccaaggccgtggctgccgtggctgccttcgccggggtcgttgcaaccctaggattcatttactatctctatgagaagagaacagtgagcaaccactag

SEQ ID NO: 194562 - DNA, 1806 bp, synthetic construct
  misc_feature 1..1806: note = Description of Artificial Sequence: Synthetic coding sequence
  source 1..1806: mol_type = other DNA
atggccaagacccccagcgaccacctgctgagcaccctggaggagctcgtaccgtatgactttgagaagtttaaatttaaactccagaacacctccgtccaaaaggagcacagccgtatcccacgcagccagatacagagggcccggcccgtgaaaatggctactctgcttgtcacttactacggggaggagtacgccgtacagttaacccttcaggtgttaagggctattaaccagcgtttgctagcagaagagctacaccgggccgctatccaggacatggggtcctgttacgtggcgcaggtcggtcttgaactcttaattagtaacaacccccccatcttcgccagtgagactgccggcattacaggtcgccctccagacaccgcagcttctcccagatgccacgcccaggagggggaccccgttgatggtacttgtgtgcgggattcctgctcttttcctgaagccgtcagcgggcatccccaggccagcggctctcgctctcccgggtgtccacgatgtcaggactctcacgagcggaaaagccctggctctctctccccccagccattaccccaatgcaagcgacatctgaaacaagttcagctgttattttgcgaggaccatgacgaacccatttgcttgatctgcagtttgagccaagaacaccaaggtcatagggtgcgtccaatcgaggaagtagccttggaacacaagaagaagatccagaagcagttggaacatctcaagaaactgagaaaatccggcgaagaacagcgtagctacggggaggaaaaagccgtcagtttcctcaaacaaaccgaagcgctgaagcaaagggtgcagcgaaaactcgaacaggtttactactttttggaacaacaggaacattttttcgtggcctcgctcgaggatgtcggtcagatggtcggtcaaatccgcaaagcctatgacacccgcgtttcccaggatattgccctcctggatgctctgattggggaactagaagccaaggaatgtcagagcgagtgggagttgctacaggacattggagatattctgcatcgggccaaaacagtgcccgtacccgagaaatggacaacgcctcaagagattaaacagaagatccagctgctgcaccagaagtccgaatttgtcgagaaatcaactaagtatttctccgaaacactccgctctgagatggagatgtttaatgtgcctgaattgatcggggcccaggcccatgccgtaaacgtgatactggacgccgagaccgcataccccaacttaatctttagtgatgatttaaagtccgtgcggctaggaaacaagtgggaaagactgcctgacggtcctcaacgcttcgatagctgtattattgtgctgggctcccccagtttcctgtcgggccgacggtattgggaggttgaggtgggcgataagactgcatggatattaggtgcctgtaaaacctccatcagccggaaaggtaacatgaccctatcacctgaaaatggctactgggtggtcatcatgatgaaggaaaacgagtaccaagcgtcgagtgtgccacccacccgtcttctgatcaaggaacctcctaaacgggtgggaatcttcgtcgactacagggtggggagtatctccttctacaacgtcaccgccagaagccacatctacacctttgccagctgttctttctctgggcctttacagccaatattttcccccgggacacgggatgggggaaaaaatactgctccgctcactatatgtcccgtgggagggcagggacccgactag

SEQ ID NO: 194563 - DNA, 1239 bp, synthetic construct
  misc_feature 1..1239: note = Description of Artificial Sequence: Synthetic coding sequence
  source 1..1239: mol_type = other DNA
atggccaagacccccagcgaccacctgctgagcaccctggaggagcttgtgccatatgactttgaaaagttcaaattcaagttgcaaaacactagcgtgcagaaggagcacagtaggataccaaggagccaaatccagcgcgctcggcctgtaaagatggctacccttcttgtcacgtattacggggaagaatacgcagttcaactgactctccaggtgctgagagctattaatcagaggttattggctgaagagctgcacagggccgcaattcagggcaggcctcccgatacagccgcctctcctcgctgtcatgcacaagaaggtgaccccgtggacggaacttgtgtaagagatagttgttcattccctgaggccgtgtcgggacacccgcaggcatctggcagccggtcccccggttgtccaagatgtcaggattctcacgaacgcaaaagtcctggtagcttgtccccacagccgttacctcaatgtaagaggcatcttaagcaggttcaactcctattctgtgaggaccacgacgaaccaatctgtctgatctgtagcctgtcccaggagcaccagggacaccgcgtgcgacccatcgaagaagttgctcttgagcacaagaagaagattcagaagcagttggagcacctgaagaagctgcgtaaatccggagaagagcagcgttcatacggcgaggaaaaggccgtgagctttctgaaacagacggaggctctcaaacagcgagttcagaggaagctcgagcaggtctactactttctggaacagcaggaacactttttcgtcgcgtctctggaagatgtgggacagatggtggggcagattcggaaagcttatgatacgcgcgtctcccaggacatcgccctgctggacgcattgatcggagaactggaggccaaggaatgccagagtgagtgggagctactccaggatatcggagacattctccacagggcaaaaacggtgccagtgccagagaagtggacaacgccccaggaaatcaagcagaagatccaactattgcatcaaaagtcagagtttgtcgagaagagtactaagtacttttctgaaacgttgcggtctgaaatggaaatgtttaatgaccacagccctcagcatggtcttggctcctgggaggagagggactatactcagcatagcatgcaggggccaaaacagggggtgccatgttttttggttgtgaggaccgtatag

SEQ ID NO: 194564 - DNA, 1713 bp, synthetic construct
  misc_feature 1..1713: note = Description of Artificial Sequence: Synthetic coding sequence
  source 1..1713: mol_type = other DNA
atggccaagacccccagcgaccacctgctgagcaccctggaggagctggtgccctatgacttcgagaagtttaaatttaagctgcagaacacatctgtgcagaaagagcattctagaataccacgttctcaaatacaaagggccaggcccgtcaaaatggctacccttctggtgacatactatggagaagaatacgccgttcaacttacgcttcaggtcttgagggccattaaccaaagactgctggccgaggagctgcacagagccgctattcaagggaggcccccggataccgccgccagccctcgctgccacgctcaagaaggggaccctgtcgacgggacctgtgtgcgagattcttgctcatttccagaggcagtttctggccaccctcaggcctctgggtctcggtcccccgggtgtcctagatgccaagacagccacgagagaaagtctccaggttccctctccccccagcccctgcctcagtgcaaacgacacctgaaacaggttcagttgcttttctgcgaagatcatgatgagccaatttgtttgatatgttcattatcacaggagcatcaaggccacagagtgcgaccaatcgaagaagtggcactggaacataagaagaagatccaaaaacagctcgagcatctaaaaaaactgagaaagagcggcgaagaacagcgtagttatggcgaagaaaaggccgtctcatttctcaaacaaacagaagctctcaaacagcgcgtacaaaggaaactagagcaggtctattactttttagagcagcaggaacatttttttgtggcgtccctggaggacgtcggacagatggtaggccaaattcggaaggcttacgacactcgtgtttcccaggacattgccctgttagatgcattgatcggggaactcgaggctaaggagtgtcaaagcgagtgggagctgctgcaggatattggggacatccttcaccgcgccaagacggtgcctgttcctgaaaaatggacaacaccccaggaaattaagcagaagattcagctgctccaccagaaaagtgaattcgttgagaagtccactaaatacttcagcgaaaccctccggtccgagatggagatgttcaacgtgccagaactgattggggcacaagcacatgctgtaaatgtgatcctagatgctgagaccgcttatccaaacttgattttctccgacgatcttaagagtgtaagacttggaaacaagtgggagcggttgccagatggacctcaaagattcgacagctgcatcattgtacttggcagcccctctttcctgtctggtcggcgctactgggaggtggaagtcggagataaaaccgcttggatactgggggcttgcaagacaagcataagtagaaaaggaaacatgaccctgagccccgagaacgggtactgggtcgtaataatgatgaaagagaatgagtaccaggccagctctgtaccgcctactaggttacttatcaaagaaccccctaaacgcgttggcattttcgttgactatcgggtgggatcaatcagcttttataatgtgacagcccggagccatatttacacgtttgcctcctgtagctttagcggccctttgcagcccattttctccccaggaacaagggacggcggtaaaaacacggccccactcacgatttgccccgtgggcggtcagggcccagactag

SEQ ID NO: 194565 - DNA, 1209 bp, synthetic construct
  misc_feature 1..1209: note = Description of Artificial Sequence: Synthetic coding sequence
  source 1..1209: mol_type = other DNA
atggccaagacccccagcgaccacctgctgagcaccctggaggagcttgtgccctatgatttcgaaaaattcaaatttaagctgcaaaataccagcgttcagaaggagcactctcgcatccccagatctcagatacagagagctaggcccgtgaaaatggccactctcctggtcacctattacggagaagaatatgcagtacaactgacactgcaggtacttcgtgcgatcaaccaaagattactggcagaggagctgcaccgggccgcaatacaaggccggccccctgatactgcagcatcaccacggtgccacgcacaagaaggcgaccccgtggacggtacatgtgtgcgggactcctgcagttttcctgaagccgtgtcagggcacccccaggcatcaggttcacgaagtcctggttgcccccggtgccaagacagccatgaacgcaagagcccaggttctttgtcaccccaacctctaccccaatgcaaaagacacctgaagcaggttcagctgttattctgcgaagatcatgatgagcctatttgtttaatttgcagtcttagccaggagcaccagggccatagagtgaggcctattgaggaggtggccctcgagcataagaaaaaaatacagaaacaactcgagcatctaaaaaaactgaggaagagcggcgaagagcaacggtcttatggggaggagaaggctgtgtcgttcttgaagcagaccgaggccctcaagcaacgcgtacaaagaaaacttgaacaagtgtactacttcctggagcagcaggagcatttttttgtagctagtttggaggatgtggggcagatggttgggcagatccggaaagcttatgatacaagggtgtctcaggacatcgcacttctagacgcgctcatcggtgagcttgaagctaaagagtgtcaatctgagtgggaactgttgcaggacattggtgatatcctgcatagggccaagaccgtcccggtgccagagaaatggaccactccacaggagatcaagcagaagattcagctcctgcatcagaaatcagaattcgttgagaaatcaactaaatattttagcgagactctgcggtccgaaatggagatgtttaatggtgaatcatccggcaatggtgtctgttggcctggcgtagtggcagtctttccctgcgcagttgacctgcgaggtcctatttag

SEQ ID NO: 194566 - DNA, 1338 bp, synthetic construct
  misc_feature 1..1338: note = Description of Artificial Sequence: Synthetic coding sequence
  source 1..1338: mol_type = other DNA
atggccaagacccccagcgaccacctgctgagcaccctggaggagctggtgccttatgactttgaaaagttcaaatttaaactgcagaacacaagcgtccagaaagagcacagcaggattccccggagtcagattcagcgcgcccgtcctgtcaaaatggccacactcctggtcacatattatggagaggaatacgctgtgcaactgactttgcaggtgctgagagccattaaccagcgcctgctggctgaggagctgcatagggcggcaatccagggcaggcctcctgacaccgcagccagtcctcgttgtcacgcccaggagggtgatcctgtcgatgggacctgcgtgcgcgactcctgctctttccccgaagctgtgtctggccacccacaggcttccggcagccgatcccccggatgtcccagatgtcaggatagtcacgaaagaaaaagccccggctcgctgagcccccaaccactgccccagtgcaaaaggcacctgaagcaggtgcagttgctcttctgtgaggaccacgatgaacccatttgtttgatctgtagcctctcacaggagcaccaagggcaccgcgtcagacctatagaagaggtggcgttggagcacaagaagaaaattcagaagcagcttgagcatttaaagaagctgagaaagagcggtgaggaacagcgcagctacggggaggaaaaggccgtcagcttcctcaagcagactgaggccctgaagcagcgggtccagcgcaaattggagcaagtgtactacttcctcgagcagcaggagcacttctttgtcgcatctctcgaggacgtgggccagatggtcggacagatcagaaaagcttacgatacaagggtctcccaagatatcgcactccttgatgctctgatcggggaacttgaagcgaaggagtgtcaaagcgagtgggagctgttgcaggatattggcgacatcctgcatagggccaagacagtgcccgtgcccgagaagtggaccacaccacaggagattaaacagaaaattcagctgttacaccagaaatcagagttcgtcgagaagagcactaagtacttcagtgagacactacgctccgagatggagatgtttaacgatcactcgccacaacacggcctcggtagctgggaggaaagagattatactcagcactccatgcagggccccaaacagggtgtgccatgcctgtcactcctctccggtcaatgcaacctggcccccctgaacgccaatgcccaggacttctttccatacttgatttttctgagatcctccggggcagattggaggtccggcacctgctgttag

SEQ ID NO: 194567 - DNA, 2067 bp, synthetic construct
  misc_feature 1..2067: note = Description of Artificial Sequence: Synthetic coding sequence
  source 1..2067: mol_type = other DNA
atggccaagacccccagcgaccacctgctgagcaccctggaggagctggtcccctacgattttgagaaatttaaatttaagcttcagaacacatccgtgcagaaagaacattctcgtattcccagaagccaaatccagcgggcccggcctgtgaagatggccacactgctggtcacttactacggagaggaatacgcggttcaactgactctgcaagtactgcgagccattaaccagcggctgctggccgaggagttgcaccgggcggcgatccaagagtattctactcaagagaacgggactgatgactcagccgcaagcagtagccttggggaaaacaagccccgatccctgaaaacacctgatcaccccgagggaaacgaaggaaatggcccacggccatacggcggaggggctgccagcttaagatgctctcagcccgaggcaggccgcgggctttcccgaaagccactgagcaagcgtcgggagaaagcatccgagggcttggacgcgcaggggaagcctcgtactcggtcacccgcgctgcccggagggagatcgcctggtccttgccgtgccctggagggaggacaggctgaggttagactgaggcgcaatgcctccagcgccggaagactgcagggcctcgccggcggagcacccgggcagaaggagtgtaggcctttcgaggtttacttaccctccggcaagatgcgtcccagaagcctggaggtgactatcagcactggggagaaggcgccagccaaccctgaaatcctgttaacccttgaggaaaagaccgccgctaatttggattccgctacagaacctagagcccgccccacaccagacggtggtgctagcgcagacctcaaagaagggcctggcaaccccgagcactccgtcacaggccgcccccccgacactgccgcttcacctaggtgccacgcacaagagggcgatcctgtggacggcacctgcgtgcgcgacagttgctcctttcccgaggctgtgtcaggtcacccacaagccagtggctcaagaagcccaggctgcccacggtgccaggacagccacgagagaaaaagtccaggcagtctgtctccccaacctctgccgcagtgtaagagacacctgaaacaggtgcagctgcttttttgtgaggaccatgacgaaccgatctgtttaatctgttcactgagccaggagcaccagggccaccgtgtgcgccctatcgaagaagtggcattggaacataaaaaaaaaatacaaaaacagctggaacacctcaagaagctgaggaagagtggggaggagcagagatcttacggcgaagagaaagcagttagctttctcaagcagaccgaggctctgaagcagagagtccagagaaaattagagcaagtgtattatttcctcgaacagcaggagcatttctttgtggcaagcctggaagatgtcggacagatggtaggccagattaggaaggcatatgatacacgggtcagccaagatatcgccctgctggacgcccttattggtgaactggaggcaaaggaatgtcagtcagagtgggaactcctgcaggatatcggcgacatcctgcatcgggcaaaaacagtaccagtgccagagaagtggaccactccccaggagattaaacaaaagatccagctcctgcatcagaagtcggagttcgtggagaagtcaactaagtatttcagcgaaactctaaggagtgaaatggagatgtttaacgttcccgaactgattggggcacaggcacacgctgtgaatgtgatcctcgatgcggaaacagcctacccgaatttgatctttagcgacgaccttaagagtgtccggctggggaacaaatgggagaggttgccagatgggccccagcggttcgacagttgtatcattgtgctgggctcccccagtttcctttccgggcgacgatattgggaagtagaggtgggcgataagcgattctcctgcctcagccttcgttctagctgggattatcggcgaccacccccctgtccggccaacttcctgcacttctag

SEQ ID NO: 194568 - DNA, 2796 bp, synthetic construct
  misc_feature 1..2796: note = Description of Artificial Sequence: Synthetic coding sequence
  source 1..2796: mol_type = other DNA
atgccccccctgaagagccccgccgccttccacgagcagcggcggagtcttgaaagggctagaacagaggattacctcaagagaaagatcaggtcaaggcctgagcggtcagagttggtgaggatgcatatactagaggagactagtgcggaaccttctctgcaggccaagcagctgaaactgaagcgcgccaggctggccgacgacctcaacgagaagattgcgcaacgtcccggtcctatggagctcgttgaaaagaatatactgcctgtggagtcatccctgaaggaggctataatagtgggccaggtgaactaccccaaagtggcagatagcagtagctttgacgaggattcatcagacgctttgtctcctgaacagcccgcttcccacgagtcacaaggttctgttccttcccctctggaagcacgcgttagcgagcccttgctgagtgctacgtcggcctcacctacccaggtggtgtctcaattgcccatggggcgggacagcagagaaatgctttttcttgccgagcagcctcctttgccgccgccacctctcctacccccctcccttaccaatggcaccactatcccgaccgccaaaagcacacccaccctaatcaaacagtcccagcccaaatccgctagcgagaagtcccagcgcagcaagaaagcaaaagaattgaaaccaaaagtgaagaagctgaaataccaccagtacataccaccagaccagaagcaggacaggggtgcaccaccaatggactccagctatgccaagattttgcaacagcagcagctttttctgcagttacaaatactgaaccagcagcagcagcaacaccataattatcaggcaatcctgcccgcgcccccaaaatccgccggggaagctttggggagtagtggcacccctccagtaaggtctctctccactaccaactcctcctcatcatcaggtgcgccagggccctgtgggctagctaggcagaatagcaccagtctgacggggaagcccggggcgttacccgcgaacctggatgatatgaaggtcgccgaacttaaacaggagctcaaactaaggtctctacccgtttctggtacaaaaacggagctgattgagcgtctccgcgcgtaccaagatcagatctcccccgtccccggtgcgcctaaggctcctgctgctacaagcatactacacaaggccggcgaggtggtggtggcatttccagccgcacggctgtcaacgggtccagctttggttgccgccggtctggctcccgcagaggtggtggtagctaccgtggcctcatctggtgtggtcaaatttggttctaccggatctacaccaccggtgtctcctacaccatccgagagaagccttctgagcaccggcgatgagaactccacaccaggggatacttttggcgagatggtgacctcccccctcacccagcttaccttgcaggcctcgcccttacagatcctcgtgaaagaggagggccccagagcagggtcttgctgtctttcccccggggggagagctgaattggaaggacgagacaaggaccagatgctacaggagaaggacaagcaaatcgaagctctgacacggatgctgcgccagaaacagcagctcgtggaacgtctgaagttacagctggagcaagagaagcgagcacagcagcctgcaccagctcccgcccccctcggtacacccgtcaaacaggagaattctttttcaagctgccaactttcacagcagccactgggcccagcccacccattcaacccatcactggctgcgcctgcaacgaatcatatcgatccctgcgcagttgcccccggaccccctagcgtggtggtgaagcaggaagctctccagcccgaacctgagccagtgccagcacctcagctgctgttgggtcctcaaggaccaagcctcatcaaaggggtggcaccacccactctaataactgacagtactggaacccacttggtgttaacagtgactaacaagaacgcagatagccctggccttagctccggcagcccacagcagcccagcagccagcccggaagcccagcaccagccccatccgctcaaatggacctcgaacacccgcttcaaccgctctttggcacaccaacctcactcctgaaaaaggaaccccccggttatgaggaggcaatgtctcagcaacccaaacagcaggaaaacgggagcagttctcagcagatggacgacctctttgatatcctgattcagtcaggggaaatctctgctgactttaaggagcccccatccctgcctggaaaggaaaagccttcccctaaaacagtatgtggctcccctttggccgcacagccaagcccatctgccgagctcccacaggctgccccccccccccctgggagcccatctttacctggccgattggaagacttcctggagtcctccactggccttccccttcttaccagcggtcatgacggacctgaacccttgtcccttattgacgatctgcactcgcagatgctgtccagtacagccattctggaccacccaccctctccaatggacacatctgagcttcacttcgttcctgaaccaagctctaccatgggtctcgacctggctgatggacatcttgactccatggattggctggaattgagtagtggcgggcccgtgctgagcctggcacctctttcaacaaccgcccctagtctcttttctaccgatttcctcgacggccacgacctccagctgcattgggacagctgtctgtag

SEQ ID NO: 194569 - DNA, 2397 bp, synthetic construct
  misc_feature 1..2397: note = Description of Artificial Sequence: Synthetic coding sequence
  source 1..2397: mol_type = other DNA
atgccccccctgaagagccccgccgccttccacgagcagcggcggtccctcgagagggcaaggaccgaggattatctcaagaggaaaatccgttccaggcctgagagatctgaattggtgcggatgcacattctagaggagacatccgccgagcccagcttacaggccaaacagttaaaactcaagcgagctagacttgcggacgacctgaacgagaagatcgcgcagcggcctgggcccatggaactcgtcgaaaaaaatatccttcccgtggaaagctcacttaaggaggctatcatcgtcgggcaggtgaattatccaaaagttgccgactcatcctcattcgatgaggattcttccgacgccctgagccccgagcagccagcctctcacgaatcacaggggtcggtacccagccccctcgaggccagggttagtgaaccgctccttagcgctacctccgcaagccctacccaagttgtttcccagttacccatgggccgagactccagggagatgttgttcttagctgagcaaccacctttgccaccacctccattattgccacccagcctgactaatggaaccacaatacccacagctaagagtacacctacccttattaagcagagccagccgaaaagtgcttcagagaagtctcagaggtccaagaaggctaaggagttgaagcctaaagtcaaaaaactaaagtaccatcagtatataccccccgaccagaagcaagacaggggggcgcctccaatggactcttcgtatgcaaaaatcctccaacagcagcagttgtttctacagctgcagatcctcaaccaacagcagcagcagcaccataactatcaagccatcctccctgccccacccaaatctgcaggcgaagccttggggtcatctggtaccccacctgtccggagcttgtccacaaccaattcttcctcatccagcggggcgcccggaccttgcggcttggcccgacaaaattctacctccctgacaggcaagcccggggccctacctgcgaatctggatgatatgaaagtggcagaacttaaacaggagctgaagctccggtcacttccagtcagtggaactaaaaccgagctgatagagcgattgcgagcataccaggaccagatcagcccagtccctggggcccctaaagcccctgccgccacttctatcctccacaaggccggggaggttgtggtggcgtttccagcagcccggctgtctacaggacctgcccttgtggcagcaggcctggcaccagctgaagttgttgtcgctaccgtggcaagctctggggtagtcaaatttggctccacaggctcgacccctcccgtcagccctaccccaagcgaacggtcactcctaagcacaggcgatgagaattccacccctggtgacaccttcggagagatggtaaccagcccacttacgcagctcaccctgcaggcttctcctctccagattctcgtgaaggaggaaggaccacgcgccgggtcctgttgtcttagtccgggaggtcgtgccgaactcgagggccgggacaaggaccagatgcttcaggagaaagataagcagatcgaggccttgacacgcatgttgcgccaaaagcaacagctcgtagagagactgaaactccagctggaacaagagaaacgggcacagcagccagcccccgctccagcccctttgggaacacccgttaaacaggaaaactccttctcttcctgccagctctcccagcagccgctcgggcctgctcatccctttaatcctagcctggccgcaccggctactaaccacatcgacccatgcgctgtagcccccggacctccatctgtcgttgtcaagcaggaggctcttcagcccgagcccgagcccgttccggctccccagctgttacttggcccccaggggccgtccctgattaaaggagtcgctccccccaccctgattacagatagtaccggaacccaccttgtgctgactgtgaccaacaaaaatgccgactctcccggtctgagcagcgggagccctcaacagccttctagtcagcctggcagccccgcgcctgccccgtcagcccagatggacctagaacaccctctgcagcccctatttggcactccaacaagtctgcttaaaaaggagccaccaggctacgaagaagctatgtcacagcagccgaagcagcaagaaaatggctcatctagccagcagatggacgacctttttgacatcctaattcagtctggaggcaacccccgaaatttctccaggttccagggcgcagctatacctgcccgggaaggagaagcaattcctgaggatagcctgtgggttcctcccggttcaactgctatcacgttctgttag

SEQ ID NO: 194570 - DNA, 2646 bp, synthetic construct
  misc_feature 1..2646: note = Description of Artificial Sequence: Synthetic coding sequence
  source 1..2646: mol_type = other DNA
atgccccccctgaagagccccgccgccttccacgagcagcggcggtccctggagcgggcccggactgaggactacctcaagaggaaaatcaggagcaggccagagcggagtgagctcgtgagaatgcatatcctggaagaaacaagcgcagaaccaagcttgcaggccaaacagctgaagttgaagagagctagactcgctgatgacctcaacgagaaaattgcccagaggcctggccccatggagctggtcgagaagaacatcctacctgtggaatcatcattaaaggaggctatcattgtcggtcaggtcaactacccaaaagtcgctgattccagttctttcgacgaagactcctccgacgccttgagccccgagcaaccagcaagtcacgaaagtcagggtagtgtgccatcccccctggaggccagggtgtccgagccactcctctcggccacaagtgcctctccaactcaacagtcccagcctaagtccgcctcagaaaagtctcagcgcagcaaaaaggcaaaagaactgaagcctaaagtcaagaagcttaagtaccaccagtatatccctccggaccagaaacaggacaggggcgctcccccgatggattccagttacgccaaaattttgcagcagcagcagttgttcctgcagctgcagatcttgaaccaacagcagcagcaacaccataattaccaagccatcctcccagcccctcctaaaagtgcaggggaggccctgggatcgagcggtacgccacccgtgaggtctctgtctacaaccaactcgtccagctcttctggtgcccccggaccatgtgggctggcgcggcagaactcgacatccctgaccggcaagcccggcgccttgcccgcgaacttagacgatatgaaagtggcagagcttaaacaagaacttaagctgagatctctcccagtatccgggactaagaccgagctgattgaaagactgagagcttatcaggaccagatttcccccgtaccaggtgcacctaaagcaccagccgctacaagcatactgcataaggccggagaagtggtggtggcattccccgcagctagactcagtacaggaccagccttggtagccgctgggttggccccggcagaggttgtggtcgcaacagtggcaagctctggcgtggtgaaattcgggtccacagggagtacaccccccgtgtctccaacaccgtccgagcgcagcttactgtccacaggggatgagaacagcactcctggcgacacattcggtgaaatggtgacctctcccctgacccagttgacgttgcaggctagtcccctgcagattctggtgaaggaagagggccctcgcgctggatcctgctgccttagccccggtggacgcgcggaactggagggccgcgacaaggatcagatgttacaagaaaaggacaaacaaatagaagctttaacccgcatgctgaggcaaaaacaacagctagtggagaggctgaaactccaattagaacaggagaagagggcccagcaaccggcgcctgccccagcccccctggggacccccgtgaaacaggagaacagcttcagcagctgccaactttcgcagcagcctctgggtcctgcccatccattcaacccttcccttgccgccccagcaactaatcatatagacccatgtgctgtggcgcctgggccccccagtgtggtcgtgaaacaggaagcactgcagccggagccagagccggttcccgctcctcagttgctgttgggcccgcagggaccttctctcattaaaggcgtggccccacccactctcattacagatagcacagggacacacctggtgctcactgtcacaaacaagaatgctgacagccctgggttgagttccggtagtcctcagcaaccttcctcacaaccgggatcgccagcacccgccccgtcagctcagatggatcttgagcatccactccagcccctgttcggcacaccgaccagcctgctgaaaaaggaaccccccggttacgaggaggcaatgtcgcagcagcccaagcaacaagagaatggctcaagttctcagcagatggatgatctattcgacattctgattcaaagcggggagatctccgcagactttaaagagcctccttccctgccaggaaaggagaaaccttctcctaaaacagtgtgcggtagcccactggctgcccagcctagtcctagcgcagaactgccccaggctgctcccccgcctcccgggagcccttcgctgcccggccgcctcgaagatttccttgagtcgagcactggcctgccgctcctgaccagcggacacgacggaccagagccgctttctctaatcgacgacctgcacagtcaaatgctgtctagcaccgcaatcctggatcaccccccctccccaatggatacttcagagctgcatttcgttcccgagccgagttctacaatgggattagatttggcagacggacatctcgacagtatggattggcttgaactcagcagtggtggacctgtgctcagcctggctcctctgtccacgactgccccatcactgttcagcaccgacttcctcgatggccatgatctacagctgcattgggatagctgtctgtag

SEQ ID NO: 194571 - DNA, 2796 bp, synthetic construct
  misc_feature 1..2796: note = Description of Artificial Sequence: Synthetic coding sequence
  source 1..2796: mol_type = other DNA
atgccccccctgaagagccccgccgccttccacgagcagcggcggtcactcgagcgcgcaaggacggaggactatcttaagagaaaaataaggagcagacccgaacgcagcgaactggtaaggatgcacatcctggaggaaaccagcgctgagccaagcttgcaagctaagcaactcaagctgaagagagcccggctggccgatgatctcaacgaaaagattgcgcagaggcccggaccaatggagctggtcgagaaaaatattctacccgtcgagtcctcactcaaggaggctatcatcgtgggacaggttaattaccccaaggtcgcagactcctcttcattcgacgaagattctagcgacgctctatctccagagcagccagcatcacatgagagccaaggtagcgtaccgtcccccctcgaagcccgggtatcagagccattactgtcagcaacgtcagcaagccccacccaggttgtgagccagctgcctatgggtcgggactctcgtgagatgctttttttggcagaacaacctccgctgccgccacctccgttattgccacctagcctcacaaatggcaccaccattccaactgcaaaatcaaccccaaccttaattaaacagtcgcagcccaaatctgcctcagagaaatcgcaacgctccaagaaagctaaggagcttaagcccaaggtgaagaaattaaagtaccatcaatacatcccaccagatcagaaacaggacaggggcgctcctcccatggattctagctacgccaagatcctccaacaacaacagcttttcctccagttacaaatcctcaaccagcaacagcagcagcaccacaattatcaggctatactgcctgccccacctaaaagcgccggggaggcactgggaagctctggaactcctcccgtgcgttcgctctctacaaccaattcctcctcatccagcggagcccctggaccctgtggcttggcccggcagaactcaacctcactcacaggaaaaccaggggccttaccagccaacctggacgatatgaaggtcgccgagctgaaacaggaactgaagctaagaagccttcctgtaagcggaactaagaccgaactgattgagcggttacgcgcctatcaggatcaaatcagcccagtgcccggcgcacctaaggcccctgctgccactagcattctgcacaaagctggtgaggtcgtcgtggcattcccggccgcgaggctgagtacggggccggcgctggtggccgctgggcttgccccagccgaggtcgtggtcgcgaccgttgcatcatctggcgtagtgaaatttggttcaaccggctccacaccccccgtgtccccaactccgtccgagagaagcctgctgtccaccggggacgagaactctacaccaggcgacaccttcggcgagatggtcacctcacctctaacccagttgactctacaggcctcccccctgcaaatcctcgtgaaagaggaggggccacgcgctggatcctgctgtttgagtccaggaggacgagcagaattggagggtagggacaaggatcaaatgttgcaagaaaaagacaagcagatcgaggctctcacgagaatgctcaggcagaaacagcaactggttgaacggctgaagttacagctcgaacaggagaaacgcgcccagcagccagcgcctgctcccgcacctcttggtacccctgtcaagcaggaaaacagtttctcctcttgtcagctgtctcagcaaccattggggcctgcgcacccattcaatcccagtttggccgctcctgccaccaaccacattgatccgtgcgccgtcgctcccgggcccccaagcgtagtcgtgaagcaggaagccctacagcctgagcctgagccggtgcccgcacctcagttgctgctgggccctcaaggaccttctctcatcaagggcgtagctccacctactctaataacggatagtacgggaacccacctcgttctgaccgttactaacaagaatgccgacagcccaggtttgagttctgggagtccacagcaaccttcaagtcagccagggtctcccgcacccgcccccagcgcccaaatggatcttgagcatccgctgcaaccactcttcggtaccccaactagcctgttaaaaaaagagcctccggggtacgaagaggcaatgtcccagcagccaaagcagcaggagaacggcagtagttctcagcaaatggatgaccttttcgacatcctgatccaaagcggcgagataagtgcggacttcaaggagccacctagcctccctggcaaggagaagccttctcccaaaacagtatgcggcagccccttagccgcacagcctagtccatcagctgaattgccgcaggctgcccctccccctcctggcagcccaagtcttccgggccgccttgaagattttctggagtcctccacagggctgccgctgctgacaagtggacatgacggcccagagccattaagcttgatcgatgacctacacagccagatgctgagctctacagccattttggaccatccacctagcccaatggatacatcggagctgcatttcgtccctgaaccttcttccaccatgggcttggacctggcggatggtcacctagattctatggattggctagaacttagtagcggtggaccagttctgtcactggcaccgttgtccactactgcccctagcctgttctcgactgattttctggatgggcacgaccttcagctgcactgggacagttgcctgtag

SEQ ID NO: 194572 - DNA, 258 bp, synthetic construct
  misc_feature 1..258: note = Description of Artificial Sequence: Synthetic coding sequence
  source 1..258: mol_type = other DNA
atgctgagcagcaccgccatcctggaccacccccccagccccatggacacctccgaactgcacttcgtccctgagccaagctccaccatgggattggatcttgctgatggtcatttggattccatggactggctagagctaagctcgggggggcctgtgctatcgctggccccactgagcaccaccgccccgtccctgttcagcacggactttttggatggccatgacctgcagttgcactgggactcctgtctttag

SEQ ID NO: 194573 - DNA, 1524 bp, synthetic construct
  misc_feature 1..1524: note = Description of Artificial Sequence: Synthetic coding sequence
  source 1..1524: mol_type = other DNA
atggccggccggggcagcctggtgagctggcgggccttccacggctgtgattccgctgaggagctccctcgagtgagtccacgcttcttgagggcgtggcaccctccacctgttagcgccaggatgccaacccgacggtgggcccctgggacacagtgtataaccaaatgtgagcacacccggcccaaaccaggagagctggcatttagaaaaggggacgtagtgaccatactggaggcttgcgagaacaaatcttggtatcgcgtgaagcaccacacttcgggccaggagggcctgctcgcagctggcgccttgcgcgagcgagaggcgctgagtgccgacccaaaactttctctgatgccctggttccatggcaaaatcagcggtcaggaagcggtacagcagctccagccacctgaagatggcttgtttctagtccgagagagcgctcgacatccaggtgattatgtactttgcgtgtcctttggaagagacgttatacattacagagttttgcaccgcgatggccatctcaccatcgacgaagccgttttcttctgtaacctgatggatatggtggaacattactccaaagacaagggggccatctgtacaaagctggtgcggccaaagcgcaagcatgggacgaagtccgccgaggaagaattggcccgggccggctggctgctgaatttgcagcatctgacactcggggcgcagatcggcgagggtgagtttggcgccgtgctccagggggagtacctcgggcagaaggttgcagtgaagaacattaaatgcgacgtgactgctcaggcctttttggatgaaactgcagttatgaccaagatgcagcacgagaacctggttcgactgttgggagtcatcctgcaccagggcctatatattgtcatggagcacgtgtccaaaggcaatcttgtcaacttcctccgaacccgcgggcgagcactagtgaacacagcgcagctgctccagttcagtctgcatgtggctgagggaatggagtatctggaaagcaagaaactcgtgcatcgggacctagccgctcgaaacatcctagtatctgaggacctggtggctaaggtatccgatttcgggctggctaaggctgaaaggaaaggtctcgattcatccagattacctgtgaaatggactgccccagaggccctcaaacatggcaagtttacctccaagtccgacgtgtggagctttggagtacttctttgggaagtgttctcttacggacgagcaccttacccgaaaatgtctcttaaagaagtgtcagaagcggtggagaaaggctaccggatggagccacctgaaggctgcccagggcccgtacatgtgctgatgtccagttgttgggaggcagagcctgccaggcgcccaccttttaggaagttggccgaaaagctggcccgcgagctccgctccgccggtgccccagcatctgtgtcaggccaggatgccgatgggagcacttctcctcggagtcaggagccttag

SEQ ID NO: 194574 - DNA, 1401 bp, synthetic construct
  misc_feature 1..1401: note = Description of Artificial Sequence: Synthetic coding sequence
  source 1..1401: mol_type = other DNA
atgcccacccggcggtgggcccccggcacccagtgcatcaccaagtgtgagcacacccgcccaaaaccaggcgaattggcgtttcggaaaggagacgtggtcacaattctggaggcctgtgaaaacaaaagctggtatcgcgtcaaacaccatacatctggtcaggaaggcttactggctgcgggagctctacgggagagagaggccttgtcagccgatccaaaactgtcccttatgccatggttccacggtaaaatctcagggcaggaagccgtgcagcagttgcagcctcctgaagatgggctttttttggtaagagaaagcgcccgtcacccgggcgactacgtgctgtgcgtaagcttcggacgggacgtgattcactacagagtcttgcacagagatgggcacctcaccatcgatgaagctgtgttcttttgcaatctcatggatatggtggagcactactcgaaagacaaaggcgctatttgcacaaagcttgtgaggcccaaaaggaagcacggtaccaagagcgccgaggaagagctggccagggccggctggttactgaatttacagcatttgactctcggggctcagatcggcgagggcgagtttggggccgttctccagggggaatatttaggccaaaaggtagctgtgaagaatataaaatgtgatgtaaccgcacaggcattcctcgatgaaaccgccgtgatgactaaaatgcaacacgagaacctcgttcgtcttctgggagtgattctccaccaggggctctatattgtgatggagcatgtctccaaggggaacttggtcaacttcttgcggacaaggggacgcgcgctagtcaatacagcccagctcctacagttctccttgcatgttgcggagggaatggaatatctcgagtctaagaagttagttcaccgagatctggccgctcgtaatattctcgtgtcagaggatttagtcgcaaaggtgagcgattttggcctggctaaagccgaacggaagggtctggacagcagtagactgcctgtgaagtggaccgccccagaggcactgaagcatggcaagtttacctcgaaatctgacgtatggagcttcggggtgctcctgtgggaggtctttagctatggccgggcgccttatcctaagatgagccttaaggaggtcagcgaggcggtggagaagggttataggatggagccacctgaaggttgcccgggcccagtacatgttctgatgagctcatgttgggaggcagaaccagctagaaggcccccttttaggaaactcgcggagaagctggccagggagctgaggtccgccggcgccccggcatcagtttccgggcaagatgctgatggctctaccagcccacgctctcaggagccctag

SEQ ID NO: 194575 - DNA, 1527 bp, synthetic construct
  misc_feature 1..1527: note = Description of Artificial Sequence: Synthetic coding sequence
  source 1..1527: mol_type = other DNA
atgcagggccacttccccgccgagcggcgggagggccggccccggagaggtacccggggccaacagcagcttcttgtaagtccaaggtttctccgggcttggcatccccctcccgtcagcgcaaggatgccaactcgtcgctgggcccccggaacacagtgcattactaagtgcgaacacacccgacccaaacctggagaattggcatttcggaaaggcgacgtggtaacaattcttgaggcgtgcgaaaataagtcgtggtaccgcgtaaagcatcatacctctgggcaggagggcctgctggccgctggcgcccttagggagcgcgaagcactgagcgccgatcccaagttgtctctaatgccgtggttccacggaaagatttcagggcaggaggcagttcaacagctgcaaccgcccgaagatggcctgtttcttgtgcgagaatccgctagacatccaggcgactacgtgttgtgcgtgagctttgggagggacgtcatacattacagggtactccatcgggacggacacctgacgattgatgaggccgtgttcttttgcaacctgatggacatggtggaacactactctaaagacaagggcgccatttgcaccaagctggtgcgccctaagcgtaagcacgggacaaagagtgccgaggaggaactggcccgggctgggtggctactgaacctgcagcacctgaccttaggggcccaaatcggcgaaggcgagtttggcgctgtcctccagggtgaatacttggggcagaaagtcgccgtgaagaacataaaatgtgacgtgaccgctcaggcgttcctggatgagacagccgtgatgactaagatgcagcatgagaaccttgtgagactgctgggagtaatcctccaccaggggctatacatcgtgatggagcacgtctcgaagggcaatctggtaaattttctgagaactaggggcagagctctggttaatacagctcagcttctccaattctctctccacgtcgccgagggaatggagtatctggaatcaaaaaagctcgtccatagggatctggccgcccgcaatatcctcgtgagtgaagacctcgttgccaaggtgagcgattttggactggcgaaggccgaacgcaagggattggactcttctagactgcctgtcaaatggaccgctcccgaagcccttaaacacggcaaattcacgtccaagtcagacgtttggagcttcggagtcctgctctgggaagtatttagttacgggcgcgcgccctatcctaagatgagcctgaaagaagttagtgaagctgtcgagaaggggtatcgcatggagccccctgaaggctgccctggccctgtgcacgtgttaatgagctcatgttgggaagcagagcccgcaagaaggcctcctttcagaaagctagcagagaagcttgcccgcgagctgcgcagcgccggcgcccccgccagcgtgtccggtcaagacgccgacggaagtacaagtccaagaagtcaggaaccctag

SEQ ID NO: 194576 - DNA, 1134 bp, synthetic construct
  misc_feature 1..1134: note = Description of Artificial Sequence: Synthetic coding sequence
  source 1..1134: mol_type = other DNA
atgacccaggagcccttccgggaggagctggcctacgaccggatgcccacactggagcggggaagacaggatccggccagctacgcaccagatgcgaagcccagtgacctgcagctgagtaagcgacttcctccctgcttctcccacaagacttgggtgttcagcgtgttgatggggagctgcctgctggttaccagtggtttttcactgtacttgggcaatgtctttcccgctgagatggattatctcagatgtgctgcaggaagctgcatcccaagcgccattgtctcatttaccgtgtcacggcgcaacgcgaacgtgattccaaattttcagatactgttcgtgagcacctttgctgttacaactacctgcctgatatggtttggatgcaaactggtcttgaacccatccgcaatcaatattaatttcaatctgatccttctactacttttggagctcttgatggctgctactgttatcattgctgctagatccagtgaagaggattgtaagaagaagaaagggtccatgtccgattcagctaacatactggatgaagtcccttttccagcacgggtcctgaagtcttattccgttgtggaggtgatcgctgggatctccgccgtcctaggcgggatcatcgccctcaacgtagatgattcagtgtctggccctcacctgagcgtgactttcttttggattctggtcgcttgcttcccctccgctatcgcctcacatgtggcggctgagtgcccatctaaatgtttggtggaagtgctcatcgccatatctagcctgaccagcccacttctcttcaccgcttctggttatctctcgttctctattatgaggattgtcgagatgttcaaggactaccctccggctataaagcctagctacgatgttctgctcctgctgctactgctagtgttgctcctacaagctggcctaaataccggtactgccattcagtgtgttcgatttaaagtgagcgccagactgcagggcgcctcctgggatacccaaaacggccctcaggaaaggctggccggcgaagtagcccgctcaccactgaaagagtttgacaaggaaaaggcctggcgcgctgtagtggtgcaaatggcacaatag

SEQ ID NO: 194577 - DNA, 1134 bp, synthetic construct
  misc_feature 1..1134: note = Description of Artificial Sequence: Synthetic coding sequence
  source 1..1134: mol_type = other DNA
atgacccaggagcccttccgggaggagctggcctacgaccggatgccaaccctggagcgcggtcggcaggatcccgcgtcctacgccccagacgcaaaacccagcgacctgcagctgtctaaacgactgcccccttgtttttcccataagacatgggtgttctcggttctcatggggtcatgcctcttggtgacttccggcttctctctgtacctcgggaatgtctttcctgccgagatggactatctgcgctgtgcagctgggtcttgcatcccatcagccatcgtgtcctttacggtctccagacgcaacgctaatgtgatacccaactttcagattctattcgtgtcgaccttcgcggtaacgacaacctgcctgatttggtttggctgtaagcttgtccttaatccttccgctatcaacattaattttaacctcattctcctcctgcttttggagctgctgatggctgcaactgtgattattgctgcgcgctcaagtgaggaggactgtaaaaaaaaaaagggctcaatgtctgacagcgccaacattttggatgaggtgcctttcccggctagggtgcttaaatcctactccgtcgtcgaagtgatcgcggggatctcggccgtactcggagggattatagctctgaatgtagacgactctgtctctggacctcacctcagcgtgaccttcttctggatcctggtagcctgtttcccctccgccatagcctctcacgtcgcagctgagtgtccctctaagtgcttggtagaggttctgatcgccatatctagcctgacttctccacttctgttcaccgcctccgggtacctctcattttctattatgagaattgtcgaaatgtttaaggattacccacccgccataaagccttcatatgacgtcctcctccttctcttactcctggtgctcctccttcaggccggcctgaacaccggaactgctattcaatgcgttaggtttaaggtgtcagctaggctgcagggggctagctgggatactcagaacgggccgcaggaaagactcgctggcgaggtggcacggagcccgctgaaggaattcgataaagagaaggcatggagagccgtggtagttcagatggcccagtag

SEQ ID NO: 194578 - DNA, 1044 bp, synthetic construct
  misc_feature 1..1044: note = Description of Artificial Sequence: Synthetic coding sequence
  source 1..1044: mol_type = other DNA
atgacccaggagcccttccgggaggagctggcctacgaccggatgcctaccctagaacgcggcagacaggatcctgccagctatgccccagacgccaaaccgagtgacctgcaactatctaagaggctgcccccctgtttctcccacaagacatgggtattcagtgtgctcatgggctgcattcccagcgcaattgtgagttttaccgtgtccaggagaaatgccaacgtcatccccaatttccagattctgttcgtatctacttttgccgtgacaaccacctgtctgatatggttcggatgcaagctggttctcaacccctccgcaatcaatataaatttcaatctcattttactattgctgctggagctgctcatggccgctaccgtgattatcgctgccagatcctccgaggaagactgtaaaaaaaagaaaggctctatgtcagatagtgcaaatattcttgatgaggtgcctttccctgcaagggtgctcaaatcctacagcgtcgtggaggttatcgccgggattagcgccgtactgggcggaatcatcgctcttaatgtagacgactctgtctcaggtccacacctgtctgtaacctttttctggattctggtcgcatgcttcccaagcgcaattgcctcacacgtagccgctgagtgccctagcaaatgcttggtcgaggtcctcattgctatctcttcactgacttcgccactcctcttcactgcttcaggatacttaagttttagcattatgcggatcgtcgagatgtttaaggattacccacccgcgatcaaaccttcatacgacgtgttacttctgttattattgctggtgctgctgctgcaggcaggactgaacacaggcaccgccatccaatgtgtgagatttaaagtgagtgctcggttgcaaggggcgagctgggacactcagaacgggccccaggaacggctggcaggcgaagtagcccgatcaccgctcaaagagttcgataaagagaaagcatggcgtgccgtagttgtgcagatggcccagtag

SEQ ID NO: 194579 - DNA, 672 bp, synthetic construct
  misc_feature 1..672: note = Description of Artificial Sequence: Synthetic coding sequence
  source 1..672: mol_type = other DNA
atgacccaggagcccttccgggaggagctggcctacgaccggatgccaactcttgaacgaggaagacaggatcctgccagctacgcccccgatgccaaaccaagtgatcttcagctgtccaagagattaccaccatgcttttcacacaagacctgggtcttcagtgtgttaatgggttgcatccctagtgcaatagtgagctttaccgtatccaggcgcaacgccaacgtaatcccaaatttccagattctgtttgtgtctaccttcgcggtcacaaccacctgtctaatttggttcggctgcaagcttgtactgaatcctagcgcgattaatatcaattttaacctcatcttgttgcttcttctcgagctgctgatggcagcgactgtgattatcgccgcgcgtagtagcgaggaggactgtaaaaagaaaaaggggtccatgagtgatagcgccaacattctggacgaggtcccgttcccagctagggtattaaaaagttacagcgttgttgaagtgattgctggtattagcgcagtgttgggcgggatcatcgcgctgaacgtcgatgattccgtcagtgggccccacctgtctgttacctttttttggattctggtggcatgcttcccatcggcaattgcttctcacgtcgccgctgaatgtccgtag

SEQ ID NO: 194580 - DNA, 978 bp, synthetic construct
  misc_feature 1..978: note = Description of Artificial Sequence: Synthetic coding sequence
  source 1..978: mol_type = other DNA
atgacccaggagcccttccgggaggagctggcctacgaccggatgcctactctagaacgggggcggcaggatccagcaagttacgctcctgacgccaagccgtccgatctgcaactgtctaaacggctccctccctgcttcagtcacaaaacgtgggtgtttagcgtcttgatgggcagctgtttattagttacaagcggtttctctctgtacctgggaaatgtttttccagccgaaatggactacctgagatgcgcagccgggtccattaatttcaatctgattctgctgctcttgttggagcttctgatggctgctaccgtgataatagcggcacggagttccgaagaggactgtaagaagaaaaaaggttcaatgtccgacagtgcaaacattttagacgaggtgccctttcctgcccgcgtcctcaaatcctatagcgtcgtagaagtgattgccggcatctcggccgtgttaggaggtattatcgctctaaacgtcgatgatagtgtgagcggcccgcacctctcagtgactttcttctggatcctggtggcctgtttccctagtgccatcgcgtctcacgtagccgccgagtgcccaagcaaatgtctggtggaggttttaatcgccatttcaagcttaacatcaccattgcttttcacagctagcggatatcttagtttttctatcatgcgtattgtcgaaatgtttaaagactaccccccagcgattaagcccagctatgatgtgctacttctgttactgttgctagtcctgctgctgcaggctggactgaacactggcactgccatccaatgtgtgcgctttaaggtcagcgctagattacagggcgcctcctgggatacacagaacggaccccaggaacggttggccggagaggttgctagatctccgttgaaggaatttgacaaggagaaagcatggcgtgcagtggtggtgcagatggcacagtag

SEQ ID NO: 194581 - DNA, 897 bp, synthetic construct
  misc_feature 1..897: note = Description of Artificial Sequence: Synthetic coding sequence
  source 1..897: mol_type = other DNA
atggactacctgcggtgcgccgccggcagctgcatccccagcgccatcgtatcctttaccgtctcccggcggaacgctaacgtgattccgaacttccagattctttttgtaagtacattcgcggtcactaccacatgcctgatctggtttggctgtaagttggtcctaaaccccagcgccattaacattaacttcaacctaatacttcttttactccttgagttgttgatggctgctacagtaatcatagccgcacggtcttcggaggaagactgtaaaaagaaaaaagggagtatgtcagacagcgctaatattctggacgaggtgcccttccctgctcgggtgctgaagtcatactccgtggtggaggtcatcgcgggaatctcagcagtgctgggcgggattattgcattaaatgtagatgatagcgtctcaggaccccacctatcagtgacctttttttggatacttgtggcctgcttcccctccgccatcgcatctcacgttgccgcagagtgcccaagcaagtgtctcgtggaagtgcttatcgccatcagctctttgacctccccactactgtttaccgctagcggctatctgtcattttcaatcatgagaatcgttgagatgtttaaagactatccacccgcgatcaagcctagttatgatgtgctcttactgctgctcctgctcgtgttgctactgcaggctgggttaaacacgggtaccgctatccaatgtgtcagatttaaggtctctgccagattacagggtgccagttgggatacccagaacggaccccaggaacgccttgccggcgaagtcgccaggtcacctctcaaagagtttgataaagaaaaggcatggcgggctgttgtcgtgcaaatggcacaatag

SEQ ID NO: 194582 - DNA, 1032 bp, synthetic construct
  misc_feature 1..1032: note = Description of Artificial Sequence: Synthetic coding sequence
  source 1..1032: mol_type = other DNA
atgacccaggagcccttccgggaggagctggcctacgaccggatgccgaccttagagcggggcaggcaagatcctgcctcatatgcacctgacgcgaaaccctcggacctgcagttgtccaaacggcttccaccatgcttctctcataagacatgggtattttccgtgctgatgggcagctgtctcttagtaacgtctgggttctccctttacctggggaatgtattccctgccgagatggattatctacgctgcgcagcaggttcctgtataccaagcgcgatagtgtccttcaccgtttcccggcgcaatgccaacgtgatcaacttcaatcttattctattgctgttacttgagttgctgatggcagctacagtcatcatagctgctcggagctccgaagaggactgtaaaaaaaagaaaggcagcatgtctgattctgcaaacatcctcgacgaggtgccgtttcctgctcgtgttcttaagtcttactccgtagtcgaagtgattgccgggatcagtgccgtgcttggcggaattatcgcccttaatgtggatgattccgtgagcgggccacacctcagcgtgaccttcttctggatcctcgtggcatgtttcccctcggcaatcgcctcccacgttgctgctgaatgcccctcaaagtgcctcgtcgaagttctaatcgcaatcagctcgctcacatccccgctcctgtttaccgcatctggatatctgagcttcagcattatgcgcatcgtcgaaatgttcaaggattatccacctgccattaagccctcctatgatgtactgttactgctgttactactggtcctgttgctccaggcaggcctcaatacgggcactgcaatccaatgcgtccgctttaaagtcagcgcccgtctgcagggagcatcctgggatacacaaaacggaccgcaagagaggctagccggagaggttgctcgcagccccctgaaggaatttgataaggagaaagcgtggagggcagtcgtggtacagatggcccagtag

SEQ ID NO: 194583 - DNA, 267 bp, synthetic construct
  misc_feature 1..267: note = Description of Artificial Sequence: Synthetic coding sequence
  source 1..267: mol_type = other DNA
atggccagcagcgacgtgaagcccaagagcgtgagccacgccaagaagtggtcggaggagatcgagaacctgtacaggtttcagcaggcaggatatagagatgagactgagtaccggcaggtgaagcaggtgtccatggttgatcgctggcctgagaccgggtacgttaagaagctccaaaggcgagacaataccttctactactacaacaaacaaagagaatgcgacgataaggaagttcacaaggttaaaatttacgcatattag

SEQ ID NO: 194584 - DNA, 267 bp, synthetic construct
  misc_feature 1..267: note = Description of Artificial Sequence: Synthetic coding sequence
  source 1..267: mol_type = other DNA
atggccagcagcgacgtgaagcccaagagcgtgagccacgccaagaaatggtcagaggaaatcgaaaatctctacaggtttcagcaggcgggctatagggatgagacagaatacagacaagttaagcaagtttcaatggtggacaggtggccagagaccggttatgtgaaaaagctccaacgcagggacaatacattctactattacaacaaacagagagaatgcgacgacaaagaagtgcataaggtcaagatctatgcctactag

SEQ ID NO: 194585 - DNA, 1488 bp, synthetic construct
  misc_feature 1..1488: note = Description of Artificial Sequence: Synthetic coding sequence
  source 1..1488: mol_type = other DNA
atgggcagcaagcggcggaacctgagctgcagcgagcggcaccagaagctggtcgacgagaactactgcaaaaagctccacgtgcaggcccttaagaatgtgaatagtcagattcgcaaccagatggtccaaaatgaaaatgacaatcgtgtccaacgtaaacagttcctcagactgctgcagaacgagcagttcgagctagatatggaagaggcaatccagaaagctgaagaaaataaacggctgaaggaactacagctgaagcaggaggaaaagctggcgatggagttggcaaagctgaagcatgagtctcttaaggatgagaagatgaggcaacaggtgagagagaattccatcgagcttcgcgagctggaaaaaaaactcaaagccgcctatatgaacaaggagagagccgcccaaattgccgaaaaagacgctattaagtatgagcagatgaagagagacgccgagattgccaagacaatgatggaggagcataagcgtatcattaaggaggaaaacgccgccgaggacaaacggaacaaagctaaggcacagtattatctggacctggagaagcaactggaggaacaggagaagaagaagcaggaggcctacgaacaactgctgaaggaaaaactgatgattgatgaaatagtgagaaagatctacgaagaggatcagcttgaaaaacagcagaagcttgaaaagatgaacgctatgcgacgatatatcgaggagttccagaaagaacaagccctctggcgtaaaaaaaaacgagaggagatggaggaggagaacagaaagatcatcgagtttgccaatatgcaacagcagagggaggaggatagaatggccaaagtccaagagaatgaagagaaaagattgcaactgcagaacgctctcacccagaagttagaggagatgcttcgacaaagagaagatctcgaacaagtgaggcaggaactataccaggaggaacaagccgagatttataagtctaaactgaaggaggaagcagaaaaaaaattaaggaaacagaaggagatgaagcaggatttcgaggagcagatggcactcaaggaacttgtgctacaggcggcaaaggaagaggaagaaaactttcgtaaaaccatgttagccaagttcgccgaagacgataggatcgaactcatgaacgcgcagaaacagcgtatgaaacagctggaacaccgtagagccgtagagaagctgatcgaggagcggcgccaacagtttctggctgataagcagcgcgagcttgaagagtggcagctccagcagcgacggcagggcttcatcaatgctataattgaggaagagaggcttaaactcctcaaagaacacgccacgaatctcctgggatacctgcctaagggtgtatttaaaaaagaggacgatattgacttgctgggggaggaattcaggaaggtctaccagcagcgcagtgagatctgcgaggagaagtag

SEQ ID NO: 194586 - DNA, 1173 bp, synthetic construct
  misc_feature 1..1173: note = Description of Artificial Sequence: Synthetic coding sequence
  source 1..1173: mol_type = other DNA
atggcccagcggtacgacgacctgccccactacggcggcatggacggagtaggaattccatcaacaatgtatggcgacccgcacgctgctcgctccatgcagccggtgcatcacctgaaccatggacccccattgcatagccatcagtatccacacaccgcccacaccaatgccatggctccgtctatgggctcgtcagtcaatgacgctctgaagagggataaagatgccatatacggccatccactctttcccctgctggccttaatcttcgagaaatgcgagctggcgacttgtaccccgcgggagcctggagtggcaggaggagacgtgtgcagctcggagtcatttaatgaggatattgccgtgtttgccaagcagatccgggcggaaaaacccctgttttcttcaaatcctgagcttgacaacctaatgatccaggctatccaggtgctcagattccatctcctggaactcgagaaggtgcacgagctgtgtgacaatttttgtcataggtacatcagttgtctcaagggcaagatgcccatcgacttagtgatcgacgaccgggaaggagggagtaagtccgactccgaagacatcacccgatcggccaatctgactgaccaacccagttggaaccgtgaccatgacgatactgcctctacaagatccgggggaacacctgggccttcctccggcggccataccagtcacagtggcgataacagcagcgagcagggggacggccttgacaacagtgttgctagcccgtctaccggtgacgatgacgatcctgacaaggacaagaaacgccataagaaaagaggcattttccccaaggttgccacaaatatcatgcgggcttggctattccagcacctgactcatccatatcctagcgaggagcagaaaaaacagctggcccaggatacaggactaactattctgcaggtgaataattggttcataaatgccaggaggagaatcgtgcagcccatgatagaccagagtaatcgtgctgtgtcgcagggcaccccttacaaccctgatggccaaccaatgggcgggttcgtcatggatggtcagcagcatatggggatcagagcaccaggacctatgtcaggtatgggcatgaacatggggatggagggccagtggcattatatgtag

SEQ ID NO: 194587 - DNA, 1392 bp, synthetic construct
  misc_feature 1..1392: note = Description of Artificial Sequence: Synthetic coding sequence
  source 1..1392: mol_type = other DNA
atgcagtacgacgacctgccccactacggcggcatggacggcgtgggcatccctagtaccatgtacggggatccacacgccgctagatctatgcagcctgtgcatcacttaaaccacggtccccccctgcacagtcatcagtatcctcacactgcccacaccaatgccatggcgccgagtatgggaagttcagtcaacgatgcacttaagcgggataaggatgcgatctatgggcatcccctgtttcccctgttggcgctaatcttcgagaagtgcgaactcgccacatgtactccccgggagcctggggtggctggtggtgacgtatgctcctcagaatcattcaatgaggatattgccgtgtttgctaagcagattcgcgctgaaaaacctctgttctcttctaatcccgaacttgataatcttatgattcaggcaatccaggtactgagatttcatctcctggagctggaaaaagtgcacgagctgtgcgacaatttttgtcatcgttatatctcatgtcttaaggggaagatgcccatagacctggttatcgacgacagggaaggcggctcaaagagcgacagcgaggatattaccagatccgccaatctgaccgaccagccctcctggaatagggatcacgacgataccgcttcaactcgatcagggggaactcccggccctagctctggcggccatacatctcactcgggggataacagctctgaacaaggagacggtctggacaactcagtcgccagtccgagcacaggagatgatgatgatccagacaaggacaaaaagagacacaaaaagcgggggatattccctaaagtggccacaaatattatgagagcttggctttttcagcacctgactcacccctatccctcagaagagcagaaaaagcaactggctcaggacacagggttaaccattctacaggtcaataattggttcatcaatgcacggcggcgcatcgtacagcccatgatcgaccagtctaatagggcagtgagccagggaactccatacaaccctgacggccaaccaatgggcggctttgtgatggatgggcagcaacacatgggcatccgagcgcccggcctccaatccatgcccggcgagtatgtagcccgcggggggcccatgggagttagcatgggccagccctcttacacacaacctcaaatgcctccccacccggcccagcttcgacacggaccacccatgcacacttatatccctggacaccctcatcacccgacagtgatgatgcatggcggacccccacacccgggcatgcctatgtccgcgagctccccaactgttctgaacactggcgatcctacaatgagcggacaggtgatggatatccacgcccagtag

SEQ ID NO: 194588 - DNA, 762 bp, synthetic construct
  misc_feature 1..762: note = Description of Artificial Sequence: Synthetic coding sequence
  source 1..762: mol_type = other DNA
atgatccaggccatccaggtgctgcggttccacctgctggagctggaaaaggtgcacgagctgtgcgacaacttttgtcacagatacatatcgtgccttaaaggaaaaatgcccatcgatttagtcatcgacgacagggaaggggggagtaagtccgattctgaggacattaccaggtcggcaaacctgaccgatcagccaagctggaatcgcgatcatgacgacacggcctcaacccgttctggcggcaccccaggaccctccagcggcggacacacaagccactcaggagataactcaagcgagcagggggacggactcgataatagcgtggcctccccgagcactggcgatgatgatgatcccgataaggacaagaagaggcataagaagagaggcatcttcccgaaggtggcaacaaatatcatgcgcgcctggttgttccaacacctgactcacccctatccttctgaggaacagaaaaagcagctggcccaagatactggtctaacaatactgcaggtgaataactggttcataaatgccagaagacgcattgtgcagccgatgattgatcagtcaaatcgggctgtctcacaggggacaccctataatcccgatggccagccgatgggggggtttgtgatggatggccagcagcacatgggcatcagagctccaggccccatgtctggaatgggcatgaatatgggccctccttgcatccggacattcctcgacacgctgactacccagcagtag

SEQ ID NO: 194589 - DNA, 1398 bp, synthetic construct
  misc_feature 1..1398: note = Description of Artificial Sequence: Synthetic coding sequence
  source 1..1398: mol_type = other DNA
atggcccagcggtacgacgacctgccccactacggcggcatggacggcgtggggattccatctacaatgtacggcgaccctcatgcagccaggtctatgcagccagttcaccatcttaatcacggcccaccactgcattctcaccaataccctcataccgcccataccaatgccatggctccaagcatgggctccagcgttaacgatgccctgaaacgggacaaggacgctatctatggccaccccctgttccctctgctcgcactgattttcgagaaatgcgaattggctacttgcacacctagggagccaggggtcgctgggggtgacgtctgttcttctgagagctttaatgaagacatcgccgtgtttgcgaaacagatccgagctgaaaaacctttgttttcctccaatccggaacttgataatcttatgatccaggctatacaggtcctgcgttttcacctattggaactcgagaaggtacatgagctttgtgataatttttgccacaggtacattagttgcctgaagggaaaaatgcccattgatctggtgatcgacgacagagaaggtggttccaaatcggatagtgaggatatcacccggtccgccaacctaaccgatcagcctagctggaatagagatcacgacgacaccgcctcaacaagatcaggaggcacacctgggccttcttcagggggccacaccagccacagcggcgataatagctccgagcaaggagatggattggacaattccgtggccagcccttcgaccggcgacgatgatgatcccgacaaagataaaaagcgccacaaaaagcgtgggatttttcctaaagtggccactaacatcatgcgcgcttggctgtttcaacacctgacacatccttatccatccgaagaacagaaaaagcaactagcccaggacaccggcttaaccattctgcaggtgaataattggttcattaacgcccgcagaagaattgtgcagccaatgattgaccaaagcaatcgagcggtcagccaggggacaccatataatccggatggccaacccatgggcggattcgtgatggacggacagcaacacatgggaattcgggcccccggacttcagtccatgcccggggaatatgtggcccgcgggggcccaatgggcgtatctatgggacagccgtcttacacccaaccacaaatgcctccacatcccgcacaactaagacatggccctcccatgcatacctacatccccggccatcctcaccaccctaccgtgatgatgcacggcgggcctccacaccctggaatgccaatgtctgcatccagccccacggttctcaatactggcgaccccacgatgtcaggacaggtgatggacatacacgctcagtag

SEQ ID NO: 194590 - DNA, 423 bp, synthetic construct
  misc_feature 1..423: note = Description of Artificial Sequence: Synthetic coding sequence
  source 1..423: mol_type = other DNA
atgaagaagaacggcgacgagaagagccccctgggcaccgagatcatgatgacaagacatctgttggtgcaggaggagccccaagctttgcctgctgtggccactaggcacacggttgggaccactgccgtttcaaaacacccttatccttccgaggaacaaaagaagcaactggctcaggacactggactaacgatactgcaagtcaacaactggtttattaacgcaaggaggagaattgtgcagcctatgatagatcagtctaacagggctgttagccaaggtacgccttataatccggacggacagccaatggggggcttcgtgatggatgggcagcagcacatgggaattagagcgcccggaccaatgagtggtatgggcatgaacatgggtatggagggccagtggcattacatgtag

SEQ ID NO: 194591 - DNA, 663 bp, synthetic construct
  misc_feature 1..663: note = Description of Artificial Sequence: Synthetic coding sequence
  source 1..663: mol_type = other DNA
atgcagcccgtgcaccacctgaaccacggcccccccctgcacagccaccagtacccacatacggctcacacaaatgccatggcccctagcatgggtagttcagttaatgatgcactcaagcgcgacaaagacgctatctatggacatcctctgttccccctgttggcattgatcttcgaaaaatgcgagctggcgacatgtaccccgcgtgagccaggagtggcgggcggcgacgtttgtagtagtgagtcctttaacgaggatatcgccgtttttgcaaaacagataagagcggagaagcccttgttttcttccaaccccgagctcgataatctgatgatccaggccatccaggtgttgaggttccacctcctggaactggagaaggtacatgaattatgcgataatttttgtcataggtatatttcttgtcttaaggggaaaatgcccattgatctggtgatcgatgatagagagggcggaagtaaaagcgattccgaggacatcacacgcagcgccaacttgaccgatcaaccttcttggaaccgcgatcatgatgatacagcttccacccggtctggcggaacacctggcccttctagcggagggcacaccagccattccggagataattctagtgagcaggcacctctaccgttctag

SEQ ID NO: 194592 - DNA, 540 bp, synthetic construct
  misc_feature 1..540: note = Description of Artificial Sequence: Synthetic coding sequence
  source 1..540: mol_type = other DNA
atgaagagcctgctgaccttctacaagtgcggcagcgagctgctgccagctgcagtgtggtccgcaggggggagtccctccctgttcagtgacctgaagagtaagaagggcaagaaattcagccgggatcacatagaggttacaatttccaactgtggcgtaaacggaaacgcgaaaggagacggcctggacaacagcgtagcgtcgccatcgacaggcgacgatgacgatcccgataaagacaaaaagcgtcacaaaaagaggggcatattcccaaaggttgccaccaatatcatgagggcatggctcttccagcacctgacacacccctaccccagtgaagagcagaagaaacagctagctcaggatacgggactgaccatcctgcaggttaacaactggttcatcaatgcccgccgtcggattgtccagccaatgatcgatcagagcaatcgcgcagtgtcccaggggacaccatataaccccgacggacaacccatgggcggattcgtcatggacggccagcagcatatgggctag

SEQ ID NO: 194593 - DNA, 978 bp, synthetic construct
  misc_feature 1..978: note = Description of Artificial Sequence: Synthetic coding sequence
  source 1..978: mol_type = other DNA
atggcccagggcctgcggctgcagggcagccggcggaagggccggcaccctctgtttccgctcctcgctctgattttcgaaaaatgcgagctagcaacctgtaccccaagggagccgggtgtggcagggggagacgtgtgctcctccgaatccttcaacgaggacattgcagtatttgccaaacagatcagagctgaaaaaccactgttttccagcaaccccgagctcgacaatcttatgatacaggctattcaggtcttgcggtttcatctgctagaactagagaaggttcatgaattatgtgacaacttttgccatcggtacatctcttgcctgaaagggaaaatgcccatagatctcgtgatcgacgatagagagggaggttccaagagcgattcagaggatattaccagatctgctaatctgactgatcagcccagctggaatcgggaccacgacgacacagcatccactcgctcgggaggcacaccaggcccatcgagcggcggacatacaagtcactcaggagacaacagtagcgagcagggagatggccttgacaactcagttgcaagcccttccacaggtgatgacgacgatccagataaagacaaaaagaggcacaagaaaagaggcatcttcccaaaagtggcaaccaacatcatgcgcgcctggttgttccagcatttgacccacccgtacccctccgaggagcagaaaaaacaattagctcaggataccggcctgaccatcttgcaggtgaataactggtttatcaacgcccgacgacgtattgttcagcccatgatcgaccagtctaaccgggcagtttcgcaggggaccccatacaacccggatggccagcccatgggtggatttgttatggacggccagcagcacatgggcataagagcgcctgggcccatgagtgggatggggatgaatatgggaatggagggtcaatggcactacatgtag

SEQ ID NO: 194594 - DNA, 1113 bp, synthetic construct
  misc_feature 1..1113: note = Description of Artificial Sequence: Synthetic coding sequence
  source 1..1113: mol_type = other DNA
atggcccagcggtacgacgacctgccccactacggcggcatggacggtgtgggcatccctagcacaatgtacggggatccacatgctgctcgctccatgcagcctgtacaccacctgaaccacggcccccccttgcactcacatcagtacccccacacggcccacactaacgccatggctccgagtatgggctcgtcagtgaatgatgcccttaagcgcgataaagatgccatctacggtcacccacttttcccattactggcgctgatttttgagaaatgcgagttggccacctgcaccccacgggaacccggcgtggctgggggtgacgtttgctcatccgagtcctttaatgaagacattgcagtgtttgccaaacagatcagggccgaaaagcctctcttctcaagcaaccccgagttagataacctgatgattcaggccattcaggttttaagatttcacctgctggaactggagaaagtacacgaactgtgcgacaatttctgccacagatatatttcatgtctgaaaggcaagatgcccatcgatcttgtgatcgatgatcgtgagggaggaagcaagagcgattcagaagatataacaaggagcgctaatctcaccgaccaaccatcatggaatagagaccacgacgatactgcttctacccgatctggcggcactcccgggccgtcctctggcggtcacacatcccatagcggcgacaatagtagtgaacagggcgacggcctggacaactcggtcgcctcaccttcaacaggggatgatgacgatcccgacaaggacaagaagaggcacaagaagagaggcatctttcccaaagtcgctacaaatatcatgcgtgcctggctatttcagcaccttacacatccctacccatcagaagaacagaagaagcagctggcacaggacactggacttactatattacaggtgaataattggtttatcaacgcaagacggcgcatagtgcagcccatgatcgaccagtctaatcgggccggtaaaagccctattgtaactgtgttcaaatccaggaagcggaagcctagttcatcccattcacctggcgggcccctgcctggaaagtag

SEQ ID NO: 194595 - DNA, 2259 bp, synthetic construct
  misc_feature 1..2259: note = Description of Artificial Sequence: Synthetic coding sequence
  source 1..2259: mol_type = other DNA
accaccgccatggcccaccggaagctggagagcgtgggcagcggcatgctcgaccatagagtccgcccgggccctgtgccgcattctcaagaaccagaaagcgaggatatggaactccccttagaaggctacgttcccgaggggctggagctggccgcactccggccagagtcgccggccccggaggaacaggagtgccacaaccacagtccggacggtgactcttcgtccgactatgtgaataacaccagcgaggaggaggattatgatgagggacttcctgaagaggaggagggcatcacatactacataagatactgtccagaggacgacagctatctagagggaatggattgtaatggtgaggagtatctcgctcattcagcccatcctgtcgatactgacgaatgccaagaggcagtcgaggaatggaccgatagcgctgggccgcaccctcacggccacgaggccgagggctcccaggattacccagatggccagctcccgataccggaggatgaaccctccgtgctcgaggcgcatgaccaggaggaggacggtcactattgtgctagcaaggagggataccaggactactatcccgaggaagccaatggtaacaccggcgcttccccttatcgcctgcgccgaggtgacggcgatctagaagatcaggaggaggacatagatcaaatagtcgctgagattaaaatgagtctttccatgaccagcatcacatctgcaagcgaagcttctcctgaacatggaccagaaccaggcccagaagatagcgtggaagcttgtcctcctattaaggcatcctgctctccttcaagacatgaggcacgaccaaagtcactcaacttgctgcccgaggcaaaacaccccggcgacccacagagaggctttaaacctaagacacggaccccagaagagcgattgaagtggcctcacgagcaagtctgcaatggcctggaacagccccgaaagcagcagagatcagacttaaatggccccgtggataataataatatccctgagacaaaaaaagtcgcgtccttcccaagttttgtagcagtgccaggaccctgtgagccggaagatctgattgacggtatcatttttgctgccaactacctcggatccactcagcttctcagcgagaggaaccctagcaagaacataaggatgatgcaggcacaggaggccgtgtcacgagtaaagagaatgcagaaagcggccaagatcaaaaaaaaagctaattcagaaggagacgcacagaccctcaccgaagtcgatctgttcatcagcacacagagaatcaaagtgctaaatgctgacacgcaggaaacgatgatggaccatgccctgaggacaatttcctacatagctgatattggcaatattgtcgtgctgatggctagacggagaatgcctcgaagcgcctcacaagattgcatcgaaaccactccgggagcccaggagggcaagaaacagtacaaaatgatctgtcatgtgtttgagagcgaggacgcccagcttattgctcagagcattgggcaggcatttagtgtggcgtaccaagagtttctcagggcgaacggtatcaaccctgaggatctgagtcaaaaagagtattctgacattattaatactcaagaaatgtataatgacgacctcatacatttctcaaactcggagaactgcaaagaactgcagctggaaaagcacaagggcgagatcctgggcgtcgtggtcgtcgagtcaggatggggcagcatactgcctaccgtcatcctggccaatatgatgaacggagggcccgcagcccggtctggaaaactcagcatcggtgatcagattatgagtatcaacggcacctctttggtgggtttgccgctagctacatgccagggaattatcaaggggctgaaaaaccagacccaggtcaagctgaacatcgtttcttgtccgcccgtcactactgtgcttatcaaaagaccagacctcaagtaccagctggggttctccgtgcagaacgggattatctgtagccttatgcggggaggaatcgcagaacgggggggagttcgtgtgggacaccggattattgaaatcaacggacaatcagtagtggcaactgctcacgagaagatcgtccaggcactatctaattcggtgggcgaaattcatatgaagactatgcccgccgcaatgttcaggctattgaccgggcaggaaacacccttgtacatttag

SEQ ID NO: 194596 - DNA, 1413 bp, synthetic construct
  misc_feature 1..1413: note = Description of Artificial Sequence: Synthetic coding sequence
  source 1..1413: mol_type = other DNA
atggcccagcggtacgacgagctgccccactacggcggcatggacggcgtcggcgtgccagcgagcatgtatggggacccccacgccccccgcccgattccgcctgtccatcatctgaaccacggtcccccacttcacgccactcagcactacggcgcccacgcccctcatcctaatgtgatgcccgcctccatgggctcagcagttaatgatgcccttaagagggacaaggatgccatttatggccacccattgttccctctcctggccctggtttttgaaaagtgcgaacttgctacgtgtaccccaagggagccaggggtcgccggcggcgacgtgtgcagcagtgacagttttaacgaagacatcgccgtgtttgcaaaacaggtaagggctgagaagccactcttctcttccaaccccgaacttgacaatctcatgattcaagccatccaagtactcagattccatttactggaactcgaaaaggtccacgaactgtgcgacaatttctgccatagatatataagctgtctcaaaggtaagatgccgattgacctggtgattgatgaacgcgatgggtcttcaaagagtgatcacgaagagctgagtgggtcaagcacgaacctcgccgaccacaatccttcaagctggcgtgaccacgatgacgctacctccacccactcagcgggtaccccgggtccatcctctggaggccatgccagccagagtggggataattcctccgaacagggtgatggcctggataactcagtcgcatcaccggggacaggcgacgacgacgaccccgataaggacaagaagaggcaaaagaaacgggggatctttcctaaagtcgccactaatattatgcgcgcatggctctttcagcatctgacccacccttacccgtcagaggagcagaaaaagcagctggcccaagacaccggtctgaccattctgcaggtaaataattggttcatcaatgcccggaggcggatcgtgcagcctatgatcgatcaatccaaccgagccgtgtcacagggggccgcatattcccccgaggggcagcctatgggctcattcgtgctcgatgggcaacagcatatgggtatacggccagctggccttcaatctatgcctggggactatgtgtcacagggcggtcctatgggtatgtccatggcccagcctagctacaccccacctcaaatgaccccgcatccaacccagctgaggcacggccctcctatgcattcctacctgccttcacacccacaccatccggccatgatgatgcatggcggaccacccactcatcccggcatgacaatgagcgcccagtccccaactatgctgaactcggtcgacccgaacgtgggaggccaggtgatggacatccatgctcagtag

SEQ ID NO: 194597 - DNA, 1146 bp, synthetic construct
  misc_feature 1..1146: note = Description of Artificial Sequence: Synthetic coding sequence
  source 1..1146: mol_type = other DNA
atggacggcgtgggcgtgcccgccagcatgtacggcgacccccacgcccctcgacccatcccacctgtgcaccacctcaatcatggacctccactgcatgccacccaacactatggagctcacgccccccacccaaatgtcatgccggcatcaatggggtccgcagtcaatgatgctctcaaaagggacaaggatgctatctatggccaccccctgtttcccctcttagccttggtgtttgaaaagtgcgagttagccacgtgcacaccccgggaacctggcgttgccggaggagatgtatgcagttccgacagttttaacgaggacatagcggtgttcgccaaacaggtacgcgctgagaaaccactcttctcctcgaaccccgagcttgataatctcatgatccaagcgatccaagttcttaggtttcatctgctggagttagaaaaggtccacgaactctgcgataacttctgccatcgttacatcagctgcctcaagggtaaaatgccgattgaccttgttatcgacgagcgagacggcagcagcaagtctgatcatgaagaactgtccggatcctcaaccaacctggccgaccacaatccttcctcctggcgagatcatgatgacgcaaccagtacacactcagcaggaactcccggaccctcatcaggaggccacgccagccaaagcggagataacagtagtgagcagggagatggcctggataatagtgtggcctcccctggtacaggtgatgacgacgaccctgacaaggacaaaaagcgccaaaagaaacggggtatctttccaaaggtggcaacgaacatcatgcgggcctggttattccaacatctgacacatccatatccctctgaagagcagaagaaacaactcgcgcaggacaccggtctgaccattctccaggttaacaattggttcatcaatgccaggagaaggatcgtgcaacctatgatcgaccagtccaatcgcgccgtttcacagggagcggcttattccccagaaggccagcctatggggtccttcgtgttggatgggcaacagcacatgggtatccgcccagccggccccatgtccggaatgggtatgaatatgggtatggacggacagtggcactacatgtag

SEQ ID NO: 194598 - DNA, 1413 bp, synthetic construct
  misc_feature 1..1413: note = Description of Artificial Sequence: Synthetic coding sequence
  source 1..1413: mol_type = other DNA
atggcccagcggtacgacgagctgccccactacggcggcatggacggcgtaggagtccctgccagcatgtacggagatccacatgcccccaggcccatccctcccgtccaccatttaaaccatgggcctccgctccacgcgacacagcattacggcgcccacgctccccatcctaacgtgatgcctgcatcgatgggcagcgctgttaatgatgcacttaaacgggacaaagacgctatctatggtcaccccctctttccattactggccctcgtgttcgagaaatgtgagcttgccacatgcacccctcgtgaaccgggcgtcgccggaggcgacgtctgctcctccgacagcttcaatgaggatatcgctgtgtttgctaagcaggtccgcgccgaaaagccactgttctcctcaaatccggaacttgacaacttgatgatacaggctattcaggtgctccggtttcatctacttgaattggaaaaagttcatgagttgtgtgacaatttctgccatagatatatttcgtgtttaaaaggtaaaatgcccatagacttggttatcgacgagcgcgatggatccagtaagagcgatcacgaggagctgagcggatcttcaaccaatctggccgatcacaatcctagtagttggagggaccacgatgacgctactagcacacactcagctggaactccgggtccatcctcaggaggtcatgcgtcacaatccggagataatagttccgaacaaggagatgggctggataactctgtggccagccccgggactggcgacgatgacgatccagataaagataagaagcgtcagaaaaagcggggcatcttccccaaagtggctaccaacatcatgcgcgcctggctgttccagcacttaactcatccctaccccagcgaagagcagaagaagcagctggctcaggacaccggtctcactatcctccaggttaataattggtttattaacgcacgccgccgtatcgtacagccgatgatcgatcagtcaaatagagcagtgagccagggagcagcttactccccagagggtcaacccatgggttcattcgtcctcgatggacagcaacatatgggaatcagaccagccggactgcagagcatgcctggggattatgtaagccagggcggacccatgggcatgagcatggcccagccatcatacacgcccccccagatgacaccccatccaacccagctaaggcacggtccccctatgcactcatatttacctagtcacccgcatcatcctgccatgatgatgcacggcgggccccctactcatcctgggatgaccatgtcagcacagtcgccaaccatgctgaatagcgtcgatcccaatgtcggcggccaagtcatggatatccacgctcagtag

SEQ ID NO: 194599 - DNA, 921 bp, synthetic construct
  misc_feature 1..921: note = Description of Artificial Sequence: Synthetic coding sequence
  source 1..921: mol_type = other DNA
atggccctggtgttcgagaagtgcgagctggccacctgcacccccagggagccaggggtcgccggcggagacgtgtgcagctcggactcattcaatgaagacatcgcagtttttgcaaagcaggtgagggcggaaaaaccgctttttagttccaaccccgagctggataatctcatgattcaggccatccaagtgctcaggttccacttactggaactagaaaaagtgcatgaattatgcgataacttctgtcaccgatacatcagctgcctgaaagggaaaatgcctatcgacctggtgattgatgagagagacggttcgtcaaagagcgaccatgaagagttgtcaggctccagcaccaaccttgctgatcataatccgtcctcctggcgggatcatgacgacgctactagtacccacagcgcaggtacgcccgggccatcttcaggcggacacgcatctcaatccggggataactccagcgaacagggtgatggcctggacaactccgtggcttcacccggaacaggcgacgatgatgatcccgataaagataagaagaggcagaagaagcggggcatcttccctaaagttgcgactaatatcatgcgcgcctggttgttccagcatttaacacacccctatccttccgaagagcaaaagaaacagttggctcaggacaccggtctgaccattctccaggtcaacaattggtttatcaatgcgcgtaggcgaatcgtccagcctatgatcgaccagagtaatagagccgttagccaaggcgctgcttattcgccagaagggcagcctatgggatctttcgtgttggacggacagcaacatatgggtattaggcccgcaggccctatgtccggcatgggtatgaatatgggcatggacgggcaatggcactatatgtag

SEQ ID NO: 194600 - DNA, 921 bp, synthetic construct
  misc_feature 1..921: note = Description of Artificial Sequence: Synthetic coding sequence
  source 1..921: mol_type = other DNA
atggccctggtgttcgagaagtgcgagctggccacctgcaccccccgggaaccaggcgtggccggaggcgacgtctgttctagtgactcttttaatgaggatattgcagtttttgccaaacaggttcgtgctgagaagcctcttttcagttctaaccctgaattagataatttgatgatccaggctatacaggtgctgagattccacttgttagaacttgagaaagtgcatgaactctgtgacaacttctgccatcggtacatctcgtgcctgaaaggtaaaatgccaatagatctggttatagacgaaagagatgggtctagcaaatctgatcacgaggaattaagcggaagttctacaaatctcgcggaccacaatcccagctcttggcgcgatcacgatgacgccacaagcacccattccgctggcacccccggccctagctccggagggcacgcctcccaatccggagacaatagctccgagcagggcgacggcctagacaatagcgtcgcctccccgggaacaggcgatgacgatgaccccgataaagataagaagcgacagaaaaagcgtgggatttttcctaaagtcgctacaaatatcatgcgggcatggctgtttcagcacctgactcatccctatccctccgaagaacagaagaagcagctagctcaagacactggtctgaccatacttcaggtgaataactggttcatcaacgctagaagacggattgtgcagccaatgattgaccagagcaaccgagccgtatcccagggggccgcctacagcccagaaggacagcccatgggtagttttgttctcgacggccagcagcatatggggattcgtcccgccggccctatgtccgggatgggcatgaatatgggaatggacggtcaatggcactatatgtag

SEQ ID NO: 194601 - DNA, 1206 bp, synthetic construct
  misc_feature 1..1206: note = Description of Artificial Sequence: Synthetic coding sequence
  source 1..1206: mol_type = other DNA
atggcccagcggtacgacgagctgccccactacggcggcatggacggagttggcgtacctgcctcaatgtatggcgatccccatgcaccccggccaattcctcctgtacaccacctgaatcatggccccccactccatgcgactcagcactatggtgctcacgcaccacatcccaacgttatgccagcctctatgggatcagctgtgaacgacgcccttaaaagagataaggatgctatctatggccaccctctcttcccactgctggctctcgtgttcgagaagtgtgaattggctacatgcaccccccgagaacctggagtagcaggaggagatgtctgctcttctgactcatttaatgaagacatcgcggtattcgctaaacaagttcgggcagagaagccattgttctcttcaaaccccgagcttgacaatctgatgatacaggccatccaggtgctgagatttcatctgctggaattagaaaaagtgcatgagctttgcgacaatttctgtcaccgctacatatcatgtctgaagggcaagatgccaattgatctcgtcatcgacgagcgggatggcagttccaaatctgaccacgaggagctctctggctcgtcgacaaatctggccgatcataatccctcttcatggagagatcacgacgatgccacatcaacccactccgctggtactcctgggccttctagcggcgggcacgcttcgcagtccggtgataactcatctgaacagggtgacggtttagacaattcggtggcgagccctggtacaggtgatgatgatgatcccgacaaggacaagaagcggcagaaaaaacgaggcatttttcccaaggtcgcaacaaacatcatgcgggcctggctgtttcaacacttgacgcatccttaccccagtgaggagcagaagaaacagctggcccaggacactgggctgactatactgcaagtgaacaactggtttatcaatgcaagacgtcgtatcgttcagcccatgattgaccagtctaatagggccgggtttttgctggacccaagcgtgtcccagggcgctgcttatagcccagaaggccagccaatgggaagcttcgtgctggatggacagcagcacatggggatccgacccgcagggccgatgtccggtatgggtatgaacatgggaatggacggacagtggcactacatgtag

SEQ ID NO: 194602 - DNA, 1185 bp, synthetic construct
  misc_feature 1..1185: note = Description of Artificial Sequence: Synthetic coding sequence
  source 1..1185: mol_type = other DNA
atggcccagcggtacgacgagctgccccactacggcggcatggacggagttggggtcccagctagtatgtatggcgatccgcacgcgcctagacctattccccccgtccatcaccttaaccacgggcctccactgcatgcgacccaacactatggcgcccacgccccccatccaaatgtgatgccagctagtatgggaagcgccgtgaacgacgcccttaaaagggacaaagacgcaatctatggccaccccctgtttccgctactggcgctagtgtttgagaaatgtgaattagccacctgtactcccagagagcctggtgtggccggaggcgacgtgtgttccagcgattcctttaacgaggacatcgcagttttcgccaaacaggtgcgagccgagaagccccttttcagttccaaccccgagttagataatctcatgatacaggcaatccaggtactccgttttcacctcctggagttggaaaaggtgcacgaactttgtgacaatttctgtcacaggtacatatcctgtctgaagggtaaaatgcccatagatctggttattgatgagcgtgacggctcatccaaaagtgatcatgaggagctgagtggctcgtccactaacttggctgatcacaatccaagctcttggcgagatcatgacgacgctacatcaacccattctgccggcaccccgggcccgtcaagtggaggccacgcttcccagtctggcgacaattcctcagaacagggtgatggcctagacaatagcgtcgctagtcccgggaccggcgacgacgatgatccggacaaggataagaagagacagaaaaaaagagggattttccccaaagtggcaactaatatcatgcgggcctggctgtttcagcacttgacccatccttacccctcggaggaacaaaaaaagcagctggcccaagacaccgggctcactatactgcaagttaataattggttcatcaatgcacgacgccgcattgtgcagccaatgatcgaccagagcaatcgtgccgtgtcacagggcgctgcctatagccctgaggggcagccaatggggtcattcgttttggatggacagcaacacatggggataaggcctgcaggtcctatgagcggtatgggaatgaatatgggaatggacggccagtggcattacatgtag

SEQ ID NO: 194603 - DNA, 717 bp, synthetic construct
  misc_feature 1..717: note = Description of Artificial Sequence: Synthetic coding sequence
  source 1..717: mol_type = other DNA
atggacggcgtgggcgtgcccgccagcatgtacggcgacccccacgccccgaggccaatacccccagttcatcatctaaaccatggtccaccactgcatgcaactcaacattacggagcacatgcccctcatcctaatgtgatgcctgcctccatgggatccgccgtcaacgatgctctcaaacgtgataaagatgcaatatacggccacccactgtttcctttgctcgccctggtcttcgagaagtgcgaactcgctacttgtaccccacgcgaaccaggggtggcagggggagatgtgtgctcttctgattcctttaatgaagatattgcagtgtttgctaaacaggtgagagcagagaaacccctgttttccagcaaccctgaacttgataatctgatgatccaggccatccaggtcctgaggttccacctacttgaactagagaaggtgcacgaactctgcgataacttttgccatagatacatttcttgcttgaaaggcaagatgcccatagacctagtgatagacgagcgagacggatcctccaaatcagatcatgaggagctgtccggtagctctactaaccttgccgaccacaacccaagcagttggcgggaccacgacgacgcaacgagcacacactctgccggtacccccggaccttccagcggcggccatgctagccagtctggggacaatagcagcgaacagtag

SEQ ID NO: 194604 - DNA, 240 bp, synthetic construct
  misc_feature 1..240: note = Description of Artificial Sequence: Synthetic coding sequence
  source 1..240: mol_type = other DNA
atggccctggtgttcgagaagtgcgagctggccacctgcacccccagagagcccggcgtcgcaggtggcgacgtctgtagttctgatagttttaatgaagacatcgctgtgtttgccaagcaggttagagctgaaaagcctctattcagctccaaccctgagctggacaacttaatgatccaggcgatccaggttctgcgcttccatctcctagaactggaaaaggtgtcacggaagtag

SEQ ID NO: 194605 - DNA, 1167 bp, synthetic construct
  misc_feature 1..1167: note = Description of Artificial Sequence: Synthetic coding sequence
  source 1..1167: mol_type = other DNA
atggacggcgtgggcgtgcccgccagcatgtacggcgacccccacgcaccccgccctatcccccccgttcaccatctgaaccacggacctccccttcatgctactcagcactatggcgcacacgccccccaccccaacgtgatgcctgcgtcgatggggagcgccgtgaatgacgcgctgaaacgcgataaggacgcaatttatggacatccgctgttccctctgttagcactggtgttcgagaagtgcgagctggctacctgtactccccgcgagcctggagtggctgggggcgatgtgtgtagctccgattcatttaatgaggacattgccgtcttcgccaaacaggtgcgtgctgaaaaacccttgttctcttctaacccagaactggacaatctgatgatacaggcaattcaggtactgcggtttcacctgttagagttggagaaggtacacgagctttgtgacaatttctgtcataggtatattagttgtctcaaagggaagatgcctattgaccttgttattgacgagcgggatggcagttccaaatcggaccatgaagaactctccggaagctctacgaatttggccgatcacaatccgagcagttggagagaccacgacgacgctacttcgacccactcagcaggcacacccggaccttcctccggcgggcatgcatcgcagtctggcgacaacagctcagagcagggcgacgggctggacaactcggtcgccagccctggtactggtgatgatgatgaccccgacaaagataagaagaggcagaaaaaaaggggaatcttcccaaaggtggctacaaatattatgagggcctggctgttccagcacctcactcatccctacccttccgaggaacaaaaaaagcaactggctcaggatacaggactcaccatcctgcaggtgaataattggtttattaatgcccggcgaaggatagtgcaaccgatgatagatcagtccaaccgggccgggttcctgctggacccttctgtctcccagggcgccgcatacagcccagagggacaacctatgggatcctttgtgctggacggccaacagcatatgggaattaggccagccggccccatgagcgggatgggcatgaacatgggtatggatggccagtggcattacatgtag

SEQ ID NO: 194606 - DNA, 1185 bp, synthetic construct
  misc_feature 1..1185: note = Description of Artificial Sequence: Synthetic coding sequence
  source 1..1185: mol_type = other DNA
atggcccagcggtacgacgagctgccccactacggcggcatggacggggtgggcgtacctgcatccatgtatggggacccacacgcaccgcgtccgattcctccagtgcaccatctaaaccacggacccccattgcacgcaacacagcactacggcgcccacgcaccacaccccaacgtcatgcccgcctctatgggatcagcagtaaacgatgctctcaaaagagacaaggacgcaatttatggccatcctctgttcccccttctcgctctggtgttcgagaaatgcgaactggctacatgcacgccgcgtgaaccaggagtcgcaggcggtgacgtgtgcagttcagactccttcaacgaggacatcgcagtgttcgctaaacaggtgcgggccgagaaacccctcttcagcagtaatccagagctggacaatttaatgattcaggcgatccaggtcctccggttccacctgttagagctggaaaaagtgcacgagctttgtgacaacttctgccatcggtacatctcttgtctgaaaggaaagatgccaatagatctggtcattgacgaacgcgacggatcatctaagagcgatcacgaagagttgagcggatcctcaactaacttggctgaccataaccctagctcctggcgggaccatgatgacgcaacctcaacacatagtgctggcactccagggccttctagtgggggacacgcttctcagtcgggagacaattctagcgaacagggagatggtctggacaactcagtcgcctcacctgggaccggagacgatgatgacccagacaaggataagaaaaggcagaagaaacgggggatattccccaaagtcgctactaacataatgcgagcctggctgttccaacacctgacacacccatacccttctgaagagcagaaaaagcagctggctcaggatacagggctgactatattgcaggtgaataactggttcattaatgcgagaagaaggatcgttcaaccaatgatcgatcagtccaaccgagctgttagccagggagctgcttatagtcccgaagggcagcctatggggagctttgtcttggatggtcagcagcatatgggaatccgccccgctggcccaatgagcggtatgggcatgaacatggggatggatggtcagtggcattacatgtag

SEQ ID NO: 194607 - DNA, 1434 bp, synthetic construct
  misc_feature 1..1434: note = Description of Artificial Sequence: Synthetic coding sequence
  source 1..1434: mol_type = other DNA
atggcccagcggtacgacgagctgccccactacggcggcatggacggcgtcggagtgcccgccagcatgtatggtgatcctcacgcaccaaggcctatccccccagttcaccatctgaaccacggtcccccccttcacgcaacccaacactatggcgcacatgcgcctcacccgaacgtgatgcctgccagtatgggatcggccgtgaacgacgccctgaagagggataaggacgccatctatggtcatcctttattcccacttctcgccctggtgttcgagaagtgtgaactggctacctgcacaccccgagaaccaggcgtcgcaggcggcgatgtttgttcatctgattcgtttaatgaagacattgcagtgttcgccaaacaggtgcgagccgaaaagcctttgttttcgtcaaatcctgagttggataacttgatgatccaggctattcaagtgttaagatttcacctgttagaactggaaaaggtgcacgagctgtgcgacaatttttgtcaccggtatatttcttgtctgaaagggaagatgccaatcgacctggttattgacgaacgggacggctcctccaagtcagaccatgaggagctgtctggatcatccacgaatctcgccgaccataaccctagctcatggcgtgatcacgatgatgctacatccacccacagcgctgggactccaggccctagcagcgggggccacgcaagccagagcggtgacaatagctcggaacagggggacggactggacaactctgtcgccagcccaggcaccggcgatgatgatgaccccgacaaagataagaagcgccagaaaaagcggggtatctttccaaaggtggccaccaatattatgagagcgtggctgtttcagcacctgacacatccgtacccttccgaggagcagaaaaagcaattggcccaagatacaggcctcacaatactccaagtaaacaactggtttatcaatgctagacggcgcatcgtgcagccaatgattgatcagtccaacagagctggttttcttctggacccgtccgtctctcagggagctgcttacagtccagagggtcagcccatgggctccttcgtgttggacggacagcagcacatgggaattagacccgccgggctacagagcatgcccggcgactacgtgagccagggtggtccaatgggcatgtccatggcccaaccctcatacactcccccgcaaatgacgcctcatcctacacaactcaggcatggcccacctatgcacagctatctgccctctcaccctcaccatcctgctatgatgatgcatggggggccccccactcatcccgggatgactatgtctgcccaatcacctaccatgctcaattctgtggaccctaacgtgggtggacaggttatggatatacatgctcagtag

SEQ ID NO: 194608 - DNA, 1434 bp, synthetic construct
  misc_feature 1..1434: note = Description of Artificial Sequence: Synthetic coding sequence
  source 1..1434: mol_type = other DNA
atggcccagcggtacgacgagctgccccactacggcggcatggacggcgttggagtccctgccagcatgtatggggaccctcatgccccacgcccaattcccccagtgcaccacctgaaccacggcccccctcttcacgctacccagcactatggggctcatgctccacacccaaacgtcatgccggccagcatgggcagcgcagtgaatgatgctctcaagagggataaagatgcaatatatggtcaccccttatttccactgctggcgttggtatttgagaagtgcgagctggctacttgcacccccagggagcctggcgttgctggtggagatgtctgctcctccgactccttcaatgaagacattgcggtgttcgcgaagcaggtccgtgccgagaagccattgttcagtagtaatcctgagttggacaacctgatgattcaagccatacaggtcctccgatttcacctattggagctcgaaaaggtgcacgaactatgtgacaatttctgtcatcggtatatttcctgcctgaaggggaaaatgcccatcgatctcgtgattgatgaacgggacggatcatccaagagtgaccatgaggaactttctggctcaagtactaatctcgccgaccacaacccctcctcatggagagaccatgacgatgcgacaagcacacattcagctggcacccctggccccagcagcggagggcacgcatctcagtcaggcgataattcctccgagcaaggcgatggtttagataattctgtagcctccccaggaacaggtgacgatgacgacccagacaaagacaagaagcggcaaaagaaacgcggaatatttcccaaagtcgcgactaatattatgcgagcatggctatttcagcacttgacacatccgtatccgagcgaagagcagaaaaaacaacttgcacaggataccgggttaacaatcctccaagtgaacaattggttcatcaatgctcggagaagaatcgtgcaacctatgatcgaccagagtaaccgcgctgggttcctcttggatccttctgtttctcagggggcggcctattcccccgaagggcagccaatgggaagtttcgtactagacggacagcagcatatgggaatccgtcccgcgggtctgcagagcatgcctggcgattatgttagccaggggggacctatgggcatgagcatggctcagccttcttacaccccgccgcagatgactccgcaccctacacagctgaggcacggcccacccatgcactcctacctcccatcacaccctcatcacccggcaatgatgatgcatggcggtcctcctacccatcccgggatgacaatgtcagcccaatcacccacaatgctgaacagcgtcgatcctaacgtgggaggccaagttatggacatccacgctcagtag

SEQ ID NO: 194609 - DNA, 357 bp, synthetic construct
  misc_feature 1..357: note = Description of Artificial Sequence: Synthetic coding sequence
  source 1..357: mol_type = other DNA
atgccccgggaggacgcccacttcatctacggctaccccaagaagggacacggacacagttacacaactgccgaagaagctgccggaataggtatactgaccgttattctcggggtccttctcctgattgggtgttggtattgtcgaaggagaaatggctatcgggcattgatggacaaatctcttcatgtgggaacacagtgtgcactgacgcgccggtgtccacaggagggctttgaccatcgggactctaaagtgtctctccaagaaaaaaattgcgagccagttgtaccaaatgcccccccagcgtatgaaaaattgtcagccgagcagtctccacctccctacagcccttag

SEQ ID NO: 194610 - DNA, 357 bp, synthetic construct
  misc_feature 1..357: note = Description of Artificial Sequence: Synthetic coding sequence
  source 1..357: mol_type = other DNA
atgccccgggaggacgcccacttcatctacggctaccccaagaagggacatggacacagctatactactgctgaggaagcggccggcatcggtatactcacagtgatattgggtgtgttgctgctaatcggctgttggtactgccgaaggcgaaatgggtacagggctctgatggacaaaagcctgcatgtgggcacacagtgtgctcttacccgaagatgcccacaggagggatttgatcatagagacagcaaggttagcctacaggaaaaaaattgtgagcccgtggtacctaacgcaccacctgcttacgagaaactgtccgctgagcagtccccaccaccctactcgccttag

SEQ ID NO: 194611 - DNA, 357 bp, synthetic construct
  misc_feature 1..357: note = Description of Artificial Sequence: Synthetic coding sequence
  source 1..357: mol_type = other DNA
atgccccgggaggacgcccacttcatctacggctaccccaagaagggacacggtcattcgtatacaacagcagaagaagccgccggcattggaatccttaccgttatcctgggcgtgttattgctgatcggatgttggtactgtcgccggagaaatgggtatcgggctctgatggacaaaagcctccatgtgggcacacagtgcgccttgacccgccggtgtccccaggagggattcgaccacagggattcaaaagtgagcctgcaggagaaaaactgcgagccagttgtacctaatgctccccccgcttatgaaaagctgtccgccgagcagtcaccgcccccttatagtccatag

SEQ ID NO: 194612 - DNA, 1269 bp, synthetic construct
  misc_feature 1..1269: note = Description of Artificial Sequence: Synthetic coding sequence
  source 1..1269: mol_type = other DNA
atgagcgtgggcgccatgaagaagggcgtgggccgggccgtgggcctaggcggaggctctggttgtcaggcgacagaagaggatccactacctaactgcggagcatgcgctcccggacagggcggcaggcgatggagactgccccagcccgcttgggtcgaaggttccagtgcccgcctttgggaacaggcgacagggacaggctggatggacctcgaagcgagtttactgcctactggtcccaatgctagcaatactagtgatggacccgataatttgaccagtgctggttccccaccaagaacaggtagtatttcttacatcaatatcatcatgccgagtgtctttgggacgatttgtctactgggaatcatcggcaattcaaccgtcatttttgcagtggttaagaagtctaaactgcactggtgcaataacgtgcccgatatctttattatcaatctaagcgtcgtcgacctcctgttcctccttggcatgccctttatgatccaccagcttatgggcaatggagtctggcactttggcgaaactatgtgcactctgattaccgccatggacgcgaactcccagtttacaagcacttacatcctcacagcgatggctattgatcgctacttggccacagttcaccccatttcttctacgaagttcaggaagccatccgtggcgacgcttgtgatctgtcttctatgggccctgtctttcatttccatcactccagtatggttgtacgcccggttgatcccctttccgggtggcgccgtgggctgcggaatacgactgcctaatcccgatacagatctctattggttcaccctgtaccaatttttcttggcgttcgcattgccatttgtcgttatcacggccgcgtacgttcgaatcttgcagcgaatgaccagctctgttgctccagcctcccaacgaagcatcaggttgcggacaaagagggtgactcgcaccgccatcgccatttgtttagtctttttcgtctgttgggctccgtactacgtcctacaactaacccagctgtccattagtcggcccacattaacgtttgtctacctctataatgctgctatcagtttaggatatgccaattcttgtctgaatccctttgtttatatcgtgctttgcgaaacttttcggaagaggctggtcctttcagtcaaacctgcggctcaaggccagttgcgggccgtctcgaatgcccaaactgctgacgaagagaggacagagtctaagggaacatag

SEQ ID NO: 194613 - DNA, 891 bp, synthetic construct
  misc_feature 1..891: note = Description of Artificial Sequence: Synthetic coding sequence
  source 1..891: mol_type = other DNA
atgagcgtgggcgccatgaagaagggcgtgggccgggccgtgggcttgggtgggggaagcgggtgtcaagctaccgaggaggacccgcttcctaactgcggggcctgtgctcctggtcaggggggaagacgctggagactgccccagcccgcatgggttgaaggcagctcagcgaggctgtgggagcaagccaccggaactggctggatggatctagaggcctcactgctgccaacaggtccaaatgcaagtaatacttccgacggccctgacaacttgacgtccgcaggttccccaccaagaacaggctctattagttatattaacattataatgccttccgtctttggcaccatttgccttctgggaatcattggaaactccacagtcatcttcgccgtggtcaaaaaatctaaattacactggtgcaataatgtgcccgacatctttatcatcaatctgagtttctttttggcttttgccctgcccttcgtggttattactgcagcctacgtgcgcatcttgcagcggatgacatcaagcgtcgcgcctgccagccagaggagcatcaggctgcgcaccaagagggtcaccagaacggccatcgctatctgcttggttttttttgtttgttgggcaccttactacgtgttgcagctcacacagttaagcataagccgaccgactctcaccttcgtctacctgtataacgcggccatctcgctcggatatgccaacagctgcctgaacccatttgtttatatcgtcctgtgtgaaacatttcggaagcgattggtgctgtccgtcaagcccgctgcacagggacaactcagggcggtgtctaatgcgcagacagcggatgaggagaggaccgagtctaaaggaacatag

SEQ ID NO: 194614 - DNA, 1023 bp, synthetic construct
  misc_feature 1..1023: note = Description of Artificial Sequence: Synthetic coding sequence
  source 1..1023: mol_type = other DNA
atgaaccccttccacgccagctgctggaacaccagcgccgagctgctgaacaagagttggaacaaggaattcgcatatcagaccgcgagcgtggtggatacagttattctccctagcatgatcggaataatttgcagtacagggctggtaggcaacatactaatcgtgtttactattatccggtcacgaaagaagaccgttccagatatttacatatgcaacctggcagttgccgacctggttcatatcgtcggaatgccttttctgatccaccagtgggcccggggcggcgaatgggtgtttggcggaccattgtgcaccatcattacatccctggatacctgtaatcagttcgcttgctctgcaatcatgaccgtgatgtcggtcgatcggtatttcgccttagtccagcctttcaggctcacaagatggcgaacacggtataaaaccatcagaatcaatttggggctctgggcagcctccttcatcctggcactgcctgtgtgggtctattcaaaagtgattaagtttaaggacggcgtggaatcgtgtgcttttgatcttacttctcctgatgacgttctctggtacacgctttacctgaccattacgacattcttcttccctttacccctgatactggtgtgctacatcttgatcctatgttacacgtgggagatgtaccagcagaacaaggacgcgcgctgttgtaatccatccgtgcctaagcaacgggtcatgaagcttacaaaaatggtactggtgctggttgtggtgtttattctgagcgccgccccttatcatgtaatacaactcgtgaacctccaaatggaacagcccacactggccttttacgtcggctactacctatctatctgcttatcctacgcttcaagttctattaacccattcctgtacatcctgctcagcggaaacttccagaaaagactacctcagatccagcgtagagcaactgagaaggagatcaataatatgggaaacactcttaaaagccacttttag

SEQ ID NO: 194615 - DNA, 1023 bp, synthetic construct
  misc_feature 1..1023: note = Description of Artificial Sequence: Synthetic coding sequence
  source 1..1023: mol_type = other DNA
atgaaccccttccacgccagctgctggaacaccagcgccgagctgttaaataagtcgtggaataaagagttcgcttatcagaccgcttctgtcgttgatacggttatcctgcccagtatgatcgggataatctgcagtacaggactcgtcgggaacatcctcattgtattcacaattatccgctctaggaagaagacggtgccagatatctacatttgtaatctggccgtggctgacttagtacacattgtcggcatgccttttctgatacatcagtgggctcggggcggcgaatgggtgtttgggggtccattgtgtactattataacaagcctggacacttgtaatcaattcgcatgtagcgccatcatgacagttatgagcgtagatcgttatttcgccctggtccagcccttccggttgactaggtggcgtactagatacaaaaccatccgcattaaccttggtctttgggcagcatcttttatactcgccctgccagtgtgggtgtatagcaaggtgattaagtttaaagatggggtcgagtcttgcgcctttgacttgacctcaccggacgacgtcctttggtataccctgtatttaaccatcactacctttttttttccactgcctttgattttggtttgttatattttaatcctatgctatacatgggagatgtaccagcaaaataaagatgcccgctgttgcaacccttcagttccaaaacagcgcgtaatgaaactgaccaagatggtgctcgtgttggtggtcgtgttcatacttagcgcagccccgtatcatgttatacaactggtcaatctgcaaatggagcaaccaacactggccttctatgtcggatactacctgagtatttgcttatcgtatgcgagctcttccataaacccttttctctatattctgctgtctggcaattttcaaaagaggctgcctcaaatccagaggagggcgactgagaaagagatcaataatatggggaataccctcaagagtcatttttag

SEQ ID NO: 194616 - DNA, 1023 bp, synthetic construct
  misc_feature 1..1023: note = Description of Artificial Sequence: Synthetic coding sequence
  source 1..1023: mol_type = other DNA
atgaaccccttccacgccagctgctggaacaccagcgccgagctgcttaacaaaagttggaacaaggaatttgcctaccagactgctagtgttgttgatactgtgattctgccctccatgatcggcatcatatgtagcactgggctagtgggaaacattctcatagtgtttacgatcattcgttctcggaagaagactgttcctgatatttacatttgcaacctggctgttgccgatcttgtgcacatagtgggtatgccttttttaatccatcagtgggctaggggcggtgaatgggtattcggtggtccactgtgtacgatcataacatccctcgatacttgtaaccagttcgcctgtagtgccattatgacggttatgtctgtggatagatattttgcattggtccagccctttcgcttgactagatggagaacgagatataagacaattcgaatcaacctaggcttatgggcggcttccttcatcctcgctttacctgtgtgggtctacagcaaggtcattaagttcaaggatggggtggagtcctgtgcgtttgaccttacgtcaccagacgacgttctttggtatacactctacctaaccattactacttttttctttccattgcccttaatcctggtgtgctacatcctgattctctgctacacctgggagatgtaccaacagaacaaggatgccaggtgttgcaacccaagcgtccctaaacagcgtgtgatgaagctgacaaagatggtgttagtcctggtcgtggtgtttattcttagcgccgcaccctaccacgtaatacagctagtgaacctgcagatggaacagcctaccctggccttctacgtcggctactatctgagcatctgcctgagctatgccagttcctctatcaatcctttcctctatatattgctgtccggaaacttccagaagcggttgccacagatccagagaagagcaaccgagaaggagattaataatatggggaatactttgaaatctcacttttag

SEQ ID NO: 194617 - DNA, 519 bp, synthetic construct
  misc_feature 1..519: note = Description of Artificial Sequence: Synthetic coding sequence
  source 1..519: mol_type = other DNA
atggccaacggcaccaacgccagcgccccctactacagctacgagtattatctggactatctagatcttatacccgtcgacgagaaaaaattaaaggcccataaacacagtattgtaatcgccttctgggtgtctctggctgctttcgtagtgctgctatttctaatcctgttatatatgtcctggtctgccagcccccaaatgcggaattctcctaagcatcatcagacatgtccctggtcacatgggctcaacctgcacttatgcattcaaaagtgtctgccctgtcacagggagcctttggcgacatctcaggctcaggccagtagcgtagaacctgggtcccgcacgggacccgaccagcctctcaggcaggagagctcttccaccctgcctttgggaggcttccagactcacccgaccctcctctgggaattaacactgaatggagggcctctggtccgaagcaaaccttcggagcctccgccaggcgacaggacttcacagctccagagctag

SEQ ID NO: 194618 - DNA, 309 bp, synthetic construct
  misc_feature 1..309: note = Description of Artificial Sequence: Synthetic coding sequence
  source 1..309: mol_type = other DNA
atggccaacggcaccaacgccagcgccccctactacagctacgagtactatctggactatctggacctaattcccgtggatgaaaaaaagctaaaagctcacaaacactctatcgtcatcgccttttgggtgtcgctagccgcttttgttgtactgctctttctgatcctgttgtacatgtcttggtcagcttccccacagatgagctttaacaccgacgaatccttgctacactcagaagttcttccacaaaccagggcgatttcctgcgatgaattgcaggccccaagggaggaaggagccgcttag

SEQ ID NO: 194619 - DNA, 519 bp, synthetic construct
  misc_feature 1..519: note = Description of Artificial Sequence: Synthetic coding sequence
  source 1..519: mol_type = other DNA
atggccaacggcaccaacgccagcgccccctactacagctacgagtactacttggactatctcgatctaatccctgtggacgagaaaaagctgaaggcacacaagcatagcattgtgattgcattctgggtctcattagccgcttttgtcgtgttactctttctcattttgctttacatgagctggtccgcgtcaccccagatgagaaatagtccaaagcaccatcaaacatgcccttggtcacatggcctgaacctgcacctgtgcatccaaaagtgcctcccctgccacagggaaccactggcaacctcacaagctcaagcctcaagcgtcgagccaggctcccggacaggacctgaccagcctctcagacaagagagtagctctactctgccactcggcggcttccagacacaccccaccctgctgtgggagctcactctcaacggcggacctttagtgcgatcaaagccctccgagccgccacctggtgaccgcacttcccagttacagtcatag

SEQ ID NO: 194620 - DNA, 309 bp, synthetic construct
  misc_feature 1..309: note = Description of Artificial Sequence: Synthetic coding sequence
  source 1..309: mol_type = other DNA
atggccaacggcaccaacgccagcgccccctactacagctacgagtactacttggactacctggatctgatccccgtcgacgagaagaagctgaaggctcataaacatagcatcgtgatcgctttttgggtctcactggcagccttcgtggttttgctgttcctcatcctgctctacatgagctggagcgcctccccccagatgtcattcaacacagatgagtccctgcttcactctgaggtgttgccacaaaccagggctatcagttgcgacgagttgcaggctcctcgcgaagagggtgctgcatag

SEQ ID NO: 194621 - DNA, 1110 bp, synthetic construct
  misc_feature 1..1110: note = Description of Artificial Sequence: Synthetic coding sequence
  source 1..1110: mol_type = other DNA
atgccccgggcccccaagcggcagcggtgcatgcccgaggaggacttgcagagccagtcagagactcagggcttagagggagctcaggcaccgctggcagtcgaagaagacgccagcagtagtacaagcacctcatctagttttcctagcagcttccccagttcttcctcctctagctcttcctcctgttatcccctgattccatctacaccggaagaggtgtccgccgatgacgaaacccccaatccgccccagagtgcccagattgcctgttctagtcccagcgtggtcgccagtctcccacttgaccaatcagacgaaggctcttcgagccagaaagaggaatctccttctaccctccaagtcttgcctgacagcgagtctctccctagatccgagattgacgagaaggtcaccgacttggtgcagttcctgctcttcaagtaccagatgaaggaaccaataaccaaagcagaaattctggaaagcgtcattagaaactacgaggaccactttccgctgctgttctcagaggcttctgagtgcatgctgctagtttttggcattgatgttaaggaagtcgatcccactgggcatagcttcgtccttgtaaccagtctggggttgacctatgacgggatgctatccgacgtgcaatccatgcccaaaactggaatcttgatcctgatcctcagcatcgtgtttattgagggctattgcacacctgaagaggtgatctgggaggctctgaatatgatggggctgtacgatggcatggagcatctgatttatggcgaaccacgaaaattgctgacccaggactgggtgcaagagaattatctcgaatacagacaggttccaggctctgaccctgcacgatacgagttcctctggggcccacgcgcccatgctgagattcgaaaaatgagcctcctgaaatttcttgccaaagttaacggcagcgatccgagaagctttcctctctggtacgaagaagccctgaaggacgaggaggagcgggcccaggatcgtatcgccactaccgacgataccacagcgatggctagtgcgtctagttccgccacaggctcctttagttacccagagtag

SEQ ID NO: 194622 - DNA, 1110 bp, synthetic construct
  misc_feature 1..1110: note = Description of Artificial Sequence: Synthetic coding sequence
  source 1..1110: mol_type = other DNA
atgccccgggcccccaagcggcagcggtgcatgcccgaggaggaccttcagagtcagagtgaaactcagggcttggagggagcgcaggcccccctcgctgtcgaagaggatgccagcagtagcacctcaacgagttcctcttttccaagttcctttccgagttcatccagctcctcatcgagttcatgctacccccttataccaagtacacccgaggaagtgtctgccgacgatgagactcccaatccacctcagtcagcccagatcgcctgttcttctccatcagttgtcgcatctctgccgttggatcagtccgacgaggggtccagtagccagaaagaagaatctccctcgaccttgcaggtgctgcctgattcagaaagcctgcctcggtctgaaatagacgagaaagtgacagacctagtacaatttcttctcttcaaatatcagatgaaagaacccattactaaggcggaaattctagagtccgtgatcagaaactacgaagatcatttccctctgctgttttccgaagcctctgagtgcatgcttctggttttcggaatcgacgttaaagaagtcgaccccaccgggcattcttttgtgctggttacatctttaggtctgacatatgatggaatgcttagtgatgtgcagtctatgccaaagacaggaattctcatcctgatcctgtccatcgttttcattgagggctactgcacccctgaggaggtgatatgggaggctctgaatatgatgggcctctatgacggcatggaacatttgatctatggcgaaccacgtaagttgcttacacaggattgggtacaagagaactacctggagtaccgacaggtgcccggttccgaccctgcccggtatgaattcctttggggtccccgcgcacatgcggagatacgaaagatgagtctgctgaagtttcttgctaaggtgaatgggtctgaccccagaagctttcccctgtggtatgaagaagcacttaaagatgaggaagaacgtgcccaggatcgtatcgctacaacagacgacacaaccgctatggcaagcgccagctcatcggcgacggggagcttttcataccccgagtag

SEQ ID NO: 194623 - DNA, 486 bp, synthetic construct
  misc_feature 1..486: note = Description of Artificial Sequence: Synthetic coding sequence
  source 1..486: mol_type = other DNA
atgccccgggcccccaagcggcagcggtgcatgcccgaggaggacctgcagtctcaatctgaaacccaggggttagaaggagctcaagcacctcttgcagtggaagaggacgcttcgtcgtccacttccacttcttccagtttcccctccagcttccctagcagctcaagctcatcttcatcaagctgctatcctctgatcccatcaacacccgaggaagtttccgccgacgatgagacgcctaatcccccccaatctgcacaaatcgcctgctcctctccatctgtggtggcctccctgccactcgatcagtcagatgaggggtcctcaagccagaaggaagagtcaccaagcactctgcaggttctacctgatagcgaaagcctgccacggtcagaaatcgacgagaaagttaccgatcttgttcagtttttactttttaagtatcagatgaaggaacccataacaaaagccgagattctgtag

SEQ ID NO: 194624 - DNA, 573 bp, synthetic construct
  misc_feature 1..573: note = Description of Artificial Sequence: Synthetic coding sequence
  source 1..573: mol_type = other DNA
atgccccgggcccccaagcggcagcggtgcatgcccgaggaggacctgcagagccagagcgagacacaggggctggagggggcacaggcccccctggctgttgaagaagatgctagctcctccacatcaaccagcagctcgttcccatcctcgtttcctagttcctcttccagtagtagctccagttgttatcccttgattccaagtacacctgaagaagtgtccgcagacgatgaaacgcctaaccctccgcaatctgcacaaattgcctgttcctctcctagcgttgttgcgtctttgcctctcgatcagagcgatgagggctcatcgtcccagaaagaggaatctccaagcactttgcaggtgctcccagatagcgagagtctaccccgatccgagattgatgaaaaggttaccgacctggtccagttcctcctgtttaagtatcaaatgaaggaaccgattaccaaagcagagatcttggaaagtgtgattcgcaactacgaagaccattttccactcctcttttctgaagcctcagagtgtatgcttctcgtttttggtatcgactag

SEQ ID NO: 194625 - DNA, 1203 bp, synthetic construct
  misc_feature 1..1203: note = Description of Artificial Sequence: Synthetic coding sequence
  source 1..1203: mol_type = other DNA
atgagcaaggtgagcaccatgttcagcgaggacgacttccagagcaccgaaagggcgccatatggccctcagctgcagtggtcgcaggacctccctcgcgtccaggtcttcagggagcaagctaatttagaggatcgtagccctcggagaacccagcggattacaggcggcgagcaggttttatgggggcccatcacccagatcttccccacggtgagaccagcagacctgacacgtgtgatcatgcctcttgagcaacgatcacaacattgcaaacccgaagagggcctccaggcccaggaggaggacttgggcttagtgggagctcaggcactgcaggcagaagagcaggaggcagcttttttcagcagtacattaaacgttggaaccctggaggaactgccagctgccgaatcaccttcccctcctcagtccccccaagaggagtccttctcccccaccgcgatggatgcaatcttcggtagtctctccgatgaaggttcaggatcccaggaaaaagaaggcccctccacttcccccgacctgatcgatcccgagtccttctctcaggacatcctccatgataagattattgatctggtgcacctcctgttacgtaagtaccgcgtgaaggggcttatcacaaaggccgaaatgctagggtcagtgatcaaaaattatgaagactacttccctgaaattttccgggaggcatccgtctgcatgcagctactttttggcatcgacgtgaaggaggtagaccctacctcccatagttacgtactggttacatctctcaatctgtcttatgacggtattcagtgcaacgagcagtccatgccgaagtccggacttctaatcatcgtgctcggcgtgatatttatggaagggaattgcatccccgaagaggtaatgtgggaggtactgtccatcatgggcgtttatgccggtcgcgaacattttttgttcggtgaacccaagcgcttgctcactcagaactgggtgcaagagaagtacctggtttaccgacaggtgcctggtacggaccctgcttgttatgagtttctgtgggggccccgcgctcacgccgagaccagcaagatgaaagtcctggaatatatcgcaaacgccaatggtcgagatcccacctcctatccttccctctacgaggatgccctgagagaggagggggagggggtgtag

SEQ ID NO: 194626 - DNA, 1290 bp, synthetic construct
  misc_feature 1..1290: note = Description of Artificial Sequence: Synthetic coding sequence
  source 1..1290: mol_type = other DNA
atggagacccagttccggcggggcggcctgggctgcagccccgcctcaatcaagcggaagaagaaacgtgaggatagcggggactttggactccaggtgagcacgatgttttcagaggacgacttccagtccactgagagagccccttacggaccacagctacagtggtcccaggaccttccacgggtccaggtgtttcgggaacaggctaaccttgaagataggagcccaaggcgaacacagcgaataaccggaggagagcaagtcttgtgggggcctattacccagatcttcccaaccgtccggcctgcggacctgacacgcgtcatcatgccccttgagcagcgttcccagcactgcaagccagaggaagggttacaagcccaggaggaggacctgggcctagtcggcgcccaggccctacaagccgaagaacaggaggcagcctttttttcctcaaccctaaatgtcggcacgctcgaggaattgcccgccgccgaatcaccatcccccccacagtcaccacaggaagaaagcttctctcctacggccatggatgccatcttcgggagcctttctgatgaaggaagcggcagccaagaaaaggagggtccatcaacaagcccagatctgatcgacccagagagctttagccaggatatcctccacgataagattatcgatctcgttcacctcctgctacgtaaatacagggtgaaaggcctgattaccaaggcagaaatgctgggttccgtgattaagaactacgaggactactttcccgagatattccgggaggcctccgtctgcatgcaactgttatttgggattgatgtgaaggaggtggacccaaccagtcatagttacgtgctcgtgacatcactgaatttaagctatgacggtatccaatgcaatgagcagtcaatgcctaaatccggcctgctgattattgtgctcggcgtgatctttatggaggggaattgtatcccagaggaggtcatgtgggaagtgcttagcattatgggtgtatacgcaggtcgcgaacacttcctgttcggcgaacctaagagactgttgacacagaattgggtccaggaaaagtatttagtttatagacaggttcccggcaccgaccccgcttgttacgaatttctgtggggcccccgcgcccacgctgagacatctaagatgaaagtactggagtacatcgctaacgctaatggacgcgacccaacaagctacccctctctgtacgaagatgcactccgagaagagggagagggcgtatag

SEQ ID NO: 194627 - DNA, 945 bp, synthetic construct
  misc_feature 1..945: note = Description of Artificial Sequence: Synthetic coding sequence
  source 1..945: mol_type = other DNA
atgcccctggagcagcggagccagcactgcaagcccgaggagggcttggaggctcagggagaggcactaggcttggtcggagctcaagcgcccgccaccgaggaacaagaaacggcctcatcctcgagtaccctcgtggaggtgacgctcagggaagtgcctgccgccgagtcaccctctccgccccatagtccgcaaggggcaagcacccttcctacaactataaactataccctgtggagtcagtcagatgagggaagcagcaacgaagagcaggaaggcccatctacctttccagatctggaaaccagctttcaggtcgccctctcaaggaagatggccgagttagttcatttcctactgctcaagtaccgcgctcgcgaacccttcaccaaggccgaaatgttggggtccgttattcgcaacttccaagacttttttcctgtcatcttttccaaggcgtctgaataccttcagctcgtcttcggtatagaggttgtcgaggttgtaaggatcggccatctgtacattctagtgacctgtctcgggctttcctacgatggactgcttggggataaccaaatagtgcccaagactgggttactgattatagtgttagccattatcgccaaagagggggactgcgcgcctgaagagaaaatttgggaggaattgagcgttttggaggctagcgacggacgagaagactccgtgttcgcccatccaaggaagctgctcacgcaggaccttgtccaggagaactacttagagtaccgtcaagtgccgggctcggacccagcctgttacgagtttctgtggggccctcgtgctctggtcgagacctcatacgtgaaagtgttgcaccacttgctcaagataagtggagggcctcatatctcctacccgccacttcacgagtgggcatttagagagggcgaagagtag

SEQ ID NO: 194628 - DNA, 945 bp, synthetic construct
  misc_feature 1..945: note = Description of Artificial Sequence: Synthetic coding sequence
  source 1..945: mol_type = other DNA
atgcccctggagcagcggagccagcactgcaagcccgaggagggcctcgaagctcagggcgaggctctcggattagtgggagcccaagcgcccgcaaccgaggaacaagaaactgcctcctcgtcttctactctcgtggaggtgaccttaagggaggtgcccgccgctgaatccccatcccctccccacagcccacagggggcctccacactccccacgacaattaattatacattgtggagccagtccgacgaaggttctagtaatgaagagcaggagggcccaagtacctttcccgatttggaaacgagctttcaggtggccctctcgcgtaagatggcggagctagtgcattttctgttgctcaaatatcgcgcaagagaaccattcacaaaggccgagatgttaggcagcgtgattagaaactttcaggatttcttcccagtgatttttagcaaggcctctgagtatttacagctcgtattcggcattgaggtcgtcgaagtcgtccgtatcgggcacttatacatcttggtaacatgcctgggcctaagctatgacggattgctgggcgacaatcagatcgtgcccaagactggattattgattatagttctcgctataatcgctaaggagggagattgcgccccggaagaaaagatttgggaggagctatccgtgctcgaagcatcggatggtcgcgaagatagcgtgttcgcacatcctagaaagctcttgacacaggacttggtgcaggagaattatctggagtatcgacaggtgccaggttcagatcctgcatgctacgaattcctctggggtccacgggcactcgtggagacttcctacgttaaggttctccatcacctgctcaaaatcagcggtgggccgcacatctcctacccccctttgcacgagtgggcatttcgagagggggaggagtag

SEQ ID NO: 194629 - DNA, 945 bp, synthetic construct
  misc_feature 1..945: note = Description of Artificial Sequence: Synthetic coding sequence
  source 1..945: mol_type = other DNA
atgcccctggagcagcggagccagcactgcaagcccgaggagggcttagaggcccaaggggaagccctgggtctcgttggcgctcaggctccagcaacggaagagcaggagaccgcaagtagctcctcaaccctcgtggaagtgactctaagagaagtcccagcagccgaaagccccagcccccctcactcaccacagggtgcttccactctacccacaaccattaactacactctctggtcacaatctgatgagggaagcagcaatgaggaacaggaaggccctagcacttttccggacctggaaacaagcttccaggtggcactgagcagaaaaatggcggagctggtacacttcctgctgctcaagtatcgcgcccgagagccatttactaaagctgagatgctgggtagtgtgatccggaactttcaggatttcttccctgtaatttttagcaaagctagcgagtacctgcagctggtgttcggcatcgaggtggtggaggtggtcaggattggacatctttacatcctggttacgtgcctgggtctgtcctacgacgggttgctcggcgacaatcagatagtacccaagactgggctactaattatcgtcctggcaattattgccaaggagggagactgcgctccggaagagaagatctgggaagagctgagcgtgttggaagcgtctgatggcagagaggactccgtcttcgcccaccctcgtaaactgttaactcaggacttggttcaggaaaactatctggagtaccgccaggtccccggatcggatccagcatgctacgagttcctgtggggcccccgagcgttggtcgagacctcctatgtgaaggttctgcaccacctgttgaagatcagtggcggcccccacatttcttatccaccgctgcacgagtgggcctttagggagggagaggagtag

SEQ ID NO: 194630 - DNA, 945 bp, synthetic construct
  misc_feature 1..945: note = Description of Artificial Sequence: Synthetic coding sequence
  source 1..945: mol_type = other DNA
atgcccctggagcagcggagccagcactgcaagcccgaggagggcctggaggcccgcggagaggcactcggtctggtcggcgcacaggctcccgccactgaggagcagcagacggcctccagcagttctacccttgtggaggtgacgttgggagaggtccctgccgccgattctccctctcctccgcatagccctcagggcgcctcttccttctccacgacaatcaactatacactctggcggcagagtgacgagggttcctcaaaccaggaagaggaggggccacgtatgttccccgatttggagagcgaattccaggcagccatctctcgaaagatggtggagttggtgcattttctgctgttaaaataccgcgcacgcgaacctgtgactaaagccgagatgttagaaagtgttttacggaattgccaggatttttttccggtcatcttctcaaaagccagtgaatatctacagctcgtgttcggcatcgaagtggttgaagtcgtccccatttctcacttgtacatcctggtcacttgcttaggcttaagttatgacggactcctcggagacaatcaagtcatgcccaaaaccggactcttgattattgtgctggcgatcatcgcgatcgaaggagattgcgcccccgaggagaaaatctgggaagagcttagcatgctggaagtcttcgagggaagggaagatagcgtattcgcccacccccgaaaattactaatgcaggatctcgtacaggaaaactacttagaataccggcaggtgcctggctcagaccccgcatgctacgaatttctttgggggcccagagccctcattgaaacgtcatatgtcaaagtcctgcatcacacgttgaagattggcggggaaccgcacatatcttatcctcccctccacgagcgtgctctccgcgagggggaggagtag

SEQ ID NO: 194631 - DNA, 945 bp, synthetic construct
  misc_feature 1..945: note = Description of Artificial Sequence: Synthetic coding sequence
  source 1..945: mol_type = other DNA
atgcccctggagcagcggagccagcactgcaagcccgaggagggcttggaggccagaggcgaggccctggggctcgttggagcacaggcccctgccactgaagagcaacagaccgccagctctagttccactctggttgaagtgacgctcggggaagtcccggcagcagacagtccatctcctccgcactccccgcaaggcgcgtcaagtttttcgaccacaatcaattacactctgtggcgccagtccgatgagggttcctcaaatcaggaggaagagggccctcgcatgttcccagatctggaatcagagttccaggctgctatatcaaggaagatggttgaactggttcattttctgttgctgaaatatagagcaagagagcctgtcaccaaggcggagatgctggaatccgtgcttagaaattgtcaggacttttttcccgtcatcttctctaaagcgtctgaatacctgcagttggtgttcggaatagaagtggtcgaagttgtgccgatatctcacctctacatactggtgacctgcctcgggctgagttacgacgggctgctgggagataaccaagtgatgcccaaaacgggcttgctgattatagtgctcgccatcatcgcaatcgagggggactgtgcacccgaagaaaagatttgggaggagcttagcatgttagaagtgtttgaaggaagagaggactccgtctttgctcacccccgcaaattgctcatgcaggacctggtgcaagagaattatcttgagtatcgccaagttcccgggtccgacccagcatgctatgagttcttgtggggcccacgcgccctgatcgagacctcatatgtgaaagtcctccaccataccctgaaaataggaggggagccccatatctcctatcctcctcttcacgagagggccctgagagagggggaggagtag

SEQ ID NO: 194632 - DNA, 945 bp, synthetic construct
  misc_feature 1..945: note = Description of Artificial Sequence: Synthetic coding sequence
  source 1..945: mol_type = other DNA
atgcccctggagcagcggagccagcactgcaagcccgaggagggcctcgaagcacgcggagaggctcttggactcgtcggcgctcaagctccagcgaccgaggaacaacaaacagcctctagcagctctacccttgtggaagtaacgctaggtgaagttcctgctgctgattcacctagtccccctcatagtcctcagggggcttccagtttttcgaccactattaattacacactttggcgtcagagcgacgaagggtcctctaatcaggaggaagaggggccgcgcatgttccctgatctggagtcagaattccaggcagccatatcccgcaagatggtcgagctggtacacttcctcttgctcaaatatcgcgcacgcgaacccgtgaccaaggcggaaatgcttgaaagtgtgcttcggaactgccaagactttttcccggtgatcttctcaaaagccagcgagtacctgcagctggtgtttgggattgaggtggtggaagtcgtccccatttcccacctgtacatattggtgacatgtttggggctgtcctacgacggcctactcggcgacaaccaggtgatgccaaagactggactgttgattatcgtcctggcgattatagccatcgaaggagattgcgcaccagaggagaagatttgggaggagctcagcatgctcgaggtgttcgaaggccgagaggactctgtcttcgcacacccacgaaagttacttatgcaggatttagtgcaggagaactaccttgaataccggcaggtgccaggcagtgatccggcatgttacgagttcctctggggcccccgggcgctgatcgaaacaagttacgtgaaggtgttgcaccatactctcaaaatcgggggagagccccacatttcttacccgcccctgcacgaacgggctcttcgcgagggcgaggagtag

SEQ ID NO: 194633 - DNA, 945 bp, synthetic construct
  misc_feature 1..945: note = Description of Artificial Sequence: Synthetic coding sequence
  source 1..945: mol_type = other DNA
atgcccctggagcagcggagccagcactgcaagcccgaggagggcctggaggcccggggggaagcactggggctggtcggcgctcaggcccccgccaccgaagaacagcagaccgcgagctctagctctaccctcgtggaagtcaccctgggcgaagtgcccgctgcggactccccatccccaccccactcaccccagggagcatccagtttcagtactacgattaattacacgttatggcgccagagtgatgagggcagctctaaccaggaggaggagggcccgcgcatgttccccgacctggagagcgaatttcaggcagccatttctagaaaaatggttgagctggttcacttcctcctcctgaaatacagggctagagagccagtcacaaaggctgaaatgctggagtcagtgctgcgcaactgccaagatttttttccagttattttctccaaggcatccgagtacctgcagctggtgttcgggatagaagtcgtcgaggtggtgcccattagccatctttacatcctggtgacgtgtctgggtctgagttacgacggactgcttggcgataatcaggttatgccaaagacgggcctgttgattatcgtactcgcaattatcgccatcgaaggggactgcgccccagaagagaagatctgggaggagctctctatgctggaagtattcgagggccgcgaagactcagtgtttgctcatcctagaaaacttctgatgcaggacctcgttcaggaaaactacctggaataccggcaggtgcccggcagcgatcccgcttgttatgaattcctgtgggggccccgggccctgatcgaaacctcttatgtgaaggtgctgcaccatactcttaagattggaggcgagccccacatcagctatcctccacttcacgagcgcgccctacgggagggagaggagtag

SEQ ID NO: 194634 - DNA, 945 bp, synthetic construct
  misc_feature 1..945: note = Description of Artificial Sequence: Synthetic coding sequence
  source 1..945: mol_type = other DNA
atgcccctggagcagcggagccagcactgcaagcccgaggagggcctggaagcccgcggtgaggctttaggtctagtgggagcccaagccccagcaaccgaggaacaagaagccgcatccagctccagtacactcgttgaagtgaccctgggagaggttcctgccgccgagtcacccgaccctccccagagtccccagggggctagttcgctccctactaccatgaactacccactctggtcccagagttacgaagattctagcaaccaggaggaggaggggcctagtacgtttccagatcttgaatcagagtttcaggctgccttgtctagaaaggtggcagaactcgttcactttctgttattaaaatatagagctcgagagcccgtcacgaaggccgaaatgttgggatccgtcgtcgggaattggcaatatttcttccccgtcattttcagcaaggcttcttccagcctgcagctggtgttcggaattgaacttatggaagttgaccccattgggcatctttatatctttgctacgtgcctcggtttgagttatgacggactcttaggggataatcagataatgccaaaagcgggcctgcttatcatcgtacttgctattattgcacgtgagggtgactgcgctcccgaggagaaaatctgggaggagctgtcagtgctcgaggtattcgaggggcgcgaggatagcatcctcggggatcccaaaaagttgctgactcaacattttgtccaagagaattacctggaatatcgccaggtgccgggatcggacccggcgtgctacgagttcctatggggcccacgcgccctagttgagactagctatgtgaaggtcttgcaccatatggtgaagatttctggagggccccacatttcctaccccccattgcatgaatgggttcttcgggaaggggaagagtag

SEQ ID NO: 194635 - DNA, 945 bp, synthetic construct
  misc_feature 1..945: note = Description of Artificial Sequence: Synthetic coding sequence
  source 1..945: mol_type = other DNA
atgcccctggagcagcggagccagcactgcaagcccgaggagggcctggaagccagaggagaggcactggggctggttggcgcacaggcccccgcaaccgaggagcaggaagccgcctcgtcttcaagcactttagtagaagtgactctcggggaggtccccgctgccgagtcacctgatccacctcagtcaccccagggggcttcatctctgccaactactatgaactaccccttgtggagtcagtcttacgaggactcgtctaaccaagaagaggaaggacccagtaccttccctgacctggagtcggagttccaggcagccttaagcaggaaggtggccgagctggtgcattttctcttactgaaatatcgagctagagagcccgtgaccaaagccgaaatgttagggtccgtcgtaggcaattggcagtatttcttcccggtgattttcagcaaggcctccagctccctgcaactggtcttcggtattgagctgatggaggtggacccaatcgggcacctgtatatcttcgctacttgcttaggattatcttatgacggcttgctgggagacaaccagatcatgcctaaagctggcttgcttatcatcgttctagccataatcgcgagagagggggattgcgcccccgaggagaagatctgggaggaactgtccgtcttagaggtgtttgaaggcagagaagacagcatactgggcgaccccaaaaagcttctcacacagcactttgtgcaagagaactaccttgaatatagacaagtgccaggctccgaccctgcctgctatgaattcctctggggaccacgggcactggtagagacttcttacgtaaaggtgttgcaccatatggtcaaaattagcggcggcccgcacatctcttatccaccactgcacgaatgggtcctccgggagggtgaagagtag

SEQ ID NO: 194636 - DNA, 597 bp, synthetic construct
  misc_feature 1..597: note = Description of Artificial Sequence: Synthetic coding sequence
  source 1..597: mol_type = other DNA
atgcccctggagcagcggagccagcactgcaagcccgaggagggcctggaagcccggggcgaagccctcggtctggtcggagctcaggcaccggccactgaagaacaagaggccgcctcctcaagttctacgctggtggaagtgaccttgggagaagtgccagccgccgaatcccccgatcctccacagtccccccaaggggcttcgagcctgcctaccactatgaattaccctctgtggtcccagtcttatgaagattcatcgaatcaggaagaagaagggcctagtacctttcctgacctggagtctgaatttcaggctgctttgagtaggaaagtggccgaactggtgcactttctgctgttgaaatatagagctagggaaccagttacgaaggccgaaatgctaggcagtgtggtcggcaactggcaatacttctttccagtaatattttccaaggcgagttccagtttgcagcttgtgttcgggatcgaattgatggaagttgacccaataggccatttgtatatttttgccacgtgcctgggactctcctacgacgggttgcttggcgataatcagataatgcccaagtag

SEQ ID NO: 194637 - DNA, 954 bp, synthetic construct
  misc_feature 1..954: note = Description of Artificial Sequence: Synthetic coding sequence
  source 1..954: mol_type = other DNA
atgagcagcgagcagaagagccagcactgcaagcccgaggagggcgtggaggcccaggaggaagccctgggcctggtcggcgcgcaagcccctaccactgaagagcaggaggctgcagtgtcaagctcttctcccttggtgcctggaacgctagaggaggtgcccgctgcagaaagtgcgggaccgccccagtcacctcaaggtgcatctgcattgccaacaaccatctcattcacctgctggcgccaacccaatgagggctcaagtagtcaggaggaggaaggaccctcgacgagtcctgacgctgaaagcttgttcagggaggccctgagtaataaagttgatgagctcgcacatttccttctccggaaataccgggcaaaagaactcgttaccaaggccgagatgttggaaagagtgatcaagaactataaacggtgtttcccagtgattttcggcaaagctagtgagagcttgaaaatgatctttggaatcgacgtcaaggaggtggatccggcctctaacacgtacacactggtgacctgtcttggacttagctatgacggcctcttggggaacaatcagatcttcccgaagacaggcctcctgatcatagtgctcggaacgatcgccatggagggcgattctgcgagcgaagaggagatttgggaggagctgggcgtgatgggggtctatgatgggagagagcatacagtgtacggtgaacctcgcaagctgcttacacaggactgggtgcaggagaactacttggagtaccgccaggtacctgggtctaacccagcccggtatgagtttctatggggcccccgtgccctcgctgaaacttcgtacgttaaagtgctggaacacgttgtcagagttaacgccagagtccgaattgcctatccttctctcagggaagccgcactgcttgaggaggaagaaggtgtttag

SEQ ID NO: 194638 - DNA, 954 bp, synthetic construct
  misc_feature 1..954: note = Description of Artificial Sequence: Synthetic coding sequence
  source 1..954: mol_type = other DNA
atgagcagcgagcagaagagccagcactgcaagcccgaggagggcgttgaagcccaggaggaggccctcgggctggtgggcgcccaggccccaaccaccgaagaacaggaagcggcagtgagttcttcgtcacccttggtgcccgggacgctcgaagaagtaccagccgccgaatctgcaggcccgccgcaaagcccacagggagccagcgcactcccaacaaccatctctttcacctgttggcgacagccaaatgagggttcaagttcacaagaagaagaaggtcccagcacctctccagacgcagaaagtctatttagagaagccctttccaataaggtggatgagttggctcatttcctgctgcggaaatacagagcgaaggagttggtgacaaaggccgagatgctggagagagtgattaaaaattacaagaggtgctttcccgtcatcttcggaaaggcctcagagtcactcaaaatgatatttgggatcgacgtgaaggaggtggaccccgcctcaaacacatacacactagttacttgcctgggccttagctacgacggcctgctcggcaacaaccaaatattcccgaagactggcctcctgattatcgtcctgggtacgatcgccatggagggtgacagcgccagtgaggaagaaatttgggaggagctgggcgtcatgggggtctacgatggacgagagcacacggtatacggggagcctcgaaaattgttaacgcaagattgggtacaggagaattatctcgagtaccgccaggtgcccggcagcaaccccgctaggtatgaattcttgtggggcccacgtgcgctggccgaaacctcttatgtgaaagtattggagcacgtagtcagagttaatgctagggtgagaatcgcttacccctctctgcgcgaggctgccctgttagaagaagaagaaggagtatag

SEQ ID NO: 194639 - DNA, 954 bp, synthetic construct
  misc_feature 1..954: note = Description of Artificial Sequence: Synthetic coding sequence
  source 1..954: mol_type = other DNA
atgagcagcgagcagaagagccagcactgcaagcccgaggagggcgtggaggctcaagaggaggctctcggtcttgtcggggctcaggcacctacaacagaagaacaggaagccgcagtaagctccagttctcccttggtgccaggcactcttgaggaggtccccgccgccgaaagcgcgggaccaccccagtcccctcaaggcgcatccgccttgccaacaaccatatccttcacctgttggcggcagcctaatgagggttccagttcacaggaagaagaaggcccgtcaacttctcccgacgctgagtcattgttccgggaggcattaagtaataaagttgacgaactggcacacttcctgctgcgaaagtacagggccaaagagttggtcaccaaggccgagatgctagaacgcgtcattaaaaattataagagatgcttccccgttatttttggaaaggcctcagagtccttgaagatgatctttggcattgacgtgaaggaagtcgaccctgcttctaacacttacacgttggtgacttgtctcggcttgtcttatgatggactgttgggcaataatcagatcttcccaaaaaccgggctgctgattattgtattaggcacgatcgctatggaaggagattccgcctccgaggaggagatttgggaggagctcggagtgatgggagtgtacgatgggagagaacatacagtatatggtgagcccaggaaactcctgacacaagattgggtgcaagaaaattatttggagtacagacaagtgccaggatctaatccagcccgttatgagttcctgtggggtcctcgggccctggctgagacgtcctatgtaaaggtgcttgaacatgttgtccgtgtcaatgcccgggtgcggattgcctatccttcccttcgggaggccgcacttctagaggaggaagaaggcgtctag

SEQ ID NO: 194640 - DNA, 954 bp, synthetic construct
  misc_feature 1..954: note = Description of Artificial Sequence: Synthetic coding sequence
  source 1..954: mol_type = other DNA
atgagcagcgagcagaagagccagcactgcaagcccgaggagggcgtggaggcacaggaggaagctctggggctggtcggcgcacaggcccctaccacggaggaacaagaagctgcagtctcaagttcttcacccctggttccggggaccctggaagaggtccccgccgctgagtctgccggccccccacagtcccctcaaggtgcctccgcactacctaccacgatctcatttacgtgttggcggcaacccaacgaaggatctagctcccaggaggaagagggtccgagtaccagccctgatgctgaatcgctattccgagaggcccttagtaataaagtggacgaattagctcatttccttctgcgcaagtatcgggcaaaggagctggtgactaaagccgagatgctggagagggttatcaagaactataagcggtgcttccccgtcatattcgggaaagcttcagaatctctcaagatgatctttggaatagatgtgaaggaggtggatccggcctcaaacacttacacccttgttacctgcttaggactgtcatatgacggtctgctggggaacaatcaaatatttcctaaaactggactgctgattattgttctcgggacgattgctatggagggcgattcagcaagcgaagaggaaatctgggaggagctcggggttatgggagtttatgatggaagggaacacacggtctatggagaacctagaaagctgctcacacaagattgggttcaggaaaattacctagagtacaggcaggtgcccggcagtaatcctgccagatacgagtttctctggggtcctcgcgccctcgccgagacgagctacgtgaaagtcctggaacatgtggttcgagtgaacgcacgtgtgcggattgcctatccttctctgcgcgaggccgccctccttgaagaagaggaaggtgtgtag

SEQ ID NO: 194641 - DNA, 954 bp, synthetic construct
  misc_feature 1..954: note = Description of Artificial Sequence: Synthetic coding sequence
  source 1..954: mol_type = other DNA
atgagcagcgagcagaagagccagcactgcaagcccgaggagggcgttgaggcacaggaggaagccctgggattggtcggtgcgcaagccccaaccaccgaggaacaggaggctgcggttagctcgtcctcccccttagtgcctggtaccttggaggaagttccggccgctgaatcggctgggcctcctcagtctcctcagggggctagtgcactcccaaccaccatctctttcacttgttggagacagccaaatgagggcagctcttcccaggaagaggagggcccgtcaacaagcccggatgctgagagccttttcagggaggccctgagcaacaaagttgatgagttggcacattttctactcaggaaatatcgcgctaaagagcttgttaccaaggccgaaatgctggaaagggttattaaaaattacaaacgctgcttccccgtcatcttcggtaaagccagtgagagtctgaaaatgatattcgggattgacgtgaaggaggtggaccccgcctctaatacttatacattggtaacctgcttgggactgtcatatgatggcctgttggggaacaatcagatctttcctaagaccggcctgctgattatcgtcctcggtacaatcgcaatggaaggcgattcagcatcagaggaggagatttgggaggagttgggggtcatgggcgtgtacgatggacgtgaacacactgtctatggggaaccacgcaagctgctgacacaagactgggtgcaagaaaattatctagaatataggcaggttcctggaagcaatccagccagatacgagtttctgtgggggcctcgggccctcgccgagaccagctatgtgaaagttttggagcatgtagtgagggttaatgctcgggtgagaatcgcatacccttctctgcgggaggccgcccttctggaagaagaggagggggtgtag

SEQ ID NO: 194642 - DNA, 954 bp, synthetic construct
  misc_feature 1..954: note = Description of Artificial Sequence: Synthetic coding sequence
  source 1..954: mol_type = other DNA
atgagcagcgagcagaagagccagcactgcaagcccgaggagggcgtggaagcccaagaagaagccctgggactggtgggagcacaggcccccaccaccgaagaacaagaggccgccgtcagttctagctctccactggtgccaggcactttggaggaagtgcccgcagctgaatccgctgggcccccccagagcccacaaggtgcaagcgccttaccgacaactatcagtttcacctgttggcgtcagcctaacgagggcagttcatcacaggaggaagagggtcctagcaccagcccggatgccgaatccctttttagagaagctctctcgaataaagtcgacgagcttgctcattttttgctgcggaagtatcgggctaaggagttagtaactaaagctgaaatgttggaaagagtgatcaagaactataagcggtgctttcccgtcatatttggcaaggccagcgaatctctgaagatgatcttcggcatcgacgtgaaggaagtggaccccgcaagtaacacctacaccctagtgacctgcctgggccttagctatgatgggctcctgggaaacaaccagatcttccccaaaaccggtctcctaataattgtgttgggtactattgccatggaaggagactccgctagcgaagaagaaatctgggaggagctgggagtgatgggagtgtatgatgggagggaacacaccgtttatggcgaaccgcgaaagctcttgacccaagattgggtgcaggaaaattatcttgagtaccggcaggttcctgggtcaaacccagctcgctatgaattcctctggggtcccagagcactcgcagagacatcctatgtgaaggtgctagagcacgtggtcagagtcaacgctcgcgtgagaatagcctatccatccctgcgcgaggccgcgcttctggaggaagaggagggcgtctag

SEQ ID NO: 194643 - DNA, 954 bp, synthetic construct
  misc_feature 1..954: note = Description of Artificial Sequence: Synthetic coding sequence
  source 1..954: mol_type = other DNA
atgagcagcgagcagaagagccagcactgcaagcccgaggagggcgtcgaggcccaggaagaggccctgggactggtgggtgcacaggctccgacgaccgaagaacaagaggcagcggtgtcatcctccagccctctggtgccagggacattggaggaggttcctgccgccgaaagcgcaggtccccctcagagtcctcagggagcttctgctctgcctacaaccatctcctttacatgttggagacagcccaatgaaggcagctcctcccaggaggaggagggaccgtccacatcacctgatgccgagtctcttttccgggaggccctttctaacaaagtcgatgagctagcacactttttattacgtaagtacagagcgaaagagttggtgacgaaggcagaaatgctggaaagagttatcaagaattacaagagatgctttcccgtcatctttggcaaagcaagcgaaagcctcaaaatgattttcggtattgacgtcaaggaggttgatcccgccagcaacacgtacaccttggtgacatgcctgggattatcatatgatggtttactgggcaataatcagatcttccccaagacagggttgctgatcatcgtgttgggaacgatagccatggagggggacagcgcatctgaagaagagatttgggaggagttgggcgtgatgggagtctacgacggaagagagcatacagtgtatggcgaaccgcgcaaactattgacccaggattgggttcaggagaattacttggagtatcgacaggtacctgggtccaacccagcgagatacgaatttttgtggggccctagagccctcgcagagacttcatacgtcaaggtgctcgagcatgtggtgcgtgtcaacgcccgggtgcgcatagcctacccctcactgagggaagctgcgcttctagaggaggaagaaggcgtgtag

SEQ ID NO: 194644 - DNA, 693 bp, synthetic construct
  misc_feature 1..693: note = Description of Artificial Sequence: Synthetic coding sequence
  source 1..693: mol_type = other DNA
atgagcagcgagcagaagagccagcactgcaagcccgaggagggcgtggaggcccaggaagaagccctaggcctcgtgggcgcacaggctccaaccactgaggagcaagaggccgccgtctctagctccagcccactcgtgcctgggactctggaggaagttcccgcagctgagagtgcagggccaccacagtcaccgcagggggcgagcgccctgcccactacgatctcatttacttgctggcggcagcctaatgagggctcctcgagccaagaagaggaaggcccctccacttctccggacgctgaatctctcttcagggaggcgctcagcaataaggtagatgaactggcccattttctcctaaggaagtatagggccaaggaactcgtgaccaaggccgaaatgttagaaagggtgataaagaactataagcggtgcttccctgttatttttgggaaggcgtcagagtcccttaagatgatcttcggtattgacgtcaaagaagtggacccagcctccaacacatacactttggtgacatgcctgggcctgtcttacgacggactcctgggaaataaccagatctttccaaaaaccggcttattgatcatagtgctgggtaccatagcaatggagggagacagtgccagcgaggaggaaatctgggaggagcttggtgtgatggggtag

SEQ ID NO: 194645 - DNA, 654 bp, synthetic construct
  misc_feature 1..654: note = Description of Artificial Sequence: Synthetic coding sequence
  source 1..654: mol_type = other DNA
atgagcagcgagcagaagagccagcactgcaagcccgaggagggcgtcgaagctcaggaggaggcgctagggcttgtgggagctcaggcgcccaccaccgaggaacaggaagccgccgtaagcagctcctctccattagtacccgggactctggaagaagtaccagctgccgagtccgccggccccccccagagccctcagggagcaagcgcccttcccaccactataagttttacttgttggaggcaacctaacgagggctcttcaagtcaagaggaggaaggaccatccaccagccctgatgccgagtcactcttccgcgaggctctgtcaaataaggtagatgagctcgctcattttctgctgcgtaaatatcgggctaaggagctggtgaccaaggctgagatgcttgagcgagtcatcaaaaactataagcgttgttttccagtcatctttggcaaagcaagtgagtccctgaagatgattttcggcattgacgttaaagaagtagatcccgcctcaaatacatatacgctggtaacctgtctgggcttatcgtatgatggcctcctggggaataatcaaatatttcctaagaccgggctactgataatagtgctgggtacaattgccatggaaggcgattctgcatag

SEQ ID NO: 194646 - DNA, 726 bp, synthetic construct
  misc_feature 1..726: note = Description of Artificial Sequence: Synthetic coding sequence
  source 1..726: mol_type = other DNA
atgagcagcgagcagaagagccagcactgcaagcccgaggagggcgtggaggcccaggaggaagcgctgggccttgtgggcgcacaggccccaactaccgaggagcaagaagctgccgtgtcgagttcatcacctcttgtccccggtaccctggaggaggttcctgctgctgagagtgcaggcccaccccagtcaccacagggagccagcgccctccccaccacaatatctttcacatgctggcggcagcccaacgagggttcatcttctcaggaggaggagggcccgtctaccagccctgacgcagagtcactcttcagagaagctctatccaataaggtggacgagttagctcacttcctgctgcgtaaataccgggcaaaagaactggtcacaaaggctgaaatgctcgaacgtgtaatcaagaactacaagcgatgtttcccggtaatctttgggaaggcatccgaatctctgaagatgatcttcgggatcgatgtgaaagaagtggatcctgcaagcaatacctacactcttgtgacatgcctagggcttagctatgacgggctgctgggtaataatcagatcttccccaaaaccggccttctaattattgtgctcggaacgatcgcaatggagggggacagcgcaagtgaggaagaaatctgggaggaattaggcgtaatgggagtatatgacgggcgggaacacactgtttatggttag

SEQ ID NO: 194647 - DNA, 519 bp, synthetic construct
  misc_feature 1..519: note = Description of Artificial Sequence: Synthetic coding sequence
  source 1..519: mol_type = other DNA
atgagcagcgagcagaagagccagcactgcaagcccgaggagggcgttgaggcacaagaggaagccttaggcctggtgggcgcacaggcgccaaccacggaagagcaagaggcagccgtgagctcaagcagtcccctggtccccggaactctggaggaagtcccggctgctgaatccgccggccccccccagtccccacagggcgcaagcgctctgccaaccactatcagcttcacttgctggcgccagccaaatgagggatcaagttctcaagaggaagagggccctagtacttcccccgacgctgagagcctcttccgagaagctctgtcgaataaggtggacgaactcgcccacttcctgctgaggaagtatcgggctaaggaactggtgactaaggctgagatgctcgagagagtgatcaagaattataaacggtgtttccccgttatcttcgggaaagcttctgaatcattaaagatgattttcggaatcgacgtgaaggaggtggacccctag

SEQ ID NO: 194648 - DNA, 726 bp, synthetic construct
  misc_feature 1..726: note = Description of Artificial Sequence: Synthetic coding sequence
  source 1..726: mol_type = other DNA
atgagcagcgagcagaagagccagcactgcaagcccgaggagggcgtagaagctcaggaggaagccctggggctggtgggggcccaggcgccgacgacggaagaacaggaggcagccgtttcttcttcctctccgctggtacccggcacactggaagaggtccccgccgcagagtccgctggcccgccacagtccccgcagggagcatcggccctgcctaccacaatatcatttacctgttggaggcagcctaatgagggctcatccagccaggaagaggagggacccagtactagcccagatgccgaatccctctttcgagaggctctaagcaataaagtggatgaactagcccacttcctgctccgaaagtaccgcgcaaaagaactggtgacaaaggcggagatgctggaaagggtgattaaaaactacaaacggtgcttccctgtgatcttcggcaaggcaagtgagtcactgaagatgatttttggcattgacgtgaaagaggttgaccccgcttccaacacatataccctcgtgacttgtcttggtctgtcttacgatgggctgctgggtaacaaccagatattccccaagactggactgcttataatcgtgcttgggactatcgcaatggagggagactccgcttcggaggaggaaatctgggaggaattaggcgttatgggagtctacgacgggcgcgaacacaccgtgtatggctag

SEQ ID NO: 194649 - DNA, 726 bp, synthetic construct
  misc_feature 1..726: note = Description of Artificial Sequence: Synthetic coding sequence
  source 1..726: mol_type = other DNA
atgagcagcgagcagaagagccagcactgcaagcccgaggagggcgtagaagctcaggaggaagccctcggactcgtgggagcccaagcacctactaccgaggaacaggaggctgctgtaagctctagctctcccctggtgccagggactcttgaggaggtccctgccgcagagagcgcaggacctcctcaatctcctcaaggcgcatcggctctacctaccaccattagctttacgtgttggcgccagcctaatgagggctcatcctcacaagaggaggagggacctagcacctcaccagacgccgagagtctgttccgtgaggcactcagtaacaaggtcgatgagctggcccattttctcttaagaaagtaccgggccaaagagctcgtgacgaaggccgagatgctggagcgggttattaagaactacaagagatgttttcccgtcatctttggtaaagcctccgaatctctgaagatgatcttcggcatcgatgtgaaagaagtggatcccgcgtccaacacctatacgttggttacttgtctgggtctgtcgtacgacggattactggggaacaaccagatctttcccaaaaccggtctcctgattattgtgctgggtaccattgccatggagggagactctgcctcggaggaggaaatttgggaggagctgggcgtgatgggcgtctacgatgggcgtgagcacaccgtgtacgggtag

SEQ ID NO: 194650 - DNA, 654 bp, synthetic construct
  misc_feature 1..654: note = Description of Artificial Sequence: Synthetic coding sequence
  source 1..654: mol_type = other DNA
atgagcagcgagcagaagagccagcactgcaagcccgaggagggcgtagaagctcaggaagaagctctcgggctggtgggcgcacaggctccgacgactgaagagcaggaggcggcggtatcaagctccagtccccttgtccctggcaccctcgaggaagtgcctgcggcggaaagtgcaggaccgccccagagccctcagggtgcctcggccctgccaacaactatatcctttacttgctggcggcagcccaatgagggcagcagtagtcaggaggaggagggcccgtcaacaagtcccgacgccgagtctttgttccgagaggctctgagtaataaggtggacgaacttgcccattttctgctgagaaagtatcgcgctaaggagttagtgaccaaggcagaaatgctggagcgcgtgataaaaaactacaagagatgttttcccgtgatttttggtaaggcaagtgaaagcttaaagatgatctttggaatcgacgttaaagaggtggacccggctagtaatacatacactctcgtcacgtgcctcggcctgtcttatgacggcctcctgggtaataaccaaatttttcccaaaacaggactcttaatcatcgtcctgggaactattgccatggaaggggattccgcctag

SEQ ID NO: 194651 - DNA, 726 bp, synthetic construct
  misc_feature 1..726: note = Description of Artificial Sequence: Synthetic coding sequence
  source 1..726: mol_type = other DNA
atgagcagcgagcagaagagccagcactgcaagcccgaggagggcgtagaggcccaagaggaggcacttggattggttggagcccaggctccaacgacggaggagcaggaggcggccgtttcctcatcctcgccacttgtccctgggactttggaggaagtccccgccgccgagagcgcagggccccctcagtcacctcagggggcctcagcactccctacaacaatatcctttacatgctggaggcagccaaatgagggttctagctcccaagaagaggaaggaccctctacgagtcccgatgctgagagcctgtttagagaagctctgtcaaataaagtagacgaattggcccactttcttcttcgcaagtacagagcgaaagagctagtgactaaagcggagatgttagagcgggtcattaagaattataagcggtgctttcctgtaatttttggcaaggcctccgagtctctgaagatgatcttcggtatcgatgtaaaggaggtggaccccgcttcaaatacttatacactggttacttgcctgggactgagctatgacgggctgttaggcaataatcagatctttccgaagacgggtctgctaataatcgttctcggcactattgccatggagggcgacagcgcaagcgaggaggagatctgggaagaactgggggttatgggcgtgtacgacggacgagaacatacagtgtacggctag

SEQ ID NO: 194652 - DNA, 945 bp, synthetic construct
  misc_feature 1..945: note = Description of Artificial Sequence: Synthetic coding sequence
  source 1..945: mol_type = other DNA
atgcccctggagcagcggagccagcactgcaagcccgaggagggccttgaagccaggggcgaagcgctcgggctcgtcggcgcccaggcacccgccacggaagagcaagaggccgcatcaagttctagtactctggtggaggtgaccctgggtgaagtgcctgctgccgagtccccggatccaccacagtccccccagggagcctctagccttcccaccactatgaattaccctttatggtctcagtcctatgaagactcatctaatcaagaggaggaaggccccagtacgttcccagacctggagtccgagttccaggctgctctgagccgcaaggtagctaaattggttcattttctgctgctgaaataccgggcacgtgagcctgtgacgaaagccgaaatgctcggatctgtagtgggcaactggcaatacttctttcctgtaatcttttctaaagcgtctgacagcttacaactggtgtttgggattgagctaatggaggtggatccaatcggccacgtgtacatatttgctacttgtcttggactctcctacgacggcttgctaggtgataaccaaatcatgcccaagacaggctttcttataatcatattagctattattgcaaaagagggtgactgcgcccctgaggagaaaatctgggaagagctctctgtactcgaggtctttgaaggacgagaggattctatttttggggatccaaaaaagctgctcactcagtacttcgtgcaggagaattatctcgagtaccggcaggtgccaggcagcgatccagcatgctacgaattcctctggggaccgagagctctcattgaaaccagttacgtgaaggtactccatcatatggtgaagatcagtgggggaccacggataagttacccattactgcatgaatgggctctgagagagggtgaagagtag

SEQ ID NO: 194653 - DNA, 606 bp, synthetic construct
  misc_feature 1..606: note = Description of Artificial Sequence: Synthetic coding sequence
  source 1..606: mol_type = other DNA
atgcccctggagcagcggagccagcactgcaagcccgaggagggcctcgaggcaaggggtgaagcacttgggctcgtgggcgcacaagcaccagctacggaggaacaggaggctgcctccagctcctcgaccctggttgaggtcaccctcggagaggtgcccgctgcagaatcacccgatcctccacaatctccccagggagcttcctccctcccaactaccatgaactacccattgtggagccagtcctatgaggacagtagcaatcaagaggaagaaggccctagtacatttcccgatctggaatctgaatttcaggctgctctgtccagaaaagttgcaaaactcgttcatttcttgctgctcaagtacagagctagagaaccggttaccaaggccgagatgctaggctcggtcgtgggtaactggcagtattttttccccgtgatcttctcgaaggcgtctgacagcctgcagcttgtgttcggaatcgaactcatggaagtggatcccatcggacatgtttacatttttgcgacctgtctcggattaagttatgatggcctattgggggataatcaaataatgcccaagacagggttctag

SEQ ID NO: 194654 - DNA, 708 bp, synthetic construct
  misc_feature 1..708: note = Description of Artificial Sequence: Synthetic coding sequence
  source 1..708: mol_type = other DNA
atgcccctggagcagcggagccagcactgcaagcccgaggagggcctcgaggcgcgcggggaggcgctggggcttgtcggagcccaggcgccagcaaccgaagaacaggaggcggcgtcctcttcttctactttggttgaggttaccctcggcgaggtccctgcggcggagtccccagatcctcctcagtccccccaaggcgcgtcctccctgcccaccacaatgaactaccccctgtggtcccagagttacgaagatagctccaaccaggaagaagaagggccctcgacatttccagacctggaatcggagttccaggcagcactaagtcgaaaagtggccaagctggtgcatttcttgctgctgaaatatcgggcacgggagcctgtgactaaggccgaaatgctagggagcgtagtgggcaattggcagtattttttcccagtgatctttagcaaggcatcagattctctccaactggtgtttggcatcgaactgatggaggtggatccgattggacatgtgtatatattcgccacttgtttggggctgtcttacgatggcctgcttggcgacaatcagataatgcccaaaacaggattcttgataataattctggcaatcatcgccaaggagggtgattgcgcacctgaagaaaaaatctgggaagaactgagcgtcctggaggtgtttgaaggtagggagtag

SEQ ID NO: 194655 - DNA, 957 bp, synthetic construct
  misc_feature 1..957: note = Description of Artificial Sequence: Synthetic coding sequence
  source 1..957: mol_type = other DNA
atgctgctgggccagaagagccagcggtacaaggccgaggagggcctccaggctcaaggggaggcccccggactcatggacgtgcagatcccgactgctgaagagcaaaaggcggcatcatcttcaagcactctgataatgggcactttggaggaagtaactgatagcggctctccttcccctccccaatctccagaaggggcatccagtagtctgactgtgacagattcaactctgtggtcccaatccgatgaagggtcttctagcaatgaggaagagggcccatctactagtccagatcctgcgcatctggaatccctcttccgggaggcactcgacgagaaggtggcagagctggtgcgcttcctgctgagaaagtaccaaattaaagaacccgtgacaaaagctgagatgctggaatctgtcatcaagaattacaagaaccactttcctgacatattttcgaaggcatcagagtgtatgcaggtgatatttgggatcgatgtgaaagaagttgatccagccggacactcctatatccttgttacctgcctgggactcagctacgacggcctcctgggcgatgaccagtcaacccctaaaacggggctgctgataattgtcttggggatgatcctcatggagggatcacgggctccagaggaggcaatatgggaggctctgagtgtgatgggcctctacgacggcagggagcactctgtgtactggaaacttagaaagctgcttacgcaagagtgggtgcaggagaactatctcgagtatcgccaggccccaggctccgatccggttaggtacgagttcctctgggggccccgggccttagcagagactagctatgtaaaagtcctggaacacgtagtccgtgtgaatgcacgagtaagaatttcctacccctcattgcacgaggaagcacttggtgaggagaaaggggtgtag

SEQ ID NO: 194656 - DNA, 957 bp, synthetic construct
  misc_feature 1..957: note = Description of Artificial Sequence: Synthetic coding sequence
  source 1..957: mol_type = other DNA
atgctgctgggccagaagagccagcggtacaaggccgaggagggcctccaggcccagggggaggctccagggctgatggacgtccagatcccgaccgccgaggaacaaaaggccgccagttcgagctcaaccctgatcatgggtactctggaagaagtaactgacagtggaagccctagcccgcctcagtctcccgagggggctagcagcagcttgacagtgaccgactcgactttgtggtcacagagtgatgaaggcagttcttcaaatgaggaggaaggtcctagcacatccccagatcctgcccacttggagtccctgtttagagaggcactggatgagaaggtggctgaattagttagattcctgctcagaaaatatcaaattaaggaacctgtcaccaaggcagaaatgcttgaaagtgtgattaagaactacaaaaaccacttcccagacatttttagcaaagcaagcgaatgtatgcaggtaattttcggcattgatgtgaaagaagtggatcccgcagggcacagttatatactcgtgacatgcttgggtctgtcatacgatgggctcctgggcgacgatcaaagcactcctaaaactggcctcctcatcattgttctaggaatgatcctaatggagggctcccgcgctcctgaggaggcaatctgggaggcactatcagttatgggcctgtatgatggtcgcgaacacagcgtgtattggaagctgcgaaagctgttaacacaagagtgggtacaggagaactatctggaatacaggcaggccccaggctcagaccctgtgagatatgaattcttgtggggacctagagccttggccgagacctcttatgtgaaagtgctagagcatgttgtaagagtgaacgccagagtgcgcatctcttatccatctctgcatgaggaggctctcggcgaggagaaaggcgtatag

SEQ ID NO: 194657 - DNA, 957 bp, synthetic construct
  misc_feature 1..957: note = Description of Artificial Sequence: Synthetic coding sequence
  source 1..957: mol_type = other DNA
atgctgctgggccagaagagccagcggtacaaggccgaggagggcttacaggctcaaggagaagcccccggccttatggatgtacagattcccacggcagaagagcagaaggctgctagttcttcctctacgctcataatgggcaccctggaggaagtgactgatagtggaagtccctctcccccccaatcccccgagggggccagctcctcactgacagtaacagactctacattatggagtcagagtgatgaggggagttctagcaacgaggaagagggcccaagtacctctccagacccggcacacttagaatctttattcagagaggctctggacgagaaggtggccgagttagtgcgcttcttgctccgcaaatatcagatcaaggagcctgttacaaaggccgaaatgttagagagtgtgatcaaaaactacaagaaccactttccagatatcttcagcaaagcctctgagtgtatgcaggttatctttggcattgacgtgaaggaagtggacccagctggacacagctatatcctcgtaacatgtctgggcctttcatacgatggactgctgggggatgatcagtctaccccaaagactggactgctgatcatcgtgctggggatgatacttatggaggggagccgggcgcccgaggaggccatttgggaagccttgtccgtcatgggcctttacgacgggcgcgagcattcggtgtactggaaattgaggaaactgttaacccaggaatgggtgcaagaaaactacttggagtacagacaggccccggggtcagatcccgttcggtatgagtttttatggggtccccgcgccctggccgagacttcttacgtaaaggttctcgagcacgtggtccgggttaatgctcgggtgcgcatcagctaccctagtctacacgaggaggctttgggtgaggaaaaaggagtgtag

SEQ ID NO: 194658 - DNA, 948 bp, synthetic construct
  misc_feature 1..948: note = Description of Artificial Sequence: Synthetic coding sequence
  source 1..948: mol_type = other DNA
atgagcctggagcagcggagcccccactgcaagcccgacgaggacttggaggctcagggagaagatctcggcctcatgggggcccaggaaccgacaggtgaggaagaggagaccaccagctcgtctgattcaaaagaggaggaggttagtgccgctggctcctctagtccaccccaaagcccccagggaggcgcctctagcagcatctccgtctattacacgttgtggagccagtttgatgaaggaagctccagccaggaagaggaggaacccagctcttcagtcgatcccgcccagttagaattcatgttccaggaggcgctcaaacttaaggtggccgagctggtccattttctgctacacaagtaccgggtaaaggagccagtgacgaaggcagaaatgctggagagtgtcattaaaaactataagaggtatttccccgttatcttcggaaaagctagcgagttcatgcaggtaatttttggcacagacgtgaaagaagtagatcctgctgggcattcttatattcttgtgaccgctctgggcctcagttgcgatagtatgctgggtgatgggcatagtatgcccaaagctgcattgctgattatcgtgcttggagtgatcctgaccaaggacaactgcgccccagaagaggttatttgggaggccctgagcgtcatgggagtttatgtgggaaaggagcacatgttttacggagagcctcggaagctgttgacacaggactgggtacaggagaactatcttgaatatcgccaagtccctggctctgaccctgcccactacgagtttctgtggggttcaaaggcccatgccgaaacatcttacgaaaaggtcatcaactacttagttatgctgaatgcccgagaacccatctgctacccttctctgtacgaggaagtgttaggcgaggagcaagaaggcgtctag

SEQ ID NO: 194659 - DNA, 345 bp, synthetic construct
  misc_feature 1..345: note = Description of Artificial Sequence: Synthetic coding sequence
  source 1..345: mol_type = other DNA
atgagcctggagcagcggagcccccactgcaagcccgacgaggacttagaggctcagggcgaggacttggggctgatgggggctcaggagcccactggggaggaagaagagaccacctctagcagtgacagtaaggaggaggaagtctccgctgctggatcctcctcccccccgcagtctccgcaaggtggtgcctcaagcagtataagtgtttactacacgctttggagtcagtttgatgaggggtcctcatctcaggaggaagaggagccgagctcatccgtggacccggcccaactggaatttatgtttcaagaggcgctcaagcttaaggttgcggaatag

SEQ ID NO: 194660 - DNA, 930 bp, synthetic construct
  misc_feature 1..930: note = Description of Artificial Sequence: Synthetic coding sequence
  source 1..930: mol_type = other DNA
atgagcctggagcagcggagcccccactgcaagcccgacgaggaccttgaagcccaaggcgaggacctggggttaatgggggcccaggaacctaccggcgaagaggaggagacgactagttctagcgatagcaaagaggaagaggtctctgctgctggctcttcatctccacctcagtctccacagggcggtgcaagcagttcaatctcagtgtattatacattatggtctcagtttgacgagggctcctcttctcaggaggaggaagagccttctagcagcgtggatccggcccagcttgaattcatgttccaagaggccctgaaactgaaggtggccgagctggtccattttctactgcataaatacagagttaaggaacccgtcactaaggccgaaatgctggagtcagtgatcaagaactacaagcggtactttcccgttatcttcggaaaggcatcagagttcatgcaggtcatctttggtactgatgtcaaggaggtggatccagcaggtcattcatacatcttagtgactgcactgggattatcctgcgactccatgctcggtgacggtcacagtatgcccaaagctgccctgctgatcatagtgctaggcgttattctgacaaaggacaattgcgcccctgaagaagtgatctgggaggccctctcagtcatgggagtgtatgtgggcaaggagcatatgttctatggggagccgagaaagttactgacgcaggactgggtccaggagaattacttggagtaccggcaggtgccaggctccgaccccgctcattacgagtttctgtggggcagtaaggcacacgctgagacatcctacgaaaaagtgattaactacctggttatgctgaacgcacgcgaaccaatttgctatccaagcctttatgaagaggttctggggtag

SEQ ID NO: 194661 - DNA, 591 bp, synthetic construct
  misc_feature 1..591: note = Description of Artificial Sequence: Synthetic coding sequence
  source 1..591: mol_type = other DNA
atgagcctggagcagcggagcccccactgcaagcccgacgaggacctggaggcacagggcgaggatctcgggctgatgggagctcaagagccgacaggcgaggaggaagagacaacttcctctagcgactccaaggaagaggaggtctccgcagcagggtcatcttccccacctcagagtccccaggggggggcaagctcctcaatctctgtgtattacactctttggagccagttcgacgagggcagtagctcccaagaggaagaagagccctctagctctgttgacccggctcagctggagttcatgttccaagaagctctgaagctgaaagtggctgagttggtacattttttactccataaatatcgggtaaaggagccagtgaccaaagctgagatgctcgaatcagtgattaagaactacaagcggtacttcccagtgatctttggcaaggccagtgaatttatgcaagtgatctttgggactgacgtgaaagaagtcgaccctgcaggccatagctacatcctggttacagctcttggcctgtcctgtgactctatgttgggagatgggcactcaatgccctag

SEQ ID NO: 194662 - DNA, 294 bp, synthetic construct
  misc_feature 1..294: note = Description of Artificial Sequence: Synthetic coding sequence
  source 1..294: mol_type = other DNA
atgagcctggagcagcggagcccccactgcaagcccgacgaggacctggaggcacagggggaggatctggggcttatgggtgctcaggaaccaactggcgaggaggaggagacaacatccagtagcgactccaaggaagaagaggtgagcgccgccggttcctcttcgcctccacagtcaccgcagggtggggcctcatcctctatcagcgtttattataccctgtggtcgcagttcgacgaggggtctagttctcaggaagaggaggaacctagctcctcagttgatccgtag

SEQ ID NO: 194663 - DNA, 948 bp, synthetic construct
  misc_feature 1..948: note = Description of Artificial Sequence: Synthetic coding sequence
  source 1..948: mol_type = other DNA
atgagcctggagcagcggagcccccactgcaagcccgacgaggacttggaggcccaaggcgaagacttgggcttgatgggagcacaggagcctaccggagaggaagaagagacgacgtcatctagtgactctaaagaagaggaggtgagcgctgccgggagttctagtcccccccagtcacctcagggtggcgcgtcaagcagcatcagcgtctactacaccctgtggagccagtttgatgaggggtcaagctctcaagaggaggaggaacctagttcgtctgtggatcctgctcaactcgagttcatgttccaggaggccctgaaactgaaagtggccgaactggttcacttcctgctgcacaaatatcgggttaaggagcctgtgacaaaggcagagatgctagaaagtgtgataaagaactataagcgctatttcccagtaatcttcggtaaagcttctgagttcatgcaggtgatttttggcactgatgtgaaggaagtcgatccagctggccactcgtatatcttagtcacagctctcggacttagttgcgatagcatgctaggcgatggacactctatgcccaaagccgctctattaattatcgtacttggggtgatcttaactaaggataactgcgctccagaggaagttatctgggaggcactgagtgtgatgggggtgtacgttgggaaagaacatatgttctatggggagccccgcaagctgctgacccaagactgggtgcaggaaaattacttggagtatcggcaggtgcccggatccgatcccgcccactacgagtttctatggggaagcaaggcccatgccgaaacgtcttacgagaaagtcataaattacctggtcatgcttaatgctagagaaccaatctgttacccgagtctgtatgaggaggtactgggcgaggaacaagaaggggtatag

SEQ ID NO: 194664 - DNA, 1044 bp, synthetic construct
  misc_feature 1..1044: note = Description of Artificial Sequence: Synthetic coding sequence
  source 1..1044: mol_type = other DNA
atgccccggggccagaagagcaagctgcgggcccgggagaagcggaggaaagctcgcgaagaaacacagggactcaaggtagcccatgccacggctgctgagaaagaagaatgccctagctcgtccccagtactaggtgatacaccaacttcctctcccgccgctggaattccccaaaaaccgcagggtgctccgcccaccaccacagccgccgccgccgtgtcctgtactgaatccgacgagggtgctaagtgtcagggagaggagaatgcctctttttcccaggccactactagtacagagtcttcagtgaaggatcccgttgcctgggaggctggcatgctaatgcatttcatcctccgaaagtacaagatgcgtgagcccatcatgaaagccgacatgctgaaagtggttgatgagaagtacaaggatcactttacagaaatactcaacggagcatctaggagactggagctcgtgtttggcctcgatcttaaagaggacaaccccagcggacacacgtatacattagtgtccaagctgaatctgaccaatgatggtaacctgagtaacgactgggacttccctcgcaatggcctcctcatgcctcttctgggcgttatcttcctgaagggaaactctgctactgaggaagagatatggaaatttatgaacgtgttgggggcctatgatggcgaggagcacctgatatacggcgaacccagaaaattcatcacacaggacctcgtacaggagaaatatttgaagtatgagcaggtgccaaatagcgacccacccaggtatcagtttctttggggcccaagggcatatgcagaaaccaccaaaatgaaggtgcttgagttcttggccaagatgaacggtgccacgcctagggactttccctcccactatgaggaggctctgcgcgacgaagaggaacgagctcaggtgcggagcagtgtgagggctaggagacgtaccaccgctaccacattcagagctagaagtcgcgctccgttcagtcggtcttcccacccaatgtag

SEQ ID NO: 194665 - DNA, 1044 bp, synthetic construct
  misc_feature 1..1044: note = Description of Artificial Sequence: Synthetic coding sequence
  source 1..1044: mol_type = other DNA
atgccccggggccagaagagcaagctgcgggcccgggagaagcggagaaaagcccgggaagaaacacagggtttgaaggttgctcacgcgacagctgcggagaaagaagagtgcccatcttcatcaccagtgttgggggatacccctacatccagcccagccgcaggcattccacagaaacctcagggtgcacctcccacaacaactgctgccgctgccgtgtcgtgtaccgagtctgatgaaggggccaaatgccaaggggaggagaacgcttcattttctcaggcaaccacatcgaccgaatcaagcgtgaaggatcctgtcgcttgggaggccggcatgctcatgcactttatactgaggaaatacaaaatgcgcgagcctataatgaaagcggacatgctgaaagttgtcgatgaaaagtacaaggaccacttcacggagatcctcaatggcgcaagtcgaagactcgagttggtgtttggcctggacctgaaagaggacaaccctagtggccatacatacaccctggtctctaagttaaatcttactaatgatggcaacctgagcaatgattgggacttcccaagaaatgggctgctgatgcctctgctcggcgtgatctttcttaagggcaatagcgctaccgaagaagagatctggaaattcatgaatgtccttggcgcctatgacggtgaggagcacctaatttacggcgagccgcggaagttcattacacaggaccttgttcaggagaaatatctcaaatatgaacaggtacctaattcggacccaccacgttaccaattcctgtggggacctcgagcctacgccgaaacaacaaaaatgaaggtcctggagtttctggccaaaatgaacggagcgacaccccgagattttcctagccattatgaagaggccctacgggacgaggaggagagggctcaggtccggtcatccgtgagagctcgcagacggacaacagccacaacctttcgagcaaggagcagggcccctttcagccgctcttcacatcctatgtag

SEQ ID NO: 194666 - DNA, 1044 bp, synthetic construct
  misc_feature 1..1044: note = Description of Artificial Sequence: Synthetic coding sequence
  source 1..1044: mol_type = other DNA
atgccccggggccagaagagcaagctgcgggcccgggagaagcggaggaaggcccgggaggagacccaaggacttaaggttgcccacgccacagctgccgagaaggaagagtgtccatccagcagcccagtcctcggggatactcccacctccagtcccgcagccgggataccacagaagccgcagggggcccctcccacaaccacagcggctgccgccgtttcatgtaccgaatcggacgaaggggccaaatgtcagggagaggaaaacgcctccttctcgcaggctaccacatccacagaatcgtccgtcaaggatccggtggcatgggaggcggggatgctgatgcactttatcctaaggaagtacaagatgcgcgagcctatcatgaaggccgacatgctcaaggtggtggacgaaaaatacaaagatcattttacagagatactgaacggcgcctcccgcagactggaactcgtctttggtctcgacctcaaggaggataatccttccgggcatacatacaccctcgtcagtaaacttaatctgaccaatgacggaaatcttagtaacgattgggactttccgcgcaatgggttactaatgccactcttgggcgttatcttcctcaaaggaaacagtgccaccgaagaggagatttggaagttcatgaacgtgctaggcgcgtacgacggagaagagcatttaatatacggcgagccccgcaaatttatcacccaggacttggtacaagagaaatacctaaagtacgaacaggtgcctaattctgatcctccacgctatcagttcttatggggacccagggcctatgctgagacaaccaagatgaaggtgttagaatttctagctaaaatgaacggcgccacgcctcgcgacttcccgagccattacgaggaggctttgcgggatgaagaggaacgggcccaggtgagaagctctgtgcgggcccggcgaagaactacagctaccaccttcagagctagatcaagggcacccttttctagatccagtcatcctatgtag

SEQ ID NO: 194667 - DNA, 1044 bp, synthetic construct
  misc_feature 1..1044: note = Description of Artificial Sequence: Synthetic coding sequence
  source 1..1044: mol_type = other DNA
atgccccggggccagaagagcaagctgcgggcccgggagaagcggcgacaggcccgaggaggtctggaggatctgattgatgccctggacattctcgaagaagaggaggaaagtcctcctagtgcaagtgcatgtctcaaggacgtgtttcaaagctcgctggacggtgctagcaacaacccccacggcttgcgggaagctcaatccaccagtacatctgctaccgccgcttctcatactagacaccccgagggggtaaatgaccaaatggaggagaggccaatctgcacacaggacctggaagccacagactcgtttcctaggggcccagtggacgaaaaggtgatcatcctggtgcactacctgctgtataagtatcagatgaaggagccaattacgaaagcggatatgctgcgaaacgtgacccaaatgagcaagagccagtttccggttattctttcacgtgcctccgagcacctggagctgatcttcgggctcgacttaaaggaggtggaaccaaacaagcacatttacgtgctggtgaacaagcttgacttgggctgtgatgcaaagctgagcgacgagactggggtgcctaaaacagggcttctaatgactgtcctgggaattatctttacaaatggcaattgtgtggctgaagaggaggtctggaaggtcttcaacaccatgggcctctacgatggcatcgaacacttcatgtttggcgaacctcgtaaattattaacaaaggacttagtgaaagaaaactacttggaataccagcaggttcccaactctgatccacccaggtatcagtttctctggggtccccgggcccacgccgagacaagtaagatgaaggttcttgagtttttggccaaagtgaacgacactgcaccctcagagttctcgaactggtacactgaagcgcttcaggacgaagaagaaagggcccgggctagggtggcagctaaagcccgggtcagcgccacggctggcgcaagatcaaaggtgaagagtagcaagagttcgcagctccagtag

SEQ ID NO: 194668 - DNA, 975 bp, synthetic construct
  misc_feature 1..975: note = Description of Artificial Sequence: Synthetic coding sequence
  source 1..975: mol_type = other DNA
atgagccaggaccaggagagcccccggtgcacccacgaccagcacctgcaaactttcagcgaaacacagtctctggaggtggcgcaggtgagcaaggcccttgaaaagacattattgagcagctcccacccgctggtgcccggcaaacttaaggaggctccagcagccaaagcggaatcgcccctggaggttccacagagtttctgttctagctccatcgccgtaacaactacgtcctcaagcgagtcagatgaagcatcgtctaatcaggaggaggaggacagccccagcagctctgaagatacctcagacccccgcaacgtccctgccgatgccctcgaccagaaggtggctttcctagtgaattttatgctacacaagtgtcagatgaagaagccgatcactaaggctgatatgttgaagattatcataaaagacgacgagtcacacttttccgagattctgcttcgggccagtgagcatttagaaatgatcttcggtctggacgtggtggaagtagaccctactacgcactgctatggtctcttcattaagttagggttgacctacgatggcatgctgtccggtgagaagggagtgcctaagacaggcctgctcataatagtcctaggcgtgattttcatgaaggggaatagggctaccgaagaggaggtatgggaggtgttgaaccttaccggggtttactccgggaagaaacactttatctttggagaacccaggatgctgattacaaaggatttcgtgaaggaaaagtacctggagtatcagcaagttgcaaacagcgatccggctcggtatgaattcctctggggaccacgcgccaaggctgaaacatccaagatgaaagtcctggagttcgtggcaaaagtccatggttcatacccccactcatttcctagtcagtacgccgaagcactgaaagaagaggaagaacgggctcgcgctcggatctag

SEQ ID NO: 194669 - DNA, 975 bp, synthetic construct
  misc_feature 1..975: note = Description of Artificial Sequence: Synthetic coding sequence
  source 1..975: mol_type = other DNA
atgagccaggaccaggagagcccccggtgcacccacgaccagcaccttcagactttctctgaaacccagagcctggaagtggcgcaggtcagcaaggccctcgaaaagacccttttgtcaagctcacacccattagtgccgggtaagctgaaagaagctcccgccgccaaagctgaaagtcccctggaggtgccccagagcttttgcagctcttcaatcgcagttactaccacttctagcagtgaaagcgatgaagcctcatcgaaccaggaagaggaagacagccccagttcctctgaggatacctccgatccaagaaatgtgcctgccgacgcgctggaccagaaagttgcgttcttggtgaactttatgctgcataagtgccagatgaagaagcccatcaccaaagcggacatgcttaagatcatcattaaagacgacgagtcccacttttcggaaattctcctgagggctagtgaacacttggaaatgatcttcggactggacgtcgtcgaagtagatccaactacccactgctacggactgttcattaaactcggcctgacttatgacggcatgttgtcaggggaaaagggcgtgccgaagaccgggctgctcatcatcgttttgggcgtgatttttatgaagggcaatagagccaccgaagaagaagtgtgggaagtgctgaacctgactggtgtgtacagcggaaaaaagcacttcatctttggagaaccacgcatgctgattactaaagattttgtcaaggaaaaatatcttgaataccagcaggtcgccaactctgatcccgccaggtacgaatttctctggggcccccgcgctaaagccgaaacctccaagatgaaggtccttgagttcgtggccaaggtgcacggctcctatccccactctttcccttcccagtacgcagaggctttgaaggaggaggaggagcgagctagagctagaatatag

SEQ ID NO: 194670 - DNA, 975 bp, synthetic construct
  misc_feature 1..975: note = Description of Artificial Sequence: Synthetic coding sequence
  source 1..975: mol_type = other DNA
atgagccaggaccaggagagcccccggtgcacccacgaccagcacctccagaccttctcggaaactcagtccttggaggttgcgcaggtttccaaggcactagaaaagaccctcctttctagctcgcaccctctggtgcctggtaagctgaaggaggccccggctgcgaaagcagagtctccactggaggtcccccaaagcttctgtagttcctccatcgcggttacaaccacaagctcctccgagagcgacgaggcctcgtctaaccaggaggaagaggactcgccctcttcttcggaagacacgtctgaccctcgcaacgtgccagccgatgctctggaccagaaagtagccttcctggttaatttcatgcttcacaaatgtcaaatgaaaaagcctatcacaaaggccgacatgctcaagatcataatcaaggacgacgagtcccatttcagcgaaatattactgcgcgcttcagaacatttggagatgatcttcggtttggatgtggttgaggtcgacccaaccacccattgctacgggctctttattaagctagggctgacgtatgacggaatgctgagtggggaaaagggcgtgcctaagaccggcttgctgatcatcgtgctgggagtcattttcatgaaggggaaccgagcaaccgaggaagaggtgtgggaagttctgaacctaactggcgtatactccggcaagaaacacttcatcttcggagaacctcgcatgcttataacaaaagatttcgtaaaagagaaatatctggagtaccagcaggtcgcaaactccgatcctgccagatatgaattcctgtgggggccaagagcgaaggccgagacatctaagatgaaggttctcgaattcgtggctaaggtgcatggctcatacccacactcatttccgagtcagtatgctgaggctctgaaagaagaagaggaacgggcccgggcccggatttag

SEQ ID NO: 194671 - DNA, 975 bp, synthetic construct
  misc_feature 1..975: note = Description of Artificial Sequence: Synthetic coding sequence
  source 1..975: mol_type = other DNA
atgagccaggaccaggagagcccccggtgcacccacgaccagcacctacagacatttagtgagacccagagcctggaggtagcccaagtgagtaaggccctagagaagaccctgcttagctccagtcatcctctggtaccagggaagttgaaggaagcacctgcggctaaggcagaatcacccttggaggtgccgcaatcattctgctcatcttcgatcgccgtcaccaccaccagtagcagcgagtccgatgaggccagctctaatcaggaagaagaggatagcccaagttcatcagaggataccagcgatccccgcaacgtgcccgctgacgcactggaccagaaggtggcttttcttgtgaacttcatgttgcacaagtgtcaaatgaagaaaccaatcacgaaggcagatatgctcaagattatcatcaaggatgatgaatctcacttctcagagatcctcctgcgggcaagcgaacacttggagatgatttttggtctcgacgtggtcgaggtggacccaacaacccattgttacggcttgtttattaagctcggacttacctatgatggaatgctctctggcgaaaaaggggtacccaagaccggattgttaattatcgtgctcggggtaatctttatgaagggtaatcgagccaccgaggaggaagtctgggaagtgttgaatctgacaggtgtttactcaggcaaaaagcatttcatattcggagagccacggatgctgatcacgaaggacttcgtgaaggagaagtatctggaataccaacaggtggccaatagtgatccagcgcgatatgaattcctctggggacctcgcgcaaaagcagaaacttccaaaatgaaagtgctggaattcgtagcaaaagtgcacggtagttatccccattcttttccaagtcagtatgccgaggctctgaaggaagaggaggagagggcaagagccaggatttag

SEQ ID NO: 194672 - DNA, 1071 bp, synthetic construct
  misc_feature 1..1071: note = Description of Artificial Sequence: Synthetic coding sequence
  source 1..1071: mol_type = other DNA
atgggcaccgaggcccagcccgtggtgaaggccgtgatcctgcactgtctgccctcctgtccccactcgtgcttgcttcctccaacccgcgttatcatgtcccaggaccaagaatctccccggtgtacgcatgaccagcatctccaaacgttttctgaaacccagagccttgaagttgcgcaggtctccaaagcgctggagaagaccctgctgagctcaagccatccattagtgcctgggaagttgaaagaagctcccgcagccaaagcagagagccccctcgaggtcccacagagtttctgcagctcttctattgccgttacaaccacgtcaagctctgaatccgacgaggcgtctagcaaccaggaggaggaggactccccctcttctagcgaagacacatccgacccacggaatgtgccagcagatgccctcgatcaaaaagtagctttccttgtgaacttcatgctccataagtgtcagatgaagaagcctattacaaaggctgacatgctgaagatcattattaaagatgatgagtcccacttctctgagatcctgctgagggcctctgaacacttggagatgatcttcggtctggacgttgtggaggttgatccgacaacccattgctatggcctgtttatcaagctgggtctgacgtatgacggaatgctcagcggcgagaaaggtgtgcccaagaccggattactcataatcgtgctgggcgtgatctttatgaagggtaatcgggcaaccgaagaagaggtgtgggaggtgcttaacctgacaggcgtatactcaggaaaaaagcatttcatctttggagaaccccgaatgcttattaccaaggatttcgtgaaggagaaatacctggaatatcagcaagttgcgaatagtgacccggcccggtatgagttcctgtgggggccccgcgccaaagctgagactagcaagatgaaggtcctggagttcgtcgccaaagtgcatggctcttatccacacagtttcccgagccaatacgccgaggctttgaaagaggaagaagagagagcccgagctcgtatctag

SEQ ID NO: 194673 - DNA, 996 bp, synthetic construct
  misc_feature 1..996: note = Description of Artificial Sequence: Synthetic coding sequence
  source 1..996: mol_type = other DNA
atgccccggggccaggccagcaagcggcgggcccgggagaagcggcgccaggccaggggtgaggaccaatgcctgggcggtgcacaggccacggcagctgagaaggagaaactcccttcctcgtcatcccctgcgtgtcagagcccaccacaaagttttccaaacgctgggattccacaagaaagccaaagggcgtcttacccttctagccccgcgtcagctgtgagcctgacatcaagtgatgagggcgccaaaggccagaagggtgaatcccctaatagcttccatggcccctcatctagcgagtccacagggcgggatctgctcaataccaaaactggggagctggtccagttcctgcttaacaaatatatcagaaaggaacctatcacgagggaggcaatgcttaaagtgatcaacagaaagtacaaacaacacttcccagagattcttaggcgcagtacagaaaatgtagaggtagttttcggtctgtacctgaaggagatggatccgtctcggcaatcctatgttctagtgggaaaactggactttcctaatcaggggagtttgtctgacggcggcggattcccgctcagtggattgctcatggtactgctgtcaactatttttatgcacggcaatcgggccactgaggaagagatgtgggagtgtctcaacgccctcggcatgtacaaaggacgcaaacacttcatctacggcgagccgcaggaacttgtgacaaaagaccttgttcgagaaggctatctggagtatcaacaggtgccttcaagcgaccctccaaggtatgagttcctgtggggcccacgggcccgggcagagacatccaagatgaaggtgctggaattcgtcgcgaagttgaacgacaccgtcgctagtacatataagtctagatatgaggaagccctgcgcgaggaggaggaacaggctagggcacgtgccgttgctagggactcagctagggcccgcgcctcatag

SEQ ID NO: 194674 - DNA, 1011 bp, synthetic construct
  misc_feature 1..1011: note = Description of Artificial Sequence: Synthetic coding sequence
  source 1..1011: mol_type = other DNA
atgccccggggccaggccagcaagcggcgggcccgggagaagcggcgtcaggcacgcggcgaagaccaatgtctcggtggcgctcaggccactgccgccgaaaaggagaagctacctagctccagctcaccagcatgccagagccccccccagtctttccctaatgctggtatcccgcaagaaagccagcgcgcctcttatccatcgtctccggcttccgcagtgagccttaccagttccgatgaaggcgccaagggccagaagggcgagagtcccaactcttttcacggccccagctcaagtgaatctacgggtagggacctcctcaatacaaagaccggagaactagtgcagttcttgctcaataagtatatccgaaaagagcctatcacgcgagaagctatgctgaaagtcataaatagaaaatacaagcagcactttcccgaaattctgagacgatctacagagaatgtggaggttgttttcggactgtaccttaaggagatggatcctagtagacagtcatatgtgctggtcgggaaacttgatttccccaatcaaggatccctttcagatggcgggggatttcccctctcagggttgctcatggtgctgctgtctactatcttcatgcatgggaaccgggccaccgaggaggaaatgtgggaatgcttgaacgcactcggcatgtacaagggacggaagcactttatctacggggagccccaggagcttgtcaccaaagatctggtgagggaggggtacttggaatatcagcaggttccttcttccgatccccctagatacgagttcctctggggacctcgcgctcgggctgagacaagcaagatgaaggtgctcgagtttgtggcaaagctcaatgacactgtggcctcaacctacaaaagtagatacgaagaggccctgagagaagaagaagaacaggcccgggctcgcgccgtggcccgtgatagcgctcgagcacgcgcgtcgcgatcctttcagccttag

SEQ ID NO: 194675 - DNA, 1011 bp, synthetic construct
  misc_feature 1..1011: note = Description of Artificial Sequence: Synthetic coding sequence
  source 1..1011: mol_type = other DNA
atgccccggggccaggccagcaagcggcgggcccgggagaagcggagacaggctcgaggagaggaccagtgcctcggcggagcacaagcaactgcagctgagaaggaaaaattgccgtccagttcaagccctgcatgccaatcgccccctcagagcttcccaaatgccggaattcctcaagagtctcagagggcctcatatcccagtagtcctgcttccgcagttagcttgacatcaagtgacgagggagctaagggtcagaagggtgaaagtcctaactccttccacggaccctcctcatcagaaagtaccgggcgggatctgctgaataccaagaccggggagctcgtccagttcctgctcaacaaatatattaggaaggaacccatcacaagggaggcgatgctcaaggtcatcaacaggaaatacaagcagcattttcccgagattctgaggcggagcacggagaacgtggaagtggtgtttggactctacttgaaggagatggatccgtcccggcaatcctatgtgctggttggtaaattagatttcccgaatcaaggttcactaagcgatggcggcggcttccctttatccggtctactgatggtgctactgagcacaatattcatgcacgggaaccgggcgactgaggaggagatgtgggagtgtctaaatgccttaggaatgtataagggacgcaagcatttcatctatggcgagcctcaggaacttgttactaaggatctggtgcgggaaggatacttggaataccagcaagtgcctagctccgaccctcctcggtacgagttcctttggggaccaagagcgcgggccgagaccagtaaaatgaaggtcctggaatttgtagccaagttgaatgatacagtggcatccacctacaagagccgatatgaggaggctctccgtgaagaggaggaacaagccagggcccgagcggtagccagggatagcgcacgggcacgcgcttccaggtcattccagccatag

SEQ ID NO: 194676 - DNA, 960 bp, synthetic construct
  misc_feature 1..960: note = Description of Artificial Sequence: Synthetic coding sequence
  source 1..960: mol_type = other DNA
atgccccggggccagaagagcaagctgcgggcccgggagaagcggagaaaagctcgtgacgagacacggggactgaatgttccccaggtgactgaggccgaagaggaagaggcaccctgttgttccagctccgtatcgggaggcgctgcttcctcaagtccggccgccggaattccacaggagccgcagcgggcaccaactacagcagccgccgccgccgcgggcgtatcctcaacgaaatcaaagaagggggccaagtcacatcagggtgaaaaaaacgcaagcagctctcaagcctctacaagcactaaaagcccctccgaagacccgctcacacgcaagagcggctcactagtccaatttctcttgtataaatacaaaattaagaagagtgtgactaagggcgagatgctgaaaattgtgggtaagaggtttagggaacattttcctgaaatcttgaagaaagcgtcagaaggcctgtccgtggtgttcggacttgagctgaataaggttaacccgaatggtcacacatatacctttattgataaggtggatcttaccgatgaggaatccctcttgtcttcctgggatttcccacgtcgcaagttactgatgcctttgctaggcgtgatatttcttaatggcaactccgctaccgaggaggagatttgggaatttctcaatatgctcggggtttatgacggcgaagaacactccgtgttcggtgaaccgtggaagctgataactaaagatctagtccaggagaaatacttagagtataaacaggtccccagcagcgatcctcccaggtttcaattcctgtgggggcccagggcttacgcggagacaagtaaaatgaaggttctggagtttttagccaaggtgaatgggacaactccttgtgccttccctactcattatgaggaagcactgaaggacgaggagaaagccggtgtatag

SEQ ID NO: 194677 - DNA, 1041 bp, synthetic construct
  misc_feature 1..1041: note = Description of Artificial Sequence: Synthetic coding sequence
  source 1..1041: mol_type = other DNA
atgccccggggccagaagagcaccctgcacgcccgggagaagcggcagcagacaagaggacagacccaggaccatcaaggggcccaaataacagccaccaacaagaaaaaagtttcctttagtagcccactgatacttggcgctacaatccagaagaaatcagccggacggtcgcgcagcgccctcaagaagccacagcgggccctcagcacaactacctctgttgacgtgtcatataagaagagttataaaggggctaatagcaagattgaaaagaaacagagcttttcccagggtctgtcctccaccgtccagtcacggaccgacccactcatcatgaaaacgaacatgttagttcagttccttatggaaatgtacaaaatgaagaagcccatcatgaaggctgacatgttaaagatcgtccagaaaagccataaaaattgtttccctgaaattttgaagaaggccagcttcaatatggaagtggtgttcggagttgacctgaaaaaggtggactcgaccaaagattcctatgtgctggtgtccaaaatggatctccctaataacggaaccgtgaccaggggaagagggttccccaagacgggcctgcttctcaatttgctgggagtcatctttatgaagggcaattgtgcaactgaagagaaaatctgggagttccttaataagatgcgtatctacgacggaaagaagcactttatttttggtgaaccccgaaagctcatcacccaggacctggtgaagctgaaatatttggaatatcggcaggtgccgaattcaaaccctgctaggtacgaattcctgtggggcccaagggcccacgcagaaactagtaagatgaaagtgttagaattttgggccaaggtcaataaaaccgtacccagtgctttccagttttggtatgaagaggccttgcgcgacgaggaagagcgtgttcaggctgcagcaatgctgaacgacggcagcagtgcaatggggcggaaatgttctaaagccaaggcgagtagctcttcccatgcctag

SEQ ID NO: 194678 - DNA, 1041 bp, synthetic construct
  misc_feature 1..1041: note = Description of Artificial Sequence: Synthetic coding sequence
  source 1..1041: mol_type = other DNA
atgccccggggccagaagagcaccctgcacgcccgggagaagcggcagcagacccgtggacagacccaggaccatcaaggagcccagatcacggccacgaataaaaagaaagtctccttctccagccctcttatcctgggggccactattcaaaagaagagcgctggcagatcccgatctgccctgaagaagcctcagagagctcttagtactacgaccagcgtggacgtgtcatataaaaagtcttataaaggcgcaaatagcaaaattgaaaaaaagcagagtttttcccaaggcctcagcagcacagttcagagccgcacggacccactgatcatgaagacaaacatgctggtgcagtttctgatggaaatgtacaaaatgaagaagcccattatgaaggccgatatgctaaagattgtccaaaagagccataaaaactgcttccccgaaatcctgaagaaagcatctttcaacatggaggtggtgtttggtgtcgacttaaagaaggtggactccaccaaagacagttatgttctagtatccaagatggacctgcccaacaatggaacggtgactcgaggccgaggcttcccgaaaactggcttactgctaaatctactgggggttatcttcatgaaaggcaattgtgcaactgaagaaaaaatctgggagttcctgaacaaaatgcggatctacgatggaaagaagcattttatttttggcgagcccagaaaacttatcacacaggaccttgtgaagcttaagtacctcgagtaccgtcaggtcccaaactctaatccagccagatatgagtttttgtggggcccaagggctcatgcggagacatccaagatgaaggtgctggagttctgggctaaggtcaacaagacagtgccgagcgcttttcagttttggtacgaagaagcacttagggatgaggaggagagagtccaggccgctgcaatgcttaacgatggctccagcgccatgggtagaaagtgttccaaagctaaggcaagtagctccagtcatgcctag

SEQ ID NO: 194679 - DNA, 1041 bp, synthetic construct
  misc_feature 1..1041: note = Description of Artificial Sequence: Synthetic coding sequence
  source 1..1041: mol_type = other DNA
atgccccggggccagaagagcaagctgcgggcccgggagaagcggcagaggaccagaggccagacacaagatctgaaggttgggcagcctacggctgcagaaaaggaggagagcccctcctctagttcttctgtgctgagggatacagctagttcttcgttggcctttggtattccccaggaaccacagcgagaaccaccaacaactagcgcagccgcggccatgagttgcacaggctctgataaaggggatgagtcccaggatgaggaaaatgcatcgtcgagtcaggccagcacaagcacggagaggtctctaaaggattccctgaccagaaaaaccaaaatgctcgtacagttcctgctatacaagtataagatgaaagaaccgaccaccaaggcggaaatgctgaagatcattagcaaaaagtataaagagcactttcctgaaatctttagaaaagtctctcaacgcacagaattggtttttgggttagccctgaaggaggtgaaccccactactcatagctatattcttgtgagcatgctcggccctaacgatggaaatcaaagctccgcttggacgctccccagaaacggcctactgatgccccttctgtctgttattttccttaatgggaattgtgcaagagaggaagaaatctgggagtttctgaacatgttaggcatctatgatgggaagcgtcacttaatttttggtgagccaagaaagctgattactcaggacctggtccaggaaaaatacctggagtaccagcaggtgccaaacagcgaccctcccaggtaccagtttctgtggggcccaagagcgcacgcagagacgagtaagatgaaggttctcgagtttctggccaaggtcaacgacacaacgcctaataatttcccccttctttatgaggaggccttacgcgacgaggaggagcgggccggagcccgacctagggtagcagccaggcggggaacaaccgctatgaccagtgcatactcacgtgccactagctccagtagctcccagcccatgtag

SEQ ID NO: 194680 - DNA, 828 bp, synthetic construct
  misc_feature 1..828: note = Description of Artificial Sequence: Synthetic coding sequence
  source 1..828: mol_type = other DNA
atgaccagcgccggcgtgttcaacgccggcagcgacgagcgggccaattcccgggatgaagagtatccttgttcttctgaagtgtctccgtctactgaatcatcctgtagcaacttcataaatattaaagttggcttactggaacaatttttgttatataaattcaaaatgaaacagcggatcctgaaggaggacatgctgaagatagtcaacccaagatatcagaaccaattcgccgagatccataggagagccagtgagcacatcgaggtggtgttcgccgtggacctgaaggaggtcaacccaacctgccacctgtatgacctggtgtctaaacttaaactgcccaataatggccgtattcacgtgggtaaagttctccctaaaaccggactgctcatgaccttcctcgtggtgatcttccttaagggtaactgtgctaataaagaggatacgtggaagttcctggacatgatgcaaatctacgatgggaaaaagtattatatttatggagagccacgtaagctgatcactcaggactttgtaagattaacctacctcgaatatcatcaggtcccctgcagctaccctgcccactaccagttcctgtggggccccagggcctacaccgagacctctaagatgaaagtgcttgaatatctggcaaaggtaaatgacatagcaccaggcgccttttcttcccagtacgaagaggccttgcaggatgaggaggagtcgccctctcagcgctgctctcgcaactggcactactgttctggacaggattgtcttcgggccaaattctcctccttcagtcagccttactag

SEQ ID NO: 194681 - DNA, 1224 bp, synthetic construct
  misc_feature 1..1224: note = Description of Artificial Sequence: Synthetic coding sequence
  source 1..1224: mol_type = other DNA
atgccccggggccacaagagcaagctgcggacctgcgagaagcggcaagagactaatggacagccccagggcctgaccgggccccaggcgacagctgagaaacaggaagaatcacacagctcttcttcttcgtcaagagcatgtctcggagactgcaggcgcagctcagatgctagcattccgcaggaatcacaaggggtgagtcctactggctcccccgatgctgtggtgagttattccaaaagcgatgtggctgccaacggtcaggacgaaaagagtcccagcacgtcccgtgatgctagcgtacctcaggagtctcagggcgcgtcaccgactggatcgccggatgccggcgtgtcagggtccaagtacgacgttgcagccaacggtcaggatgagaaaagtcctagtacatcacacgacgtttcagtgcctcaagagtctcagggggcttccccgacgggctctcccgacgccggtgtgtccggatctaagtatgacgtagccgcagaaggagaggacgaagagagtgtgagcgcatcacaaaaagctataatcttcaagaggctctcaaaggatgctgtaaagaaaaaggcctgcaccctcgcccagtttctgcagaagaaatttgaaaaaaaagagtctatcctgaaagctgatatgctgaagtgcgtgcgtagggaatataagccatacttcccacagattcttaatcgcacttcccagcatctggtggtggcctttggtgtagaactgaaagaaatggattcctcaggggaaagctacactctggtttccaaactgggactaccatccgaagggattctaagcggagacaacgctttgcccaaatcaggcttacttatgagtctactcgtggtcatttttatgaatggcaattgtgccacggaggaggaggtctgggaattcctcggattgctcggaatctacgacggtattttacactccatctacggcgatgcccggaagatcatcacagaggacttggtgcaggataagtatgtggtataccggcaagtatgtaatagtgatcccccttgctatgagttcctatgggggccccgggcatacgcagagacaaccaagatgcgcgtgcttcgggtgctggccgattcatctaatacttcgcctggactgtacccccacttatatgaggacgcccttatcgatgaagtggagcgggccttgagactccgagcatag

SEQ ID NO: 194682 - DNA, 3429 bp, synthetic construct
  misc_feature 1..3429: note = Description of Artificial Sequence: Synthetic coding sequence
  source 1..3429: mol_type = other DNA
atgggcgacaaggacatgcccaccgccggcatgcccagcctgctgcagagttcgagcgaatcaccccagagctgtccggaaggagaggactcgcagtctcccttgcagatccctcaaagcagccctgagtccgacgacacactttatcctctacagtccccgcagtcacggtccgaaggggaagattcctctgatcccctccagcgtcctccagaaggaaaggatagccagtcgcccctgcagatcccgcagagcagccccgaaggcgacgatacacagtccccacttcagaactcccagtcttcccccgagggaaaagactctctcagccccctggagataagccagtctcctccagaaggtgaagacgtgcagagccctctacagaatccagcctccagcttcttcagttccgccctgttgagcatcttccagagttcacctgaatcaacgcagtctcccttcgagggctttccccagagcgtgcttcaaataccagtttcggccgcctcttctagcaccttagtttctatcttccagagttcgccagagtcaactcagtctccattcgagggtttcccacagagtcccttgcaaattccagttagtcgatccttctcatctaccctcctctctatcttccagtccagcccagaacggacccagagtacgtttgaaggatttgcccagagtccactgcagatccctgtttctccctcaagcagtagtacactgttgtctctgttccagtcattttccgaaagaacccagtctacattcgaaggctttgcgcagtctagcctgcagattccagtgtctccaagctttagttctacattggtatcgctgttccagtcatccccagagcgcactcagtccacctttgaggggttcccccagagtcctctgcagattccagtgagcagcagcagtagttctacccttctgtcattattccaaagttctcctgagcgcacacatagtacctttgaagggttccctcaatctcttttgcagatcccaatgactagctcatttagtagtacactactgtcaatcttccaatcttcacctgaaagcgctcaatctacatttgaggggtttccacagtctccgctacaaatccctggttctccctcatttagctctactttgttgtctctcttccagtcctccccggaaaggacgcactccaccttcgagggttttccgcagtcaccactgcaaattcccatgacatcttccttctctagcactctcctttcgatcctgcagtctagccccgaatctgctcagtctgctttcgaggggtttccgcaatctccattgcagattcccgtctcctcctcattcagctacacccttctcagcctcttccaatcctcacctgagcgcactcatagtacttttgagggattcccccaatctccccttcagatccctgtgtcgtcttcgtcctcaagctcaactctgctgtctctttttcagagtagtccagaatgtacccagagtacatttgaggggttcccccagagtccattgcagatcccccagtctccaccggagggagaaaatacacactcccccttgcagattgtcccaagtctccctgagtgggaggactccctcagcccccactatttcccacaaagccctccccaaggcgaggactccctgagcccacactacttccctcagagccccccacaaggcgaggactctctgagccctcactactttcctcagtctccgcagggcgaagactcactgtccccacactactttccccagtcaccacctcagggggaggattccatgtccccactttatttcccccagagccccctacagggagaagaatttcagtcttcactccagagcccggtgtctatctgcagttcgtccacaccttcctcactcccacagagctttcccgagtcctcacagtctccaccggagggacctgtgcagagtccactgcactctccacagtccccccctgaggggatgcactctcagagccccctacaatcacccgagtctgcacccgaaggggaagactctcttagcccattacagatccctcagtctcccctggaaggagaggatagccttagcagccttcacttcccccagtcccctcccgagtgggaagacagcttgagccctctccatttcccgcagttcccacctcagggagaagattttcagtctagtctccagagccctgtatccatctgtagctccagtacgtcactgtccttaccgcagagcttcccggaatccccacaaagtccaccagaagggcccgcccagagtcccctccagcgcccagtcagtagttttttctcctataccctggcatcgctgctgcaatcctcacatgagagcccgcagtccccccccgaaggtcctgctcagtccccccttcaatctcctgtaagtagttttcccagctcaacatctagctcattgagccagtctagcccagtgtctagtttcccttcctccacatcttcctccctgagcaagagcagcccagaatccccgctgcaatcgccagttataagcttcagctctagcaccagcctcagtccattcagcgaagaatccagttcgcctgtggacgagtacaccagcagctctgatacactgctggaatctgattccctcacagacagtgagtccctcatagagagcgaaccgctctttacctacacactagatgagaaggttgacgagcttgctcggttccttctgctcaaatatcaggtcaagcagcccattacgaaagcagagatgctcaccaatgttatatctagatataccggctatttcccagtaatttttaggaaggccagggaatttattgagatactttttgggatctccttgcgcgaagttgatcccgatgattcgtacgtgttcgtaaatactctggatttaaccagcgaaggatgtctgtcggacgagcagggtatgtctcagaaccggctacttattctgattctgtcaatcatattcatcaaaggcacgtacgcctctgaagaggtgatttgggatgtgctctctggaataggggtcagggctggcagggagcactttgccttcggcgaaccacgggagcttttgaccaaggtgtgggtccaggagcactacctagagtaccgggaagtgcccaactctagtccacctcggtatgagttcctgtggggaccccgcgcccattccgaggtgatcaaaaggaaagtcgtggagttcctcgctatgctgaagaacacagtgccaattacattccccagcagttacaaggatgcccttaaagatgtcgaggagcgcgcccaggcgattattgacacaaccgacgacagcactgcaacagagagcgcatcctcttctgtcatgtctccatcattctcctcagagtag

SEQ ID NO: 194683 - DNA, 354 bp, synthetic construct
  misc_feature 1..354: note = Description of Artificial Sequence: Synthetic coding sequence
  source 1..354: mol_type = other DNA
ggcgacaaggacatgcccaccgccggcatgcccagcctgctgcagtcatcttcagaatctcctcagtcatgtccagagggcgaggatagccagtctccattacagatcccagtctctcccagcagctccagcaccctgctgtctcttttccagagtttttcagagcgcacccaaagcactttcgaaggttttgctcagagctcgctccaaatcccagtgagtccgtccttttcttccactttggtcagcctgttccaatcatcacccgagcggactcagtccaccttcgagggttttccccagagccccctccaaatccccgtgtccagctcttcatccagtacactgctgtag

SEQ ID NO: 194684 - DNA, 357 bp, synthetic construct
  misc_feature 1..357: note = Description of Artificial Sequence: Synthetic coding sequence
  source 1..357: mol_type = other DNA
atgggcgacaaggacatgcccaccgccggcatgcccagcctgctgcagtccagtagcgagtcccctcagtcttgtcccgagggtgaagactcccaatcacccttgcagatcccggtctcgccctcctcctcttcaactctgctgtccctcttccagtcgttttcagaacggacgcagtctacttttgagggctttgcacaatcctccctgcaaatcccagtcagtcccagtttcagcagcaccctggtttcactctttcagtctagtcccgaacggactcagagtacattcgagggtttcccccagagcccgttgcaaatacccgtctcgtcatcatcttcctccactctactgtag

SEQ ID NO: 194685 - DNA, 630 bp, synthetic construct
  misc_feature 1..630: note = Description of Artificial Sequence: Synthetic coding sequence
  source 1..630: mol_type = other DNA
atgctgaccaacgtgatcagccggtacaccggctacttccccgtgatcttccggaaggcgcgagaattcatagagatattgttcggaatcagcctgcgggaggtggaccctgacgactcgtatgtatttgttaacacactggatctaacgtcagagggctgcctgtctgacgaacagggcatgtcccagaaccgtctcttaatcttgatcctgtctatcatcttcatcaaaggcacatatgctagtgaggaggttatttgggatgtattgtcaggcatcggagtaagagctggtcgtgaacacttcgcctttggggagcctagggaactactgaccaaggtgtgggtccaagagcactatttagagtacagggaggtgcccaattcatctcctcctcgatacgaattcctctggggtcctcgggcacactccgaggtgattaagaggaaggtggtcgaattcctagcaatgttaaagaacacagtcccaattacatttcccagtagttacaaggatgcactgaaggatgtggaggaaagggcccaggccatcattgatacaactgacgactcaactgccactgaaagcgcttcttcaagcgtgatgagtccctcattcagctccgagtag

SEQ ID NO: 194686 - DNA, 1122 bp, synthetic construct
  misc_feature 1..1122: note = Description of Artificial Sequence: Synthetic coding sequence
  source 1..1122: mol_type = other DNA
atgccccccgtgcccggcgtgcccttccggaacgtggacaacgactctcccaccagcgtggagctggaagattgggttgacgctcagcatccgacagacgaagaagaggaggaggcttcgtccgcttctagcaccttatacttggtcttcagcccctccagcttcagcaccagttcaagcctgattctgggggggcccgaggaggaggaagtgccgtccggtgtgatcccgaatttaaccgaatccatacctagttccccccctcaaggacccccacagggtcctagccagtcccccctttcgagctgttgcagctccttctcatggtcctctttttcggaagaaagtagttctcagaagggcgaagatactggcacatgccaaggcctgccggactcagagagctctttcacgtatactcttgatgagaaagtggcagagttggtagagtttttgctcctgaagtacgaagcagaagagcctgtcacagaagcggaaatgctgatgatcgtcattaaatacaaagactattttccagtgatcttaaaacgagcgagagagttcatggaactgctcttcggactcgctctgatcgaagtcgggcctgatcacttttgcgtcttcgccaatacggtggggctcaccgatgaagggagcgacgatgaagggatgcccgagaatagcttgttaattatcatcctgtctgtcatttttattaaaggtaattgtgctagcgaagaggtcatttgggaggtccttaacgccgtgggggtctacgcgggcagggagcattttgtgtacggagaaccccgcgaactgttgactaaggtgtgggtgcagggtcactacctggaatatcgagaggtgcctcattcctcccctccctattatgaattcctatgggggccaagggcacacagtgagtcaatcaaaaagaaagtgctcgaattcctcgctaagcttaacaatacagtgcccagtagttttccttcttggtacaaagatgctctgaaggatgttgaggaaagagtgcaggctaccattgacaccgcagatgacgccactgtcatggctagtgagtccctgtcagttatgtcctctaacgttagcttctctgaatag

SEQ ID NO: 194687 - DNA, 1932 bp, synthetic construct
  misc_feature 1..1932: note = Description of Artificial Sequence: Synthetic coding sequence
  source 1..1932: mol_type = other DNA
atgctgctgccctgccactgggtgctggacgccaccttcagcgacggaagtctcggccagtgggtgaagaatacctgcgccacatacgctctcagtcccgtggtcttacctccccaaccacagccacgaaagaaagcaactgataaggattacagtgccttccacctgggccatttgcgcgaggtcaggctgttcctgaggggcggcacttccgatcagcgcatggatagcctggtcctgtgccccacctacttcaagttgtggaggactctgtccggatctcctggcctacaacttagtgatctgcacttcggaagtcagccagagggcaagttctctctgcggcgggctgtgagcgtcaagcagagagaggagccccaggactggcccctgaatgagaagcgcaccttgtggaaagattccgacctgccaacatggcgaagggggaccgggtacactctgtccctccccgctgtttccccaggaaagagactttggggcgaaaaagctggctctttacccgagagcgagcctctctttacatatactctcgacgaaaaagttgacaagctcgtccagttcctccttttgaaataccaggccaaagagccattgacccgcgcggaaatgcagatgaatgtgatcaatacctacactggatacttccctatgatcttcaggaaagctagggagtttatcgagatcctgttcggcatttcactcaccgaagttgatccggatcacttttatgtctttgtgaatacattagatctgacttgcgagggatctctgagtgacgaacaggggatgccccagaatagattgctgattctcatcttgtctgtcatcttcatcaagggcaactgcgcttccgaagaggttatatgggaagtactaaatgccataggcccctggtccgccttggctggcttcgctgatgtcctgagtcgcctggcgttatgggaatctgagggcccagaagccttctgcgaggagtcaggtttaagaagcgcagagggatcggtcttagatttggctaaccctcagggcctggctggtcaccggcaggaggacggtcgaaggggactgactgaggccagcccccaacagaagaaaggaggcgaggatgaggatatgccagcagccgggatgcccccgctgccccagtcccctcctgagatccctccgcaaggtccccctaagatctccccacaaggacccccgcagagccctccccagtctcctctggattcatgttcttcacctctgttatggacaaggctcgatgaggaatcctcaagcgaagaggaagataccgcaacctggcacgctctccccgaaagcgaatcactccccaggtatgccctcgatgaaaaagtcgcagagttggtgcagttcctgctgctgaaataccagactaaggagccagtaaccaaggcggagatgctgacaactgtgatcaagaagtacaaggattatttcccaatgattttcgggaaggctcacgagttcatcgagttaatttttggcatcgccctgacagacatggaccccgataatcactcttacttcttcgaggacacgttggacctgacgtatgagggttccttaattgatgatcagggtatgcccaaaaattgcctgcttatcttgatcctgagcatgatattcataaaagggtcatgcgtgcctgaagaggtcatttgggaggtgctgagcgctatcggccccatccagcgccctgcccgcgaggtcctagagttcctcagtaaactgtcgagcattatcccgagtgcctttccttcctggtacatggacgctctgaaggacatggaggaccgcgcgcaggcaatcattgacacgaccgacgatgcgaccgccatggcttcagcgtccccatcagtgatgagcacaaacttttgcccggagtag

SEQ ID NO: 194688 - DNA, 801 bp, synthetic construct
  misc_feature 1..801: note = Description of Artificial Sequence: Synthetic coding sequence
  source 1..801: mol_type = other DNA
atgcccgccgccggcatgccccccctgccccagagcccccccgagataccaccacagggacctccaaaaatctccccccagggaccaccgcagtcccccccgcagagccctctagactcgtgtagtagcccccttctgtggacccgacttgatgaggaatctagtagtgaagaagaagatacagctacttggcacgccctgcctgagtctgagagcttgccacgttacgcgctggatgagaaagtggcggaacttgtccagtttttgctgttaaagtaccagaccaaagaacccgtcacgaaggccgaaatgctaacaacggtaatcaagaagtacaaggactacttccccatgatctttggaaaagcccacgagtttatcgagttgatatttggcattgccctgaccgacatggatcccgacaaccattcatattttttcgaagataccttagacttaacctacgaagggagcctgatagatgaccagggcatgcccaaaaattgtctgctcatcctgatcttatctatgatatttattaagggtagttgtgttcctgaggaggtaatctgggaagttctgtcagctattggtgtctgcgcaggtcgggagcattttatttatggtgacccaagaaagctgcttacgattcactgggtgcagaggaagtatctggaataccgagaagttcctaattccgctccacctagatatgagttcctttggggacccagagcacactctgaagcttcaaaacgatctctgcgcgtgtttattcaggcgatccaataccacccttag

SEQ ID NO: 194689 - DNA, 381 bp, synthetic construct
  misc_feature 1..381: note = Description of Artificial Sequence: Synthetic coding sequence
  source 1..381: mol_type = other DNA
atggacaccggccagctgcagctgagccgggagcggagccccggcgcaggtcaacaggctagacgcgaactgtgcgggcggatcgctatcagccaacacggggggaaggcgcaggcatcaccatcacactccttgttaagccctctagataaaaccgacggggagccttggtctgccctggccggatttgctgatgtgctttcccgccttgccctttgggagtccgaaggtcccgaagccttctgcgaggagtctggattgaggtcggctgaaggtagcgtgttggatttggcaaatccccaaggaaagggaccaaagggcgagctaagagacttcgcaccacgtactgaggaagccccggtttgccccgccctgccctag

SEQ ID NO: 194690 - DNA, 1041 bp, synthetic construct
  misc_feature 1..1041: note = Description of Artificial Sequence: Synthetic coding sequence
  source 1..1041: mol_type = other DNA
atgcccctgttccccaacctgccccggctgagcttcgaggaggactttcaaaatccaagtgtaactgaggacctcgtggacgcccaggattcaattgatgaagaggaggaagatgccagttcaacttcctcgtcgtcattccactttctcttccccagctcatcctctctttctagcagcagcccgctgtcctctcccctgcccagcaccctgattctcggggtacccgaagacgaagacatgccagcagctggtatgccaccactcccacaatcaccccccgaaatccccccccagggtcctcccaagatttccccgcagggtccccctcagagtccaccgcagagcccgctggatagctgttccagcccactgctttggacacgcctcgacgaagagtcttcctctgaggaggaagacactgctacctggcacgccctgccggagtccgagtccctcccacgctacgcgctggatgagaaagtggctgagctggtgcaattcctcctgctgaaataccaaacaaaagagccagtgacaaaagcagaaatgcttacaaccgtgatcaagaaatacaaagactatttccccatgatttttggcaaggcccacgaatttattgagctgattttcggtatagcacttacagacatggatcctgataatcattcctattttttcgaagatacactggatctgacctatgaagggagtctgatcgatgatcagggaatgccgaaaaactgcctgctgatactgatcctcagcatgatcttcataaagggtagctgtgtccctgaggaggttatctgggaagtcttgtccgctatcggcgtgtgcgctgggcgtgagcactttatttacggggatccccggaagctccttaccatccattgggttcagcgcaagtatctggaatatcgggaagtccctaactccgccccacccagatacgaatttctctggggaccaagagcacattcggaggccagtaaaagatcactgagggtattcatccaagccatccagtaccacccatag

SEQ ID NO: 194691 - DNA, 1041 bp, synthetic construct
  misc_feature 1..1041: note = Description of Artificial Sequence: Synthetic coding sequence
  source 1..1041: mol_type = other DNA
atgcccctgttccccaacctgccccggctgagcttcgaggaggactttcagaacccaagcgtgaccgaggacttggtcgacgcacaggactctatcgacgaagaagaggaggacgcctccagtacctcttcatcctcgtttcatttcctgttcccttcttctagtagcctgtccagctcatcacccctgagtagtccgctgccctcgacactgattctaggggtgccagaggatgaggatatgcctgccgccggtatgccacccttgccacagtctccaccagagatcccgccgcaaggccctccaaaaatatccccccagggccccccacagtccccacctcagagccctcttgacagctgtagttccccacttttgtggactcggttagatgaggagagtagttcggaagaagaggataccgcaacctggcacgccttgccagaatctgaaagcttgccacggtatgcgctcgatgaaaaggtggccgaactggtccaatttttgctcttaaaatatcagaccaaagaacccgtgaccaaggccgagatgctcaccaccgtgataaaaaaatacaaagactacttccccatgattttcggcaaagcccatgaattcatcgagttgattttcgggatcgccctcaccgatatggatcctgataatcacagctatttctttgaggacactctggacctgacctatgagggttctcttattgacgatcagggtatgcccaaaaactgccttctgattctcatcctgagtatgatttttatcaagggcagctgcgtgccagaagaggtcatttgggaggtgctgtctgcaataggagtatgcgctggacgtgaacacttcatctatggggatccccgcaaattgcttacaatccactgggtgcagcgtaagtacctcgaataccgagaagtgccgaattcagcccctcctagatacgagttcctctggggtccacgtgcccactccgaggcatcgaagaggtcgttgcgggtgtttattcaggctatccagtaccacccctag

SEQ ID NO: 194692 - DNA, 2337 bp, synthetic construct
  misc_feature 1..2337: note = Description of Artificial Sequence: Synthetic coding sequence
  source 1..2337: mol_type = other DNA
atggcccagaagatggactgcggcgccggcctgctgggcttccaggcagaagcttccgtggaagattctgcccttttgatgcagacgctaatggaggctatccagatcagcgaagcacctcctacgaaccaggctaccgccgctgcaagcccacagtcatcccagcctcctacagctaatgagatggctgatatccaggtcagtgccgccgctgctcgaccaaagtccgccttcaaggtgcaaaacgccacaacgaaagggcccaatggcgtgtatgacttcagccaggcccataacgccaaagatgtcccaaacacacaacctaaagcagcttttaaatcccagaacgctacccctaaaggtccgaacgccgcctatgatttttcacaggctgctacaaccggtgagttggcggctaacaagtccgagatggccttcaaagcccagaatgccaccaccaaagtgggcccaaacgccacctacaacttcagccaatccctgaatgcgaatgatttagcaaacagcagacccaagactccgtttaaagcatggaatgacacaacgaaggcccctacggccgacacgcagacccagaatgttaaccaggccaagatggctactagccaggctgatattgagactgatcctggcatcagcgagccagatggtgcaaccgcgcagaccagcgcggatggttctcaggcacagaatctcgagtccaggacgattataagaggtaagagaactaggaagattaacaatctcaatgttgaagagaattctagcggagatcagcgacgcgcaccactagccgcaggaacctggagaagtgcgcccgtgccggttacgactcaaaatcctccaggagctccacctaatgtgctgtggcagacaccactggcctggcagaatccctcagggtggcagaatcagactgctcggcagaccccgcccgcccgtcaatcgccgccagcacgccagaccccgccggcctggcagaatcccgttgcatggcagaatcctgtaatttggcctaaccctgttatttggcagaaccccgttatatggcccaatcccatagtgtggccgggaccggtcgtgtggcccaatcccctggcctggcaaaatcctcccggctggcagacacctcccggatggcaaacccctcccggttggcagggccccccagattggcagggtcctccagattggcccctcccgccagactggcccctgccccctgattggccgctccctactgattggccattgccccccgattggatacctgccgactggcctattccaccagattggcaaaaccttcggcccagccccaacttacgcccgtcacctaatagtagagcctcccagaacccaggagccgctcaacctcgcgacgtggctcttctgcaagaaagggctaataagcttgtaaagtaccttatgctgaaggattacacaaaagtgccgatcaagcggagtgagatgctgagggacattattcgggagtataccgatgtttatcctgagatcatcgaaagggcatgtttcgtcctggaaaaaaaatttggaattcagctgaaggaaatcgataaagaagagcatctgtacatcctgatctccactccggaaagcttagctggaattctagggacaacgaaagataccccaaagttaggcctgctgctggtgattcttggagtcatcttcatgaatgggaatagagctagcgaggcggtgctgtgggaagccctccgaaagatgggcttgagaccgggagtacgtcatccactgctcggcgacctgcggaagcttttgacctacgagttcgtcaagcaaaagtacctggactacaggcgggttccgaattcaaaccctccagagtacgagttcttgtggggcctgaggtcttaccacgagacctccaaaatgaaggtgttgcggttcatcgcggaggttcagaagcgtgacccccgggattggaccgcccagttcatggaggcggccgacgaggcgctggacgcccttgacgctgcagcggctgaagcggaagcccgggcagaggctcgcaccagaatgggtatcggcgacgaagccgtctcaggaccttggagttgggacgatatcgaattcgaacttctgacttgggatgaagagggggattttggcgatccatggtccaggataccattcacgttctgggcaagataccaccagaacgcccgctcacgctttccccagactttcgccgggcccattatcggccccggtggaactgcttcagccaatttcgcagccaattttggtgctatcggctttttttgggtggagtag

SEQ ID NO: 194693 - DNA, 2505 bp, synthetic construct
  misc_feature 1..2505: note = Description of Artificial Sequence: Synthetic coding sequence
  source 1..2505: mol_type = other DNA
atggcccagaagatggactgcggcgccggcctgctgggcttccagaaccctgacgcttgtagggcagtctgtcatccgctgccccaacctccagcttctaccctgcccttgtccgctttcccgacgctttgtgaccctccatattcacagcttcgggatccccccgcagtactgagttgctattgcaccccactcggcgcctcacctgccccggccgaagcaagcgtagaggacagtgccctgctgatgcagacactaatggaggctatacagatctccgaagccccacccactaaccaagcgacagccgcagcgtcgccccaatctagccaacccccaacagctaacgagatggctgatatccaggtctctgccgcagcagcacgccctaagtccgccttcaaagtacaaaacgccaccacaaagggaccaaatggggtttacgactttagtcaggcacataatgctaaggatgtgccaaatactcagccgaaggccgcattcaagagtcaaaatgccacaccaaagggccccaacgcagcctacgacttcagccaggcggctactaccggggagctagctgcaaataagagcgaaatggctttcaaagcgcagaatgctacaacaaaggtcggtcctaacgcaacttacaatttcagccagtcactcaacgctaatgacctagccaacagtcgtcctaaaacaccctttaaggcctggaatgatacaacgaaagccccaactgctgacacacaaacacagaatgtgaatcaggcaaagatggcaacctcacaagccgatatagagacggaccctggcatttctgaaccggatggtgctactgctcagaccagtgccgacggatcgcaagcacagaatcttgaatctcgcaccatcatacggggaaaaaggacccgcaagattaacaatctgaatgtcgaagagaactctagtggggatcaacgaagagccccgctcgcggccgggacatggagatccgctcccgtgccagtcactacacagaatccgcctggcgccccccctaatgtgctttggcagacacccctcgcttggcagaatccaagcgggtggcagaatcagaccgctagacagaccccccctgcacggcagagcccacccgcaagacagacacctcctgcctggcagaaccccgtggcctggcaaaacccggtgatctggcccaacccggtgatttggcaaaaccctgtgatttggccgaacccaatagtgtggccaggaccagtggtgtggcctaatccgctcgcctggcagaaccctcccggctggcagaccccaccgggctggcaaactccaccaggttggcagggaccacccgactggcaggggcccccggactggccactccccccagattggcccctgcccccagactggccgctgcctactgattggcctctgccccccgactggataccggctgactggcccattcctcccgactggcaaaatttgagacctagccccaatctgcgaccaagccccaattccagagcctcccagaatccaggagccgcacaaccgcgagatgtggctttgctccaggagcgcgccaataaattagttaaataccttatgttaaaggactacacaaaggttcccatcaagaggtcagagatgttacgtgacattatccgcgaatacaccgacgtctaccctgagatcatcgagagagcctgttttgtactcgaaaagaaattcgggattcagcttaaagagatcgataaagaggagcatctgtacatattgatctccactccagagtccttagcaggcattctgggaaccaccaaggataccccaaagctgggcctgctcctggtgattctcggggttatctttatgaatgggaatcgcgcttccgaggctgttttgtgggaagcgcttcgcaagatgggattaaggcctggggtgcggcatccgctgctgggcgacctgcgcaaactactgacatacgaattcgtgaagcagaagtacctggactatcggcgggtgcctaactcaaatcctcccgaatacgaattcttgtggggcctgcggtcatatcacgaaacatctaaaatgaaggtacttagattcattgcggaggtccagaaacgtgatcctcgggactggaccgcccagttcatggaagccgcggacgaagctctagacgcactcgatgccgcagctgccgaggcagaggcccgcgctgaagcccggacgcggatgggaattggtgacgaggcagtgagtgggccctggagctgggatgacattgaattcgaactgctaacatgggatgaggagggagatttcggggacccttggtcccgaattcctttcaccttctgggctagatatcaccagaatgccaggtctcgcttcccacagacctttgccggtcccataataggcccagggggaacagccagcgcaaactttgcggccaacttcggagcaatcgggttcttttgggttgagtag

SEQ ID NO: 194694 - DNA, 2337 bp, synthetic construct
  misc_feature 1..2337: note = Description of Artificial Sequence: Synthetic coding sequence
  source 1..2337: mol_type = other DNA
atggcccagaagatggactgcggcgccggcctgctgggcttccaggcagaggcctctgtcgaagacagcgccctcctgatgcagacgctgatggaggccatccagattagcgaggcacctcccaccaaccaggctaccgctgctgctagtcctcagagtagtcagccaccgacggccaacgagatggcggatatacaggtaagcgctgccgctgcacgcccaaaatcggcgtttaaagttcagaatgccacaacgaagggcccaaatggggtttatgatttttctcaggcccataacgccaaagacgtacccaacactcagcccaaggccgccttcaaatcacagaatgccacccccaagggccctaatgcagcgtacgacttcagccaggccgcaacaactggcgagctggcagctaacaagagtgagatggccttcaaggcccagaacgccaccacaaaagtcggacctaatgccacttataacttttctcaatcactgaatgcgaacgacttggctaattcacgccctaaaaccccttttaaggcctggaatgataccacgaaagcacctacggcagacacccagacacagaatgtgaatcaggctaagatggccacctcacaggccgacatcgagacagacccaggcatttcagagccggatggcgctacagctcagacatccgcggacgggagccaggctcagaacttggagtcgagaacaatcatcagagggaagaggacgcgtaaaatcaacaatctgaacgttgaagaaaattcttcgggagatcaacgaagggctcccctggcggccgggacatggcgatctgcccctgttcctgtcaccacacaaaatccacccggggccccgcccaatgtgttgtggcaaacacccctcgcttggcagaacccatcaggctggcagaaccaaactgcgagacagacgcctcccgctagacagagcccacccgcccgccagaccccacctgcctggcagaatcctgtggcctggcagaatcccgttatctggccaaacccggttatatggcagaaccctgtaatatggcctaatccgatcgtctggccaggtccagtcgtgtggcccaacccactggcctggcagaatcctcctggatggcagacgcctcctggctggcagacacctccagggtggcagggacctccagactggcagggtccaccagattggcccctccccccagattggcccttgcctccggactggcccctgccaacagactggcctctacccccagactggattcccgctgattggcccatcccccctgattggcaaaatctgcggccatcaccaaacctgaggcccagccccaacagccgcgccagtcagaatcctggggcagcccaacctcgcgatgtcgcactgctgcaagaaagggctaacaagctggtgaaatatttgatgctgaaggattatacaaaggtgcctattaagcggagtgaaatgctccgagacatcatccgggaatataccgacgtgtacccagaaatcattgaaagagcatgcttcgtactcgaaaagaagtttggcattcagctgaaggaaatagacaaggaggagcacctctacattctcatttcaacccctgagtcactggctggcatccttggaaccacaaaggacacccccaagctgggactgctgctggtgatcttaggtgttatatttatgaatggaaaccgggcctccgaagcagttttgtgggaagccctgagaaagatgggactgaggccaggtgtgcgacaccccctcctgggcgatctgcgtaagttgttaacatacgagtttgtgaagcaaaaatatctggattaccggcgtgtgccaaacagtaacccacccgaatacgagtttctgtggggcctacgatcataccacgagacaagcaagatgaaggtgttgagattcatcgcggaagtgcagaagagggatcctagggactggacagcccagtttatggaggccgccgatgaggctcttgatgccctggatgcagcagccgcggaagccgaggccagggccgaggccagaacacggatgggaatcggggacgaggctgtgtccggcccatggtcttgggacgatatcgagtttgaattattgacatgggatgaagagggggattttggcgatccctggtctcgtataccattcacattctgggcccgttaccaccagaatgcgcgtagccggttcccccagacttttgctggtccaatcatcggccccggcggaacggcgagtgcaaacttcgctgccaattttggagctatcggattcttctgggttgagtag

SEQ ID NO: 194695 - DNA, 2337 bp, synthetic construct
  misc_feature 1..2337: note = Description of Artificial Sequence: Synthetic coding sequence
  source 1..2337: mol_type = other DNA
atggcccagaagatggactgcggcgccggcctgctgggcttccaggctgaggcgtctgtagaggactctgccctactgatgcagactctgatggaggccatccaaattagcgaggcccctcctaccaatcaggcaacagcggctgcgtctccccagtctagtcagccacctacagccaatgaaatggcagatatccaggtctctgcagccgccgcacgtccaaaatccgcgttcaaggtgcagaatgccactacaaaagggccaaacggcgtctacgatttctctcaggcgcacaatgctaaggatgtgccgaatacccagcctaaagctgcgttcaagtcacaaaacgctacacccaagggtcctaacgcagcctacgatttttcccaggcagcgacaacaggggagttggctgctaacaagtccgagatggccttcaaagctcagaatgccactactaaggttggccctaacgcgacctacaacttctctcagtctctcaatgctaacgatcttgcgaattccagaccaaaaactccttttaaggcctggaacgacaccaccaaggctcctacagctgatacgcagacccagaatgtgaaccaggccaagatggccacatctcaggcggacatcgaaacagatcccgggatttccgagcccgatggcgctaccgcccagacatccgccgacgggagccaggcacaaaatctagaaagccgcaccattatccgcggtaagcgcacaaggaagatcaataatttgaacgtggaagagaactctagtggagaccaacgacgggcccctctagcagcaggcacctggaggtctgcacctgtgcctgtgacaactcagaatccacccggcgcacccccaaacgtcctgtggcaaacacccttagcttggcagaaccctagcggatggcagaaccaaaccgcccgccaaacacccccggcacgccaaagcccaccagccagacagacccctcctgcatggcagaaccctgtcgcgtggcagaacccagttatatggcccaacccagtaatatggcaaaaccctgtcatctggcccaatcctatcgtatggccagggccagttgtttggcctaatccactggcttggcagaatccgccgggttggcagactcctcccggatggcagacacccccgggctggcagggccctcccgattggcaaggacccccggactggcctctgccaccagactggcccctgcccccggactggcctctccctactgattggccgctgcctcctgattggatccccgctgattggccgatcccaccagactggcagaacctccgtccctccccaaaccttaggccttcccccaactccagggccagtcagaaccccggagccgcccagcctcgggatgttgccctgctgcaggaaagggcgaataaactggtgaagtacctgatgctaaaagattacacaaaggtcccaattaagaggtccgaaatgctacgagatatcatccgggagtacacagacgtataccccgaaatcatcgagcgtgcttgcttcgtgctcgaaaagaagtttggaattcagctgaaagagatcgacaaggaggaacacctgtatattctgattagcacgcctgaaagcctggccgggatcctgggtacgacaaaggacacccccaaactggggctcctcctagttatactaggcgtcatctttatgaatggcaaccgggcttcagaggcagttctgtgggaagcgctccggaaaatgggcctccgtcctggcgtgcggcatcctctcctgggagacctccgcaaattgctgacatatgagttcgtaaagcagaaatatttagattaccgacgggtgcctaacagtaatcctcctgagtacgagttcctttggggccttcggtcctatcatgaaacgagcaagatgaaggtgttgagatttatagccgaagtgcaaaaaagggatcccagggattggacagcccagtttatggaggccgcggatgaagctctcgacgccctggacgctgccgcggctgaggcagaagccagggctgaggcgcggacccggatgggtattggagacgaagccgtgagcgggccttggtcctgggatgatatagagtttgaactgctgacatgggacgaagaaggagacttcggcgatccctggtctagaatccccttcaccttctgggcacggtaccatcagaacgctcgaagccgctttccgcagacctttgccggccccataattggtcccggaggcaccgcatctgccaacttcgcggcaaactttggagccatcgggttcttctgggtggaatag

SEQ ID NO: 194696 - DNA, 414 bp, synthetic construct
  misc_feature 1..414: note = Description of Artificial Sequence: Synthetic coding sequence
  source 1..414: mol_type = other DNA
atggcccagaagatggactgcggcgccggcctgctgggcttccaggcggaggcttctgtggaagactcagcactgctgatgcaaaccctgatggaggcaatacagatatcagaggccccaccaacaaatcaggccacagccgcagcctctccccagtctagccagccccccaccgcaaacgagatggctgatattcaggtcagcgccgccgcggcccggcctaagtccgcatttaaggttcagaacgcaaccacaaaaggccccaacggagtctatgatttctcacaaagtctgaacgcaaacgatttggcgaatagccggcctaagacacaagtgagcctcaacctcacagtacagctacatcgacatcagcagatggtccctagactcagaatttggagccccggccagtag

SEQ ID NO: 194697 - DNA, 3942 bp, synthetic construct
  misc_feature 1..3942: note = Description of Artificial Sequence: Synthetic coding sequence
  source 1..3942: mol_type = other DNA
atgagcggctggcggtacctgatctgcgtgagcttcctgctgaccatcctactggaactcacatatcaggggcctcctgtgccggcttcttcaagtactaagttactcatgacttcctattcgatgaggtctacagttgttagccgctacgctcatacgctggtgacatccgttctgttcaaccctcacgccgaggcccatgaagccattttcgacctcgatctgccacacttggcctttatctccaacttcactatgaccatcaataataaggtatacattgcggaagtgaaggagaagcaccaggccaaaaagatatacgaagaggcgcaccagcagggaaaaacagctgcccatgtcggtattcgggatcgcgagagtgagaagtttcggataagcacatcactcgcagcagggacagaagtaacattttccttagcttacgaagagctgctccagcgtcaccagggccaataccaattagttgtctctcttcgtcctggtcagttagtgaagaggctgtctatcgaggtgactgtaagcgagagaaccggcattagctacgtccacattcctccgctaagaacgggccggttaaggaccaacgcccacgcttctgaagtcgactcacctcccagcacacggatagaaaggggggagacatgcgtgagaatcacatattgccccacccttcaggaccagtcatccatcagtggctctggaatcatggctgacttcctcgtccagtacgacgtggtcatggaggacatcattggtgatgtgcagatctatgatgattactttatacattacttcgccccacgggggctgccccctatggagaagaatgtggtgtttgtgatagatgtgtcgtccagcatgtttggtacaaagatggagcagaccaaaacggcaatgaatgtcattctgagtgacctccaggccaatgattacttcaatattataagtttctccgacacagtgaacgtgtggaaggccggggggtccattcaggccacaatccagaatgtgcactcagcgaaggactatttacattgcatggaggctgatggctggactgatgtgaattctgctttgctcgcagcagcaagcgttcttaaccacagcaaccaggagcctgggagaggtccatccgtgggcagaatcccacttattatattcctgaccgatggcgaacccaccgccggcgtcacaacaccatccgtgatcctctcaaatgttagacaggccctgggccacagagtgagcctatttagtctagcattcggcgacgacgcagactttacactccttcgaaggttgagtctcgaaaacaggggtattgcgaggaggatctatgaagacacagacgcagccttgcagctgaaagggctgtacgaagagatctccatgccgcttctggcagatgttcgtctcaattatttgggaggattggtcggcgcttccccctgggcagtgttccccaattatttcggggggtcagagctggttgttgctggacaggtgcagcccggtaaacaagaacttggcattcatctagccgcccgaggcccaaaggatcagttactggtggctcatcatagtgagggtgccaccaacaactcccagaaggcatttgggtgcccaggagagccagcccccaatgtggcacactttatcagacgcctctgggcctatgttaccattggagagctgctggacgcccatttccaggcgcgtgacactactacccgacacctgttagctgctaaggtgctgaacctcagtcttgaatacaacttcgttacaccactaacaagtcttgtgatggtccagccaaaacaggcatcagaggaaactcggagacagacatctacatccgcgggacctgacacaatcatgccatcttcttcatccagacacggcctgggtgtctctacagcacaacctgccctggtgccgaaggtgatcagcccaaagagcaggccagttaaaccaaagttctacctctccagcacgaccactgcatcaacgaagaagatgctgagttccaaggaactcgagcccctgggtgagtcaccccatactctgagcatgccaacatatcccaaggccaaaatccccgcgcagcaggactccgggactcttgctcaaccaactctgcgcactaaacctacgattctggtcccaagtaatagtggaaccctgctgccattgaaacccggatctctgagtcaccagaatccagacatcctgccaacaaactccagaactcaagttcccccggtcaaacctgggattcctgcctcacccaaagctgatactgtcaaatgcgtcacgcccctccattctaagccgggcgccccctcacacccacagctgggtgcgttgacctctcaggcacccaaaggactcccgcagtcacgccctggagtctctacactgcaggtgcccaaataccccctgcacacaagaccccgcgtgcctgccccaaagactcggaacaatatgccccatctgggaccaggcatcctccttagcaagacaccaaaaatactcctttcgctcaagcctagcgctccccctcaccaaatcagtacgtccatttcactgtccaaaccagagacccccaatcctcacatgcctcagacccccctgcccccaagacctgatcggcctcgacctcctctaccagagagcctatccacttttcctaataccatctctagcagcacaggcccttcctctactaccactaccagcgtccttggcgagccattgcctatgccattcacccctacgcttcctccgggacgcttctggcaccagtacgatctgcttcccggcccccagcgcaccaggcaggtgcttggaccctccaggccaggagtgcccaccatgtccctcctcaacagcagccggcctactcccgagggatcaccacctaatctacccatcctgctgccatcgtccatcctcccagaagccatctccctgctactcttacccgaggaacttgaactcttaagtgagtccatggtggagtccaaatttgtggagtcattgaacccacccgcattttacacattcctgacgccagatgaggatggaagtccaaattgggatggaaattcagaggagatactcggtggtgcagggggcagtatggagtcgcagggttcttctgtcggccttgccaagggtactttaccttccatcttcaccttctcttcttccgtagatggggatccacattttgtgattcagatccctcacagcgaagagaagatctgctttacccttaatggccatcccggggacctgctccagctgatcgaagatcccaaggcaggactccatgtgtcaggcaagctgctgggagcacctccaaggccagggcataaagaccaaacccggacctattttcagattattacagtgactacggataagccccgggcttatacaataaccatcagccgatcctccatcagccttcggggcgagggaaccctgagattatcctgggaccagcccgccctccttaagagaccccagctagagctgtatgtggccgccgctgcccgcctgactctccgactgggaccttacctggagttccttgtgctaaggcaccggtacaggcatccctctacgctgcaactgccccaccttggcttctatgtagctaatggatcgggtttatctccttccgcccggggactgatcggccagttccagcacgccgatatccgactggtgactggtccaatgggcccctgcctcagacggcaccacgggccagatgtgcccgtaatcctgggcaaaagattgcttaaggacagtcctcgtcttttaccacggtgggcttcctgctggttagtcaagaggtcccatgtggagttgttgctgggccacccgtacctctcttacgttctgtag

SEQ ID NO: 194698 - DNA, 1767 bp, synthetic construct
  misc_feature 1..1767: note = Description of Artificial Sequence: Synthetic coding sequence
  source 1..1767: mol_type = other DNA
atgagcgacaccagcgagagcggcgccggcctgacccggttccaggctgaggcttccgagaaagatagcagctcaatgatgcagactcttctgacagtcacacagaacgtggaggtccctgagactcccaaggccagcaaagcaaccgaagtgtctaagacacccgaggctagagaggcccctgctacacaggctagttctacaacacagttgacagatacccaggtgctggccgcggagaacaagtctctggctgccgacactaaaaaacagaacgccgatccacaggctgtcaccatgcccgctactgaaaccaagaaggttagccatgtagctgacaccaaggtaaacactaaagcccaggagacagaagcagcccccagccaagcacctgctgacgagcccgagccagagtctgcggcggcgcagtcccaagagaatcaggatacaaggcctaaagtgaaagcgaagaaagcccggaaggtgaaacaccttgatggtgaagaggacggctcatccgatcagtcacaggcgagcggaacaacagggggcagacgggtatcaaaggccctgatggcatcaatggcaaggcgtgctagtagggggcctattgcattctgggccagacgggcttcacggactcggctggctgcttgggctcggcgcgccctgctgtcccttcgcagccctaaagcacggagagggaaagctcgcaggagggcagccaagctgcaatcctcacaggagccagaagccccaccgccgcgggacgtggcgttgctgcagggaagggctaacgacttggtgaagtatctacttgctaaggaccagacaaagatccccatcaaaagatctgacatgctgaaagatatcatcaaagagtatacagacgtgtatcccgagattattgagcgtgcgggctactccctggagaaggttttcggcattcaactaaaagagatagataagaatgaccatctatatatcctgttgtctacgctggagccgacagacgctggaatactagggaccactaaagattctcctaaactgggactccttatggtgctgctgagcatcatctttatgaacggtaatcggagctctgaggctgtcatctgggaagttctccggaaactcggactgagacccggcatacatcactccctgttcggggacgtgaaaaaactaatcaccgacgagtttgtgaaacagaaatacctcgattatgccagggtgcccaacagcaacccgccagaatatgagtttttttgggggcttcggagttactacgagacttccaagatgaaagtacttaaatttgcatgcaaggtgcagaaaaaggacccaaaggagtgggctgcccagtacagggaggccatggaggctgatctgaaagccgccgccgaggcggcagccgaggcgaaagcgcgggccgagatcagggcaagaatgggaattggattaggcagtgagaatgccgctgggccctgcaactgggacgaggccgatatcggcccatgggcaaaggcccggatccaggcgggggcagaagccaaggccaaggctcaggagagcggcagcgcttctacaggggcctcgaccagcaccaacaactccgcatccgcgtccgcatccacctctggagggttttccgctggggcttctctaacagcaacactaacttttggactgttcgccgggctgggaggcgccggggcgagcacctcaggcagctccggcgcgtgtgggttcagttataagtag

SEQ ID NO: 194699 - DNA, 1653 bp, synthetic construct
  misc_feature 1..1653: note = Description of Artificial Sequence: Synthetic coding sequence
  source 1..1653: mol_type = other DNA
atgtggcggagccagcggcaccggcggccccagcgggtgagcaagacacccgaggcccgcgaagccccagcgacccaggcatcttcaacaacccagctcacagatacccaggtgctggcggccgagaataagtcacttgccgccgacacaaagaagcagaatgctgatccacaggccgtgaccatgccagccacagagacgaagaaggtgtcgcatgtggccgacacaaaagttaatactaaggcacaggagaccgaagctgccccatcccaggcaccagctgatgagcccgagccagaatccgccgctgcccagagccaagagaatcaggatacacgaccaaaagtcaaggctaaaaaagctaggaaggtaaaacatctcgatggcgaagaggacgggtcttcagatcagtcccaggccagcggaacaacaggcggccggcgcgtgtccaaagccttaatggccagcatggcccgcagggcaagcaggggaccaatagccttctgggcacggcgtgcaagtcgcactcgactcgccgcttgggctcgccgtgccttactctcgttgcggtcccctaaagctcgcaggggaaaagcgcggcgacgggcagctaaacttcagtcttcacaggaacccgaggcccccccaccccgcgacgttgccttgctgcaggggcgagccaatgacctcgtgaaatatctcctcgccaaagaccagaccaagatccctataaagaggtctgatatgctgaaggatatcatcaaagagtacaccgacgtttaccccgagattattgagcgggcaggatactctctcgagaaggtctttgggatccagttgaaggagatagacaagaatgaccatttgtatattctgttatccacattagaaccaactgatgccgggattttgggcaccacaaaggacagccctaagctgggcctcctcatggtgctgttatcaattattttcatgaatggcaatagatccagcgaggccgttatatgggaagttctcaggaaactgggcctccgaccaggaatccaccactccctatttggtgacgtcaaaaagttgattacagacgagttcgtgaaacagaagtatctggattatgcaagggtgccgaacagcaacccgcctgagtacgaattcttctgggggctgcggtcatattatgaaacgtcgaaaatgaaggttctaaaatttgcatgcaaggtgcagaaaaaagacccaaaggagtgggccgcacaatacagggaggctatggaggcagatctcaaagccgccgctgaagcggcagctgaagcaaaagcacgcgccgaaatccgagcccgcatggggatcggcctgggctctgagaatgcagctggtccatgcaactgggacgaggctgacatcggcccatgggccaaagctcgcatacaggccggcgccgaagccaaggcaaaagcccaggaaagtgggtctgcatccaccggcgcttcaacctccactaataattcagcttcggcttctgcctctacatccggaggcttcagtgcgggggctagcctcacagcaaccttgacatttggattgttcgcaggactgggaggggctggagctagcacttctggcagctctggcgcatgtgggttcagctacaaatag

SEQ ID NO: 194700 - DNA, 1821 bp, synthetic construct
  misc_feature 1..1821: note = Description of Artificial Sequence: Synthetic coding sequence
  source 1..1821: mol_type = other DNA
atgagcgacaccagcgagagcggcgccggcctgacccggttccaggccgaggcttcggagaaggatagctctagcatgatgcagacattgctgacagttacccagaacgttgaggtgcccgagacacctaaagcctcaaaagctctggaagtcagcgaggacgtcaaagtttcaaaagcttctggcgtgagcaaggccaccgaagtgagtaagacacctgaagcccgagaagctccggccactcaagcctccagcaccacacagctaaccgatacccaggtgctagccgccgaaaacaagagcctggctgcagatacaaaaaaacagaatgccgacccacaggctgttaccatgcctgcaacagagactaagaaagtgtctcatgttgcggataccaaggtcaatacaaaggcccaagagactgaggctgcccccagtcaggctccagccgatgaaccggagcccgagagcgccgcagcccagagtcaggagaaccaggatacccgtcctaaggtcaaagcgaagaaagcccgaaaagtgaagcacctcgacggcgaggaggatgggtcctccgatcaatcacaggcctccggaacgacaggcggcaggagggtctcaaaggcgctcatggccagcatggccagaagagcttcgagaggccccattgctttctgggcacggcgcgccagtaggaccaggcttgccgcctgggctcggagggccttattgtccctgaggagtccaaaagctcggagaggcaaagccagaagacgagcggcaaagctccagagcagtcaggaaccagaagcccctcctcctagagacgtggctctcctgcagggacgagccaacgacctggtcaaatacctgctcgcaaaggatcagacaaaaataccaatcaaaaggtctgacatgctcaaggacatcattaaggagtataccgacgtgtatcctgagatcatcgagagagctggctattcactggaaaaggtctttggcattcagctcaaagagatcgataagaacgaccacctctatatcctgctgtctacattggaaccaaccgacgccggaatactgggaacaacaaaggattcccccaagcttggtctactgatggtgctactgagcatcatcttcatgaatggtaatcgtagctctgaagccgtcatctgggaggttctgaggaagttaggcttacgcccgggaattcaccacagcctcttcggggatgtcaagaagctgatcacagacgagttcgtgaagcagaagtatctggattacgcccgcgtgcctaactcaaacccaccagaatatgagtttttctggggattgaggagttactatgaaacaagcaagatgaaggtgctcaagtttgcatgtaaggtacaaaagaaagatccgaaagaatgggctgctcaatatagagaagccatggaggcagacctcaaagccgcggccgaagccgccgctgaagctaaggcgcgcgccgaaattcgagctcgaatggggatcggcctgggatccgagaatgccgccgggccatgcaactgggatgaagccgacatcggaccctgggccaaagcaaggattcaggctggggcggaggcaaaggcaaaggcacaggaaagcggcagcgcttcgacaggtgcgtccacctcgacaaataacagtgcatcagcgtctgctagtacatcagggggcttcagtgcaggggccagcctgaccgccaccctgactttcggcctctttgcaggcttaggcggggcaggggcctccacctccggaagttcaggagcctgcgggttctcatacaaatag

SEQ ID NO: 194701 - DNA, 1821 bp, synthetic construct
  misc_feature 1..1821: note = Description of Artificial Sequence: Synthetic coding sequence
  source 1..1821: mol_type = other DNA
atgagcgacaccagcgagagcggcgccggcctgacccggttccaggcggaagcttcagagaaggattcctcctccatgatgcagactcttcttactgttacccagaacgtcgaggtcccggagacgccaaaggccagcaaggcccttgaggtgtctgaggacgttaaggtctcaaaggcttcaggtgtgagtaaggctacagaagtatccaagacgcctgaggcccgcgaggctcctgcaactcaagcctcgtcgacaacccagctcacagacacccaggtcctggctgcggaaaacaaaagcctggctgccgataccaagaagcaaaacgcagatccacaggcagttaccatgcccgccaccgaaacaaagaaagtctcgcacgttgcagacactaaagttaatactaaggcacaggagactgaggcagctccatcacaggctcctgcagatgaacccgaaccagaatctgccgctgcccaatcacaggagaaccaggacactcgacccaaggtgaaggccaagaaagctcggaaagtgaagcatctcgatggggaagaggatggtagttctgaccagtcccaggcttcaggaactacaggtggaaggagggtgtctaaagccctcatggcttccatggccagaagggcttctaggggcccaattgccttttgggctcgtagggcttctaggacgcgcctggcggcctgggcccgtcgggccttgctgtctctgaggagccccaaagcaagacgtggtaaagcccgcaggcgggccgcaaaattgcaatccagccaggagcctgaagcccctcccccgcgtgatgtggctctattacagggtcgtgccaatgacctggttaagtacctgctagcaaaggaccagaccaagataccgatcaaaaggtcagatatgctgaaagatataattaaggagtacaccgacgtctatcctgagattatcgagcgcgctggatattcactggagaaggtttttggaatccagctaaaagaaatcgataaaaatgatcatttgtatatattgctcagcactctcgagcccactgacgccggcattctgggaacaaccaaagattccccaaagctcggccttctgatggtgctgttaagcataatcttcatgaacggaaataggagctccgaggctgtcatatgggaggtgctaagaaagctgggcctgcgacctggtattcatcattcactgtttggagacgtgaagaagttgatcactgatgaatttgtgaaacagaaatacctagattacgcacgagtcccaaactcaaacccccctgaatacgagttcttttgggggctacgctcatattacgagacctccaagatgaaggtccttaagtttgcttgcaaggttcagaagaaggaccctaaagagtgggctgcacagtatcgtgaagccatggaagccgacctgaaggctgcggctgaagccgctgctgaagccaaggcgcgagctgagattagggcacggatgggaatagggctggggagtgaaaacgctgccggaccctgtaattgggatgaggcagacattggcccctgggctaaagcacggatacaggctggcgccgaagccaaggcaaaagcacaagagtccggaagcgcatcaacaggggctagcacatctacgaataattcagcgagcgccagcgccagcaccagtgggggtttctctgctggcgcctcccttactgccactctgactttcgggctctttgctgggctgggcggagccggagcatcaacttccgggtcttccggcgcctgcggattcagctataagtag

SEQ ID NO: 194702 - DNA, 1566 bp, synthetic construct
  misc_feature 1..1566: note = Description of Artificial Sequence: Synthetic coding sequence
  source 1..1566: mol_type = other DNA
atgagcgacaccagcgagagcggcgccggcctgacccggttccaggcggaggcctctgaaaaggattccagctccatgatgcaaacgcttctcacagttactcagaacgtggaggtccccgagactccgaaggccagtagcacaactcagcttacagacactcaagtgctcgcagccgaaaataagtctctggctgctgacaccaaaaaacaaaacgctgacccacaggccgtgactatgccagctaccgaaaccaaaaaagtgagccatgtggcggatactaaggtaaacactaaagcgcaggaaaccgaggccgccccatctcaggcacccgccgatgagccagagcctgagtcagcagcagcacagtcccaagagaaccaggatacgcgcccaaaggtcaaagctaaaaaggctcgaaaagtgaaacacctggatggggaggaggacggaagtagtgaccagtctcaagcctcaggtacaacaggcgggcggcgggtgtccaaagcacgtagaagagcagccaagcttcagagctcacaggaacccgaggccccaccgcctagagacgtggccctgcttcagggacgcgccaatgatcttgtgaaatacctgttggcaaaggatcaaacgaagatcccaataaagcgcagcgacatgctgaaggacattatcaaggaatacactgacgtttatcctgagataattgaacgcgctgggtattccttagagaaggtatttggaatacagctgaaggagatagataaaaacgatcatttgtacatcctgctgagcacactcgaacccaccgacgctggtatcctcgggactacaaaggactctcccaagcttggactgttgatggtgctactgtccatcatctttatgaacgggaatagaagtagtgaagcagtaatctgggaagtgctgagaaaactggggctcaggcccgggattcatcattctctgtttggggacgttaagaagctcatcactgacgagttcgtgaaacaaaagtacctggactacgcaagagtgcccaactctaatccccccgaatacgagtttttttggggtctgcgtagttactacgagacatctaagatgaaagttctgaagttcgcctgtaaggtccagaagaaggaccctaaggagtgggccgcacagtacagggaagcaatggaggctgacctgaaggccgctgctgaggcggctgccgaagcaaaggcacgggctgaaattcgggctaggatgggcatcgggcttggctccgaaaacgccgcaggcccgtgcaactgggacgaggctgacatcggaccatgggcaaaggcgaggatccaagctggtgccgaggccaaggccaaagctcaggagagtggcagcgcttcaactggagcctccacctcaacaaataattcagcctccgcctctgcaagtacatctggagggttctcagcaggggccagtctgactgccacgttgacattcggattgttcgccggcctgggaggcgctggagccagcacgtccgggtccagcggcgcctgcgggttctcctacaaatag

SEQ ID NO: 194703 - DNA, 1566 bp, synthetic construct
  misc_feature 1..1566: note = Description of Artificial Sequence: Synthetic coding sequence
  source 1..1566: mol_type = other DNA
atgagcgacaccagcgagagcggcgccggcctgacccggttccaggccgaggcttccgagaaagacagttccagcatgatgcagaccttgctgactgtcacccagaatgtcgaggtcccagagactccaaaggcttcgtctaccacccagctcacagatactcaagtgcttgccgcagaaaataagtcactagccgccgacactaagaaacagaacgccgatccccaggcggttaccatgcccgctactgagaccaaaaaggtcagccatgtcgccgacactaaggtgaacaccaaagcacaagagaccgaagccgccccctctcaggctcctgcagatgagccagagcctgagagcgcagccgcgcagagccaggaaaaccaggatactcgcccgaaggtgaaggctaagaaggcacgtaaagtgaaacaccttgatggggaagaggatggctctagtgaccagtctcaagctagtggcacaaccggggggaggcgcgtgtccaaagcacgcagacgcgccgccaaactgcaatcatcacaggagccggaggctcccccacccagagacgtcgccctgttacagggtcgcgcaaacgacctcgtgaagtatttgcttgctaaggaccaaacaaagatcccaattaagagaagcgacatgctgaaggatattattaaggaatatacggacgtctatccggaaattatcgagagagcggggtattctctggaaaaggttttcggtatccagctgaaggagatcgataagaacgaccatctgtacattctgctatcaacgttagagccgaccgatgccggaattctaggaaccactaaggactcgccgaagttgggcttgctaatggttctgctcagcatcatctttatgaatggcaacaggtcatccgaggctgttatttgggaggtcctgaggaagttggggctcagaccgggaattcatcacagcctgtttggtgatgtcaagaagttaatcaccgatgagttcgtgaagcagaaatatttggattacgctcgcgtaccaaacagcaatccccctgagtacgagttcttctgggggctgaggtcttactacgagacgtctaagatgaaggtgctgaaatttgcgtgcaaagttcaaaaaaaggatccaaaggaatgggcggcccagtatcgcgaggccatggaggccgaccttaaagctgctgccgaggcagctgcagaagccaaggcccgagccgaaattagggcgagaatgggaataggcctcggaagcgagaacgccgccggtccatgcaactgggatgaggctgatatcgggccttgggcgaaagcccgcatccaggccggagccgaggccaaggccaaggcacaagagtcgggttctgcttccacaggggcaagtactagtaccaacaattcagccagtgctagcgcatcaacgtccggcgggtttagcgccggcgccagtttaaccgctacactaaccttcgggctgttcgccgggcttggtggggcaggcgcaagcaccagcggatcatctggcgcatgcggcttctcatacaagtag

SEQ ID NO: 194704 - DNA, 1821 bp, synthetic construct
  misc_feature 1..1821: note = Description of Artificial Sequence: Synthetic coding sequence
  source 1..1821: mol_type = other DNA
atgagcgacaccagcgagagcggcgccggcctgacccggttccaggcggaggcctccgaaaaagacagttctagtatgatgcagacactgctgactgtgacccaaaacgttgaggtgccagaaactccaaaggcatccaaagccttggaggtctccgaggatgtgaaggtatctaaggcgtctggcgtgtcgaaggcaacagaagtgagcaagactcccgaagcccgtgaagcccctgcaacccaggcttccagcactacacagctgactgatactcaagtactggctgcagagaataaatcccttgcggccgataccaagaaacaaaatgccgaccctcaggccgtcaccatgcctgccacagagacaaaaaaagtttcacacgtggcagataccaaggtgaacacaaaggcccaggagacagaagcggccccctcccaggcaccagctgatgaaccggagcctgagagcgccgctgcccagagtcaggagaatcaggatactcggccgaaggtgaaggctaaaaaggctcgcaaggtcaagcacctcgacggagaagaggacggatccagcgatcagtctcaggcttcaggcactaccggcggtcggagagtgtcaaaggcactcatggcttcaatggcccgtagggccagtcgcggtccaatcgcattctgggcgagacgagcatcacgcactagattagccgcatgggcccgaagggctttattgagtctccggtctccaaaagcacgtcggggtaaagcccgacgccgggctgctaaactacagtcatcgcaagagcccgaggctccacctcctcgagacgtcgccttgctccaggggcgagccaacgacctggtgaagtatctcctcgccaaggatcaaacaaagattccgatcaaaaggtcggacatgctgaaggatataattaaggagtacactgacgtgtatcccgagattatcgaacgcgcaggatattccttggaaaaagtgttcgggatacagctcaaagaaatcgacaagaacgatcatctatacattctcttatccaccctggaaccaactgacgccggaatccttgggaccaccaaggactccccgaagcttgggctgttgatggtgctcttgtcaatcatcttcatgaacgggaatagaagtagtgaggctgttatttgggaagtgctcaggaagctgggcctgagacctggtattcatcatagcctgttcggggacgtgaagaaattgatcaccgatgagttcgtgaaacagaagtatctggattacgcccgggtccctaacagcaacccccccgagtatgagttcttctggggcttgcgcagctactatgagacatccaaaatgaaagttctgaagttcgcctgtaaggtgcagaaaaaagatccaaaggagtgggcagcccagtaccgcgaggctatggaagcagatctgaaagccgccgccgaggccgctgctgaggctaaggcacgagccgaaatccgagcaaggatgggaatagggctgggctccgagaacgccgcaggcccttgcaattgggatgaagcagacattggcccttgggccaaagctaggatccaggccggagcagaagccaaggccaaggcacaagagtcaggcagcgcaagtactggcgccagtactagcacaaacaactccgcttccgcgtcagccagcactagcggaggattcagcgcaggggcttctttaacggcaacacttaccttcggactcttcgccggcctagggggtgccggggccagtacttcaggttcatcaggcgcctgtggcttcagctataaatag

SEQ ID NO: 194705 - DNA, 1821 bp, synthetic construct
  misc_feature 1..1821: note = Description of Artificial Sequence: Synthetic coding sequence
  source 1..1821: mol_type = other DNA
atgagcgacaccagcgagagcggcgccggcctgacccggttccaggcagaggcgagcgagaaagactcttctagcatgatgcaaaccctcttaacagtaacccaaaacgtggaagtgccggagacacctaaggcaagcaaagccctggaagtaagcgaggatgtgaaagtgtctaaagctagtggcgttagtaaagccactgaagtgtcaaagacacctgaagcccgcgaggctcctgctacccaagcaagctctactactcagttgacggacacacaggtgctggccgccgagaataagtcactcgctgctgacaccaagaagcagaacgcagacccgcaggccgtgacgatgcccgccacggagactaagaaggtcagccatgtggctgatacaaaagtgaataccaaagcccaggagactgaagccgccccaagccaagccccggccgacgaaccagagcctgagtcagcggccgcacagagccaggagaaccaggatactaggcctaaagttaaggcaaagaaggccagaaaagtgaagcatcttgatggagaggaagatggtagcagtgatcaaagtcaggcgtccggcacaaccggcggtcgccgggtttcaaaggcactcatggcttccatggcgcgcagggcaagtcgaggacctatcgctttttgggctagaagagcaagccgcactcggctcgctgcttgggccagacgtgcacttttgagcttaaggtccccaaaggccagaagggggaaggcacggagacgagccgcaaagctgcagagctctcaggagcccgaggctccccctcctcgggatgtggccctccttcagggcagagcgaacgacttggtgaagtatcttctggccaaagaccaaacaaaaattcctattaagcggtctgacatgcttaaagatatcataaaggaatacacagatgtgtaccccgaaatcatcgaacgtgccggatactctctggagaaggtcttcggtattcagctgaaggagatcgacaaaaacgatcatttgtatatcttactaagcacactggaacccactgacgccggaatccttggtactactaaagactctccgaagcttgggcttctcatggtgcttttgtccatcatttttatgaacgggaatcggtccagcgaggccgtgatctgggaggtgcttaggaaattaggcttgaggcctggaatccaccacagcctgttcggtgatgtgaagaaactgattactgatgagttcgtgaaacagaaataccttgactatgctcgcgttccgaattcaaatccccctgagtacgagttcttctggggactcagatcctactatgaaactagcaagatgaaggtcctcaaatttgcctgcaaggtccagaaaaaggaccccaaagagtgggcagctcagtaccgcgaagctatggaggctgatctgaaagcggccgctgaggcagccgcagaggctaaagcaagggccgagatccgagcgcgcatgggaatcggactgggcagtgaaaatgcagccggtccttgcaattgggatgaggcagacatagggccatgggccaaagcccgtatccaagccggcgctgaggcaaaggccaaagcccaggaatctggttcagcaagcaccggtgcctcaacttcaacaaacaactcagccagtgcatctgcatctacaagcggcggcttctccgcgggcgccagtttaaccgctacactgacatttggccttttcgccggacttggaggcgctggcgcctctacaagtgggtctagcggcgcatgcgggttctcttacaaatag

SEQ ID NO: 194706 - DNA, 2220 bp, synthetic construct
  misc_feature 1..2220: note = Description of Artificial Sequence: Synthetic coding sequence
  source 1..2220: mol_type = other DNA
atggccgagggcagcttcagcgtgcagagcgagagctacagcgtggaggatatggatgagggtagcgacgaagtaggagaagaagaaatggtggagggcaacgattatgaagagtttggagccttcggaggttacggaaccctgacatcttttgatattcacatcctgcgcgcatttggaagtttgggccctggcctgaggattttatcaaacgagccgtgggaattggagaaccctgtgctggcccaaacgctggtggaggcccttcagttggatccagagaccttggcaaacgaaacagcagcccgcgctgcgaatgtggccagggcggccgcctctaacagggcggcacgcgccgctgccgcagcagctagaactgccttttcgcaagtggtagcttcgcatcgcgtggcgaccccgcaggtgtcaggagaggatacacagccaacaacatacgcagctgaggctcagggccctactccggagccccccctcgctagtcctcagaccagccagatgctcgtgacctcaaagatggctgcacctgaggcacctgcgactagcgcacagtctcaaaccggatcacccgcccaggaagctgcaaccgagggaccctcgtccgcctgtgcattctcccaagcaccttgtgcacgtgaagttgacgctaaccggccctcaactgccttcctggggcagaacgacgtgtttgatttcacacagccagccggcgtaagcggcatggccttcccacgccctaagagacccgcacctgctcaggaggccgccacagaaggtccgagcgccgcctcaggcgtgccacagacgggccccggcagggaggttgccgccacacggccgaagaccactaagtccggtaaggcactcgctaaaacccgttgggtggaaccccagaatgtcgtggccgcagctgccgctaaggcaaagatggctaccagcattccagaacctgaaggggcggcggccgcaacggctcagcatagcgcagaaccatgggcccggatgggagggaaacgcacaaagaaatctaagcatctagatgatgaatacgaatcatccgaggaagagagggaaacgcccgccgtccctccaacttggagggcctcccaaccaagcctgactgtgcgagctcagctcgctccccggccccctatggcgcctcggtcacagatcccttccagacacgtattatgtctgccccctcgaaatgttacactgcttcaggagcgagccaacaagctggttaagtatcttatgatcaaggattacaagaagatcccaatcaagcgggctgatatgcttaaggacgtgatccgagaatacgacgaacattttcccgaaataatcgagcgagccacatacaccctggaaaaaaaatttggaatacacctgaaggaaatcgacaaggaggagcacttatacatcctggtgtgtaccagggatagcagcgctcgcctgctgggcaagaccaaggacacacctcggttgtcccttctactcgtcatcctgggagtcatcttcatgaatggtaatagggccagcgaggccgtcttgtgggaggctctgaggaagatgggcctacgtccgggggtccgccacccattcctcggcgacctgcgaaaattaattacggacgacttcgtgaaacagaaatatctcgagtacaagaagatacccaacagcaaccctcccgagtatgaatttctgtggggattgagggcccgacacgaaaccagcaagatgcgcgtgctccgcttcatagctcagaaccagaaccgcgaccccagagagtggaaagctcattttttagaggccgtcgatgatgccttcaagacgatggatgttgatatggccgaggaacatgcaagagctcagatgagggcccaaatgaacatcggagatgaggcattgatcggtcgatggtcctgggatgatatccaggttgagctgctgacctgggatgaagacggcgatttcggagatgcctgggccagaattccgttcgctttctgggcgcgctatcaccagtatatcttgaactcgaacagggctaataggcgggcaacctggagggcaggtgtcagttctggtaccaatggtggcgcctccacctccgtccttgatggcccatcaacaagttcgactatccgaacccgaaacgcagcccgggccggcgcaagttttttcagctggatacaatag

SEQ ID NO: 194707 - DNA, 2274 bp, synthetic construct
  misc_feature 1..2274: note = Description of Artificial Sequence: Synthetic coding sequence
  source 1..2274: mol_type = other DNA
atggccgagggcagcttcagcgtgcagagcgagagctacagcgtggaggatatggacgagggctccgacgaggtaggagaggaggagatggtggagggaaacgattacgaagagttcggtgcctttggtggttacggtaccctcacgtcctttgacatacatatactgcgagcctttgggagcttgggtcctggcctgcggatcctctcgaacgagccttgggagctggaaaatcctgttctcgcacagacattggtagaagctctgcagctggatccagagacactggctaacgaaaccgccgcccgcgccgccaatgtcgcacgcgccgccgcctcaaatagagcagccagagcagcggcagctgcggcgaggactgccttttcccaagtggtggcgagccaccgcgttgctacacctcaggttagcggcgaggacacacaacccacaacatatgccgccgaagcacaggggcccacgcccgagcctcccctggcctcaccccagacatctcagatgctcgtaacttctaagatggccgcccccgaggcacctgccacgtctgctcagagccagaccggaagccctgcgcaggaggccgcgaccgaaggtccgtcatcagcctgcgcctttagccaggcgccctgtgcccgggaggtggatgcaaataggccttccactgcctttttaggccagaatgatgtttttgatttcacacagccagctggggtgtccggcatggcctttccgcgccccaaaaggcccgctcccgcgcaggaggctgccactgagggaccatcggcggcctcaggcgtcccacagaccggcccaggtcgtgaggtggcagccaccagaccaaaaactacgaaaagcggaaaggctctagccaagacccgctgggtagagcctcagaacgtcgttgccgctgccgccgccaaagccaagatggctaccagtatccccgagcctgagggggctgccgcagcgactgcccagcatagcgctgaaccttgggcccgtatgggtggcaagcgtactaagaagagcaaacacttagacgacgagtatgaatcatctgaagaggaacgagagactcctgctgtcccacctacctggcgggcctcacaaccgtctttaactgtgcgagcacaactagcacccagaccaccaatggcaccgagatctcagattcccagccggcatgtattgtgcctgcccccgcgtaatgttactctgttgcaggaacgtgcaaataagctagtcaaatatctcatgattaaggattataagaagatcccaatcaagagggccgatatgctgaaagacgtgatccgagaatatgatgaacattttcccgagattatcgagagagctacatacacactggaaaaaaaatttggcattcacctgaaagagattgataaggaagagcacctgtatattttagtttgtacccgtgacagctctgcccgcttgttgggtaaaacaaaagacacccccaggttgtctttgctgctggtcatcctcggcgtcattttcatgaatggcaaccgcgcgtccgaagccgttctctgggaagccctgagaaagatggggcttcgacctggtgtgcggcacccatttctgggcgatctacgaaagctcataacagacgactttgtcaaacagaagaaccctgagctgagggaagagactcctctgagtatggctcctagctggtacctggagtataagaaaatacccaattccaacccacctgaatatgagttcttgtggggcctgcgtgcccgacacgagacctcaaaaatgcgtgtccttaggttcattgctcagaaccagaacagggaccctagagaatggaaagcccatttcctggaggcagtcgacgacgccttcaaaaccatggacgtggacatggcagaggagcacgcccgcgcccagatgcgagcccagatgaatatcggcgacgaagccctgatcgggcggtggagctgggacgatatacaggtcgagctcctcacttgggacgaggatggggatttcggggacgcctgggcacgaattcctttcgctttctgggctcgctaccaccagtacatcctgaactctaacagggctaaccggcgggccacgtggagagccggtgtttccagtgggacaaacgggggggcttcaacttcagtcctcgacggccccagcacttcaagcacaataaggaccagaaacgccgcgagagccggcgcctcctttttctcttggatccagcatcgttag

SEQ ID NO: 194708 - DNA, 2226 bp, synthetic construct
  misc_feature 1..2226: note = Description of Artificial Sequence: Synthetic coding sequence
  source 1..2226: mol_type = other DNA
atggccgagggcagcttcagcgtgcagagcgagagctacagcgtggaggatatggatgagggttccgatgaggtaggagaagaagagatggttgaaggtaatgactacgaagaattcggtgcattcggaggatacggaacactgacctcttttgacattcacattttaagagcttttgggagccttggccctggtctgaggatcctttctaatgagccttgggagttagaaaatccagttctcgctcaaactctagttgaggctctccagcttgaccccgagaccctggctaacgagacagcggctagagccgcaaacgtggctagggctgctgctagcaaccgcgccgctagggctgctgccgccgcggccaggactgccttttcccaggtggtcgcctcacaccgggtggccaccccgcaggtcagtggagaggacacccagcccaccacctatgctgctgaagctcagggaccgacacctgaacctcctctcgcctcaccccagaccagccagatgctggtgacatccaaaatggcagctccagaggctcccgcaaccagcgcacaatcacaaactggcagccctgcccaagaagctgcaaccgagggaccctcttctgcatgtgcattttcccaagccccttgcgcccgcgaggtggatgcaaatcgcccttccacagcttttctgggccagaatgatgtcttcgattttacccaaccggcgggggtgtccggtatggcctttccgcgccccaaacggccggcacccgcccaggaagccgccaccgagggaccctctgcggcttcaggcgtgcctcaaactggccctggacgggaggtggcggcgactcgacccaagaccaccaaatcagggaaagcgctagccaagacaagatgggtggaaccgcagaatgtggtggccgccgcagctgcaaaagcaaagatggcaacgtcaatcccagaaccagaaggcgccgccgccgcaacagcccaacactcagcagagccctgggcgcgaatgggtggcaaacgcacaaaaaaatccaaacatctcgacgacgagtatgagagctccgaggaagagcgcgagacacccgctgtgcctccaacttggagggcttcacagcctagtcttaccgtcagagcccaactcgcgccacggccacctatggcccccagatcacagatcccatctcgccatgtgctgtgtctgcctcctaggaatgtaaccctcctgcaggaacgcgctaataaattggtcaaatacctcatgattaaagattacaagaaaattcctattaagcgtgccgatatgctcaaagacgttatccgggagtatgacgagcattttccagagataatcgaacgagctacctatactcttgagaaaaagttcggcattcacctgaaggaaatcgataaggaagagcatttgtatattctggtgtgtaccagggattcctcagccaggctactagggaagacaaaagacacgcctcgacttagtctactccttgttatattgggggtcattttcatgaacggcaatagggccagcgaggccgtgctgtgggaggcgttacgcaaaatgggtttgcggcccggcgtcagacacccgttccttggggacctaagaaaactgataactgatgatttcgtgaagcaaaagtatctggagtataagaaaattcccaattcgaatccacccgaatatgagttcctgtggggactgagggctcggcatgagaccagcaagatgagagttttaagattcattgcgcagaatcaaaaccgagaccctcgtgaatggaaggcccactttctcgaagcagtggatgacgcttttaaaaccatggacgtggacatggccgaggagcatgcacgcgcacaaatgcgcgcacagatgaatattggggatgaagccctgatcggaagatggagctgggacgacatccaggtggagctactgacttgggacgaggacggcgactttggagatgcatgggcgaggatcccctttgcgttctgggccagataccaccaatatatcctgaacagcaatcgggctaaccgcagagcaacatggcgagccggcgtcagcagtggaacaaatggcggggcctccacatcagtgctggacggcccaagtacctcttctaccattcggaccaggaacgcagcgcgtgctggcgcttcttttttttcctggattcagcaccggtag

SEQ ID NO: 194709 - DNA, 2220 bp, synthetic construct
  misc_feature 1..2220: note = Description of Artificial Sequence: Synthetic coding sequence
  source 1..2220: mol_type = other DNA
atggccgagggcagcttcagcgtgcagagcgagagctacagcgtggaagacatggatgagggatcggacgaagtaggcgaggaagagatggtggaagggaatgattacgaggagttcggcgcattcggcggctatggtaccctgacttcctttgatattcacatactgagagcattcggaagccttggacctggcctgcgcattcttagcaacgaaccttgggagctggagaatcctgttctcgcacagacactcgtggaagctttgcagttggacccggaaacactggccaacgagaccgcagcacgcgcagcgaatgtcgcccgcgccgctgccagtaacagggccgccagggcagccgccgccgcagcccgaaccgcgttctcccaggtggtggcctcccaccgggtcgccaccccccaggtgtcaggcgaagacacgcagcccacaacgtatgcagctgaggcacagggcccgacccctgagccaccacttgcatcgccccagaccagtcagatgctagtcacctctaagatggccgccccggaggcccccgctaccagcgctcagtctcagaccggcagccccgctcaagaggctgctacagaagggccctctagtgcgtgcgctttttcgcaagccccatgtgcccgcgaggtagacgcaaaccggcctagcacagctttcctcggacaaaatgatgtcttcgattttacacagcccgctggggtgtccggcatggctttcccccgacccaagcgccctgccccagctcaggaagcagcgaccgaggggccttcggctgcctccggcgttccacagaccggtccaggacgcgaagttgccgcgacccggccaaaaactactaaaagcggcaaagcactcgctaaaacccgttgggttgagcctcaaaatgtcgtcgccgctgctgcagcgaaggccaagatggccacttcaatccccgaacctgaaggcgccgccgctgcaactgctcagcactctgccgagccttgggcccggatggggggaaaacgtaccaaaaagtcgaagcatctggacgacgagtacgaatcatccgaagaagagcgtgagaccccggcggttccccccacatggcgtgcctctcagccgagtttaaccgttcgcgcacaactggccccaaggccccccatggcccccaggtctcaaatcccttctagacatgtgctctgtctcccccccagaaacgtgactctgctgcaggagagggcgaataagctggtgaaatatctgatgatcaaggactataagaaaattcccatcaagagggccgatatgttaaaggacgtgattagagagtacgacgagcatttccctgagattattgagcgtgcaacatacactttagaaaaaaaatttggtatacatctgaaagagattgataaagaagaacatctgtatatcctcgtatgtactcgggactcttccgcaagattgctcggcaagacaaaagacaccccgcgcctgtctcttttgctggttatccttggagtgatctttatgaacggtaatagagcttctgaggcagtgctgtgggaagctctgaggaagatgggcctacgacctggggtgaggcaccccttcctcggtgatctccggaagctcattacagacgactttgtaaagcagaagtacctcgagtataagaagattcccaactccaacccaccggagtacgaattcctgtggggcttaagagccaggcatgagaccagcaagatgagggtcctccggttcatcgctcagaaccagaatagagatcccagggagtggaaggctcactttctggaagcagtggacgatgcttttaaaacaatggacgttgacatggccgaggagcatgcgcgcgctcaaatgagggcacaaatgaacatcggcgatgaagcactgattgggagatggagctgggacgacattcaggtggaactcctgacctgggacgaagatggcgacttcggggatgcctgggctcgcataccttttgcattttgggcaagatatcaccagtatatcctgaacagcaatcgcgccaacagaagagccacatggagggccggagtctcttccggcacgaatgggggagcttctacttctgtgctcgacggaccgagcactagttctacaattcgaacgcggaatgccgctcgggcgggggcctcgtttttctcctggatccagtag

SEQ ID NO: 194710 - DNA, 2274 bp, synthetic construct
  misc_feature 1..2274: note = Description of Artificial Sequence: Synthetic coding sequence
  source 1..2274: mol_type = other DNA
atggccgagggcagcttcagcgtgcagagcgagagctacagcgtggaggacatggacgaaggatctgatgaggtcggagaggaggaaatggtggaaggcaatgattatgaagagttcggcgccttcggcggttacggcaccctgacctcatttgatattcatatccttcgcgcatttggatcactgggcccaggactgcgaatcctctctaatgaaccctgggagctcgagaacccagtcctggcccaaacgctcgtggaagccctgcagcttgatccagaaacacttgccaatgaaaccgccgccagagcagcaaacgttgctagagcagctgccagtaatagggctgcgagagcagccgcagcagctgctcgcacggctttctcccaggtggttgccagccatcgagtagcaactccacaggtgtctggagaggatacccagccaaccacttatgcagctgaggcccagggtccaaccccagagccccctctcgcctcccctcagacctcacagatgcttgtgaccagcaaaatggccgccccagaagcccccgccacaagtgctcagtctcagacaggatctccagctcaggaggccgccaccgagggcccctcatccgcatgtgccttcagtcaagccccttgcgcaagggaagtcgatgcaaatcgccctagcaccgctttcctagggcaaaacgacgtcttcgactttacacagcccgccggtgtgtctgggatggcatttcctaggcccaaacggcccgcccctgcccaagaggccgccaccgagggcccctctgctgcttccggcgtgcctcagaccgggccaggcagagaggttgcagcgacgcgtccaaaaactactaagtcgggaaaggctcttgctaaaacaaggtgggttgaaccacagaatgtggtcgccgctgcagctgcaaaagctaaaatggccacatcaattcctgagccagagggtgccgccgctgccacagcacagcactcggccgagccctgggctcggatgggggggaaacgcactaaaaaatcaaaacatctcgatgacgagtatgaatcctcagaggaggaaagggagacgccagctgttccccctacttggagggcctcccagccttcccttacggtgagggcccagctggcacctcgaccacccatggcaccccgcagccagattccctctcggcatgtgctttgcctgccgcccagaaacgttaccttactccaagaacgtgctaataaactggtgaagtatctcatgatcaaggattacaagaagatacccatcaagcgggccgatatgctcaaggatgtaatccgagagtacgatgaacacttccctgaaattatcgagagagctacctacactttggaaaagaaattcgggatccacctcaaagaaattgacaaggaggagcacctttacattcttgtatgtacaagggatagctccgcacgactgctgggaaagacaaaggatacccccagactgtcactgctgctggtcattctcggagtgattttcatgaacggcaatcgggcctccgaggcagtgctatgggaggctctccggaagatgggacttcgcccaggtgtgcgccaccccttcctcggcgatctgcggaaattaattacagacgatttcgtcaagcaaaagaatcctgagttgcgtgaggaaactcccctgagcatggccccttcatggtatttagaatacaaaaagatacccaacagtaaccctcccgagtatgagttcctatgggggttgagggcacgccacgaaactagcaaaatgcgcgtgctgcgttttattgctcaaaaccagaatcgggacccccgcgagtggaaagcccatttcctagaggcggttgacgatgccttcaagactatggatgtcgatatggccgaggagcacgctcgtgcccagatgagggcccaaatgaatattggcgacgaggctctcattgggaggtggagctgggatgacattcaggtggaactgctaacctgggatgaggatggcgatttcggcgatgcttgggctagaattcctttcgccttctgggctagataccatcagtatattctgaatagcaatcgagcaaatcgaagagctacttggcgtgcaggcgtgagtagtggcacaaacggaggcgcctccacttctgttctggatgggcctagcaccagcagcactataagaacaaggaatgccgcccgcgcgggtgcatcctttttctcatggatacaacacaggtag

SEQ ID NO: 194711 - DNA, 2226 bp, synthetic construct
  misc_feature 1..2226: note = Description of Artificial Sequence: Synthetic coding sequence
  source 1..2226: mol_type = other DNA
atggccgagggcagcttcagcgtgcagagcgagagctacagcgtggaggatatggacgagggcagtgacgaagtcggggaggaggaaatggtggaaggcaacgactatgaagagttcggggcttttggagggtacggtacactgacgagttttgacatacacatcctccgtgccttcggcagcctagggcctggactccgaatactttccaacgaaccttgggaacttgagaatcctgtgctcgctcaaacactggtggaagccttgcagctggaccctgagactctggccaacgagactgctgctagggccgcgaatgtggctcgagcagccgcatccaatcgagccgctagagccgcagccgctgccgcgaggaccgccttttcacaagtggtggcctcacacagggtcgcaactccccaggtgtcaggggaggacactcagcccacaacgtatgctgcagaggcacaaggtcctactcctgagcccccactcgcaagtcctcagactagccaaatgttggtgaccagcaagatggcagcccccgaagcccccgccacgagtgcacagtctcagacaggctcccctgcccaggaagctgcaacggagggtcccagtagtgcttgtgcattctctcaagccccttgtgctagagaagtggacgccaacagaccctctaccgctttcctgggtcagaatgacgtattcgatttcactcaacccgccggcgtttcagggatggcctttccccgtcccaaacgaccagcccccgcccaagaggcagccacggaaggacctagcgcagcatccggagtaccacaaacaggtccaggcagagaggtagcggctacacgccccaaaaccaccaagtccggtaaggccctagcaaagactaggtgggtggagccacagaacgttgtcgctgcagccgccgccaaagccaaaatggctaccagcatcccggagccggagggagcagccgctgctaccgcccaacacagcgcggaaccctgggcccgaatgggcgggaaacgaaccaagaaatccaagcacctagatgatgaatatgagtccagcgaagaggaacgtgagactcctgccgtgcccccgacttggcgagccagccagccatctttaaccgttcgtgcacagttagccccccgtcccccgatggctcctaggagtcagattcctagtagacacgtcctgtgtctccctcctcggaatgtgaccctgctgcaggagagagcgaataagttggtaaagtacctgatgatcaaagactataagaagatccccatcaaacgggcagacatgctcaaagatgtcatccgggaatacgacgagcacttcccagagattatcgagcgggctacatacaccctggagaagaaattcgggatccatcttaaagaaatagacaaagaggaacacctttacatcctcgtctgcactcgcgacagttcagctcgtctgctgggaaaaacaaaagatacaccccggctttccctcctactcgttatcctgggggttatattcatgaatggcaatcgcgccagcgaagctgtgctgtgggaagccctgaggaaaatggggttgcggcccggggtgcggcatccctttctgggcgacctccggaagctgatcaccgacgattttgtaaagcaaaagtatctggaatacaagaagatccctaattctaaccctcctgagtacgagttcctttggggcttgcgggcacgccacgaaactagcaaaatgcgtgtgctcaggttcatcgcgcagaatcagaaccgagaccctagagaatggaaggcgcactttttagaggcggtggacgacgcttttaagaccatggacgtggacatggccgaagaacatgccagggcacagatgcgcgctcagatgaatatcggtgatgaggctttaattggacggtggtcttgggatgacatacaggttgaattactcacatgggatgaggacggggactttggagatgcttgggctagaatcccgtttgcattttgggctagataccatcagtacattctcaatagtaacagagctaaccgtcgagctacgtggcgggctggggtatcaagcggaaccaacggcggtgcctcgacctccgtgctggatgggccttctacgagttcaaccatcaggactcgaaacgccgcccgagccggggcttctttcttttcatggattcagcatagatag

SEQ ID NO: 194712 - DNA, 2874 bp, synthetic construct
  misc_feature 1..2874: note = Description of Artificial Sequence: Synthetic coding sequence
  source 1..2874: mol_type = other DNA
atgagcctggtgagccagaacagccggcggcggcggcggcgggtggcaaaggctacggctcacaacagctcttggggagagatgcaagcaccaaacgcacccgggctgcccgccgatgtgcctgggtctgacgtgcctcagggaccaagcgactcccagatcctccagggactgtgcgcttccgaggggccttcaacctcagtcctgccaacatctgcagagggacctagcacatttgtgcccccaaccataagtgaggcgtcaagcgccagtggccagcccacaattagcgaagggccgggcaccagtgtattacctacccccagcgaaggattgtccacaagtgggcctcccactatcagcaagggtttgtgtacctctgtcactctggcagctagcgaaggccggaataccagtcgcccccccacgagttccgaggagccttctacctccgtgcctcccacagcgagcgaggtcccatctacaagtcttccccccacacctggggaaggcacatcaacctctgtgcccccgacagcttatgagggcccctcaacttcagtagttccaactcctgatgagggaccaagcactagtgttttgccaaccccaggagaagggccgggcacctcagtgcctttggccgcaactgagggactttcaacatcagttcaggcaaccccggatgaggggccctctacaagcgtacccccaacagctaccgagggccttagtactccagtgccccccacaagggatgaaggtccctcaacttctgtgcccgctactcctggtgagggaccaagcacgtcagttttgcctgcagcctcggatggtcagtccataagtctggttccaactcgcggtaagggaagtagtacaagtgtgccccctacagccactgaaggactatctactagtgtgcagccgaccgcgggtgaggggagcagcacaagcgtgccaccgacccccggtgggggactgtccacctccgtcccccccacggctactgaggagctgagcacctccgtcccccccacacccggggaaggacctagtacttcggtgttgccaatcccaggtgagggactctcgacatccgttccccctaccgcttcagatggcagcgataccagtgtgcctcctacacccggggaaggtgcgtcgacgctggtgcaaccgacagcacccgacggcccaggctccagtgtcctgccaaatcccggtgagggccctagtacattgttttcttcttccgccagcgtggatcggaaccctagcaaatgctccctggtgctgccaagtcccagagtgaccaaggcctccgtggattcggactctgagggcccgaaaggggctgaggggccaattgaatttgaggtacttcgggactgcgagagccctaattccatcagtatcatgggcctgaataccagtcgggtcgccatcactctcaaacctcaggaccccatggagcagaacgttgcggagctcttgcaattcctgctggtgaaagaccaatcaaaataccccatcagggagtccgaaatgcgtgagtacatcgtgaaggagtatcggaatcagttcccggagatcttacggagagcagcagcccacctcgagtgcattttccgcttcgagctgagggaactggatccagaggcccatacctacatcctcctcaataaattgggtcctgtcccattcgaaggactcgaagaaagcccgaacgggccaaaaatgggattgttgatgatgattttgggacagatcttcttgaacggtaaccaggccaaagaagctgaaatatgggaaatgctgtggcgtatgggcgttcagcgcgaaaggaggttaagtattttcggcaacccaaaacgcttgctcagcgtagagtttgtgtggcagcggtatctagattacagacctgtcactgattgcaagcccgtggagtacgagttcttctggggtccgcgatctcacctggagacgacaaagatgaaaatactcaaatttatggccaagatttataacaaagatccaatggactggccggagaagtacaatgaggcccttgaggaggacgctgcgagagcatttgcggagggatggcaagcgctgccccactttaggagacctttctttgaggaggctgccgctgaggtcccctctcccgactcagaagtttcctcttatagttcaaaatatgccccgcactcatggccagagtccagattggagagtaaggctcgcaaattggttcaactcttcctcctgatggatagtactaagctacctatccctaaaaagggcatcctctattatattggaagagagtgctccaaagtatttccggacctgcttaaccgcgctgcgagaaccctaaaccatgtttatggaacagaactagtcgtcttagaccctcgcaaccattcctacacgctctataatcgccgcgaaatggaagagactgaagaaatagttgatagccctaaccggcccggcaataactttctgatgcaagtactgagttttatcttcatcatgggcaatcatgcccgagaatccgcagtttgggcattcctgcgggggctgggagtccaggcaggccggaaacatgtaattacctgtagatacctgtctcagcgttatatcgatagcctgagagtgcccgactcggacccagttcagtacgaattcgtatggggtccccgtgctaggttggagacgagtaaaatgaaggcgctgaggtacgtggcccgcatccatagaaaggaacctcaggactggccccagcagtatcgcgaagcgatggaggatgaagcgaatcgtgccgacgtcggccatagacagatctttgttcacaacttcagatag

SEQ ID NO: 194713 - DNA, 1572 bp, synthetic construct
  misc_feature 1..1572: note = Description of Artificial Sequence: Synthetic coding sequence
  source 1..1572: mol_type = other DNA
atgagcctggtgagccagaacgcccggcactgcagcgccgagatcaccgccgattacggcgatggccgcggagaaatacaggccacaaacgccagtggatcccccacatccatgctggtcgtagatgccccccagtgtcctcaagccccgataaacagtcagtgtgttaatacttctcaggctgtgcaggaccccaatgatcttgaagttctgatagatgagcagtctcgacgcctgggcgctcttcgcgtgcacgaccctttagaagaccgctccattgcgttagttaactttatgcggatgaagagtcaaaccgaggggagcattcagcaatcagaaatgcttgaatttctgagggaatactctgaccaatttccagaaatcctgcggcgggccagtgcacatttggaccaggtcttcggcctgaacctaagagtgatagacccccaagccgacacctataacttagtttcaaaacgcggcttccaaatcactgataggatagccgagagtctggatatgccaaaagcaagcctgcttgcactggttctcggccatattctgctgaatggaaatagggcacgggaggccagtatctgggatcttttgctcaaggtagatatgtgggataagccccaaagaattaacaatttattcggtaataccaggaacttgctgaccaccgactttgtctgtatgcggttcttggagtactggcctgtgtacgggaccaatcctttagagttcgaatttctatggggcagcagagcccatcgggaaatcacaaagatggaggcgctaaagttcgtgtccgatgcacatgacgaagaaccttggagttggcctgaggaatataacaaagccctcgaaggggataaaacaaaggaacgatctctgaccgctggattagaattttggagtgaggacaccatgaatgataaggccaatgacctggttcagctcgccatctcagttaccgaggaaatgctgcccatccatcaagatgagttacttgcccacacagggaaggaatttgaggacgtcttcccaaatatcctaaatcgcgccaccttaatcctggacatgttctacggactttcactgatcgaagtggatacgtcagagcacatttacctgctggtgcagcagccagaatctgaggaggagcaggtaatgctggaatctctcggaagacccacccaggaatatgtgatgcccattttgggtttgatctttctcatggggaatagagtaaaggaggctaacgtgtggaacctgttgcgtaggttttcggtggacgtgggtcgtaagcacagcataacccgtaagttgatgcgccaacggtaccttgagtgccgccctctctcgtactctaaccctgttgagtatgagctgctgtgggggccgcgcgcccaccatgaaacgataaagatgaaggtgctcgaatacatggctcggctgtatcggaagcgcccccagaattggcctgaacagtatcgagaggccgttgaggacgaggaggctcgcgcaaaaagtgaagccacaattatgttcttcctcgatcctacgtag

SEQ ID NO: 194714 - DNA, 924 bp, synthetic construct
  misc_feature 1..924: note = Description of Artificial Sequence: Synthetic coding sequence
  source 1..924: mol_type = other DNA
atgctgcagacccccgagagccggggcctgcccgtgccccaggccgagggtgagaaagacggaggccacgacggggagactcgagcccctactgcatcccaggaaagacccaaggaggagctgggagctgggcgagaggaaggtgcagccgaaccagctctgacccgcaaaggagctagagcactcgccgcaaaggcactggctagaagaagggcctaccgccgcctgaaccgtaccgtggccgaactggttcagttcctgttggtgaaggataagaagaagtctcccattacacggtccgaaatggtcaagtatgtgatcggcgacttgaagatcctgttcccggacatcatcgctcgggctgccgagcatctgcgttatgtgttcggcttcgagttaaagcagtttgaccggaaacaccacacctatattcttattaataagctgaagcccctcgaggaggaagaggaagaggacttgggtggggatggtccaagactgggcctgctgatgatgattttaggccttatttatatgaggggcaatagcgccagggaggcacaggtttgggaaatgctgaggaggctgggagtccagccatcaaaatatcacttcctgtttgggtaccccaaaagactgataatggaagactttgtgcagcaacggtatctgtcctacagaagggttcctcacacaaatcccccagagtatgagttctcttgggggccacgcagcaatctagagatttccaagatggaagtgttggggtttgttgcgaagctccacaagaaggagccacaacactggccagtgcagtaccgtgaagctctggcggacgaagccgatcgcgctagggcaaaggcgagggccgaagcgagcatgagagccagggcctcagctcgagctggcatacatctttggtag

SEQ ID NO: 194715 - DNA, 396 bp, synthetic construct
  misc_feature 1..396: note = Description of Artificial Sequence: Synthetic coding sequence
  source 1..396: mol_type = other DNA
atggcccggagcctggtgtgcctgggcgtgatcatcctgctgagcgctttcagcgggcctggtgtgcgtggcggccccatgcccaagctggcagatcgcaagctttgcgctgatcaggaatgttcacatcccatttccatggcagtggccctacaggattacatggctcccgactgccgtttcctgaccattcacaggggtcaggtggtctacgtgtttagcaagctgaagggcaggggtaggttgttttggggcggctcagtgcaaggggattattatggagatctggccgccaggctgggctactttcccagctccatagtgagagaggaccagaccctgaaaccaggtaaagtcgacgtcaagaccgacaagtgggacttttactgtcagtag

SEQ ID NO: 194716 - DNA, 642 bp, synthetic construct
  misc_feature 1..642: note = Description of Artificial Sequence: Synthetic coding sequence
  source 1..642: mol_type = other DNA
atggccgagacctacgacttcctgttcaagttcctggtgatcggctctgcaggaaccggtaaaagctgtctgctgcaccaatttatcgagaacaaattcaagcaagattcaaaccacactattggggttgagtttggaagtcgcgtcgtaaatgtcggcgggaagaccgtaaagctgcagatttgggacactgcagggcaggagcgttttcgctcagttacacgtagctattaccgcggggctgcaggcgctttgctggtttacgatataacttctcgcgaaacttacaatagcttagcagcatggctgacagatgcacggacacttgcctcacccaatattgttgtcattctgtgcggtaacaaaaaggacctggatccggaaagggaggttacatttctggaggccagtaggttcgcgcaggaaaatgagcttatgttcttagaaacctccgccttaactggggagaacgtcgaagaggcattcctgaagtgcgcgcgaaccattcttaataaaattgatagtggggagctggatcctgagcgaatgggatctgggatccagtacggggatgcctcattgagacagctcagacagcccaggagcgcccaggcagtcgccccacagccatgtggctgttag

SEQ ID NO: 194717 - DNA, 366 bp, synthetic construct
  misc_feature 1..366: note = Description of Artificial Sequence: Synthetic coding sequence
  source 1..366: mol_type = other DNA
atggccgagacctacgacttcctgttcaagttcctggtgatcggctcggccgggacaggaaaaagttgtttattacaccaatttatcgaaaataaatttaaacaggatagcaaccatacaatcggggttgagtttggcagcagggtggtgaatgtgggcggaaagactgtgaagttgcagatctgggacactgccggacaggagaggtttcgtagcgtgactagatcttattaccgtggggccgccggagcactgctcgtctacgatattaccagagccgatgtgccgggagaccagaggtctcaccggagggaacggggcgggggagttcctcaggtgtgccctcactaccctcagcaggactag

SEQ ID NO: 194718 - DNA, 396 bp, synthetic construct
  misc_feature 1..396: note = Description of Artificial Sequence: Synthetic coding sequence
  source 1..396: mol_type = other DNA
atggcccggagcctggtgtgcctgggcgtgatcatcctgctgagcgcattttccggcccaggggtccgcggaggcccaatgcccaagttagctgaccggaaactgtgtgcagaccaggagtgttctcacccgattagcatggctgtggctctccaggattatatggccccagactgtaggtttctcactattcataggggccaggtagtgtatgtcttctccaaactgaaaggccggggacgcctgttctggggaggatccgtgcagggtgactattacggcgacctggcggccagattagggtactttccatcaagtatcgtccgcgaggaccagaccctgaagcccggcaaagttgatgtgaaaaccgatacatcctcttccaactcttggtag

SEQ ID NO: 194719 - DNA, 2358 bp, synthetic construct
  misc_feature 1..2358: note = Description of Artificial Sequence: Synthetic coding sequence
  source 1..2358: mol_type = other DNA
atggacagcgtgcccgccaccgtgcccagcatcgccgccacccccggcgatcccgagttggttggcccactgagtgtgctgtacgctgcatttatcgccaagttgcttgagcttgttgctacgctgccagacgatgtgcagccagggccggatttctatgggctaccgtggaaacccgtctttatcacggctttcctggggatcgcgtccttcgcgatctttctttggcgcacagtccttgttgtcactgataccttagttagcgtaacagagcagcagattagtgaaaaactgaaaactattatgaaggaaaacaccgagttggtgcagaagctgtctaactacgagcagaaaataaaggagagcaagaaacacgtgcaggagactagaaagcaaaacatgatcttaagcgatgaggcgatcaaatataaggataagataaagaccctcgagaagaatcaagaaattctcgacgacactgctaagaatcttcgcgtgatgctggagtcagaaagagaacagaacgtgaagaatcaagacctgatttcagagaataaaaaaagcatcgagaaacttaaagacgtgatcagtatgaacgcctcagagttttcagaagtccagattgcccttaacgaggcaaagctctccgaagaaaaagtcaagtctgagtgccaccgcgtgcaggaagaaaacgcccgcttgaagaagaaaaaggaacaactgcagcaggaaattgaggattggagtaagctgcacgcagaactgagtgagcaaatcaagagcttcgagaagagccagaaggatctggaggtcgccctgactcacaaggatgataacatcaacgccttaaccaattgtattacgcagttaaatttgcttgagtgcgaaagcgagtctgaaggtcagaacaaaggaggcaatgactcagatgagctcgccaatggagaagtaggcggtgataggaacgagaagatgaagaaccaaatcaaacaaatgatggatgtgagcagaactcagaccgcaatcagcgtagtggaagaggacctgaaattactgcagctcaaattacgcgcatctgtgtccaccaaatgcaatctagaggaccaggtcaagaaactggaagatgatcgcaattcattacaagccgccaaggctggtctggaggacgaatgtaagacactcagacaaaaggtcgagatcttaaacgaactgtaccagcagaaagagatggccctgcaaaagaaactttcacaagaagagtatgaaagacaggagcgtgaacaccgcttgagcgctgctgatgagaaggcagtttcagccgcagaggaggtaaaaacctacaaacgacgaattgaagaaatggaggacgaattgcagaagaccgagcgctctttcaagaatcagatcgcgactcatgaaaagaaggcccatgagaattggctaaaagcccgcgctgcggaaagagcaatagcggaggaaaagagggaagccgcgaacttacggcacaaactgctggagctgactcagaaaatggcaatgctgcaggaagaaccagtaattgtgaagcccatgcccggcaaacctaatacccagaatcccccgcggcgaggcccactctctcagaatgggtcattcggcccttctcccgtgtccggcggcgagtgtagtccgccactcacggtcgagccgcctgtgcgcccccttagcgccaccctgaaccgaagggatatgcctcgcagcgaatttggctcagtggatgggccgcttccccatccccggtggtctgctgaggcaagtggtaagccttctccttcagacccgggttcaggcacggccaccatgatgaactccagctcacgggggagctcccctacacgagtgttggatgagggcaaagtgaatatggctccgaaagggccccccccctttcccggtgtccctctgatgtccacccccatgggcgggcctgtcccacctcccatccggtatggcccaccaccgcagctgtgcggaccatttggcccccggcccttgcctccaccctttggacccgggatgaggccacccctgggactgcgggaatttgctccgggggtcccaccaggaaggcgggatttgccacttcacccccgcggcttcttgcctggacacgcccccttccggcccttgggcagtcttggacctcgggaatacttcatcccaggcacaaggctacctcctcccacccacggcccgcaggaatacccacccccacctgccgttcgcgacctcctgccaagcggctcaagggatgaaccgcctcccgcctcccagtccacatcacaggactgttcccaggcgctgaaacagagtccgtag

SEQ ID NO: 194720 - DNA, 5547 bp, synthetic construct
  misc_feature 1..5547: note = Description of Artificial Sequence: Synthetic coding sequence
  source 1..5547: mol_type = other DNA
atggccgccgcccccggcctgctggtgtggctgctggtgctgcggctgccctggagggttcccgggcaactcgatccctcaacaggaaggcgtttttctgaacacaaactgtgtgccgacgacgaatgttccatgctcatgtatcggggcgaggcactcgaagactttaccgggcccgactgtcggttcgtaaattttaagaaaggcgacccagtctatgtatattataaacttgccagaggctggcctgaagtctgggcaggtagtgtgggacggaccttcggctattttccaaaggacctcatccaagtcgtgcacgaatataccaaagaagagttacaagtcccaacagatgagacagatttcgtttgtttcgacggaggtcgcgatgatttccataattataatgttgaggaacttctcggtttcctggaactttataacagcgccgccacagattctgagaaggccgtcgaaaagactctgcaggacatggaaaagaaccccgaactcagcaaagagagggaaccagagccagagcccgtggaggccaatagtgaggagtcggatagcgtcttctctgagaatacagaagatctgcaggaacagtttacaacgcaaaagcatcattctcacgccaatagccaggccaatcacgctcagggggaacaggcctcatttgagtcctttgaggagatgctgcaggacaagctaaaagttcctgaatcagagaacaataagacttctaactcctcccaggtctctaatgaacaggacaaaattgatgcttacaagctgctcaagaaggagatgaccctggacctgaagactaaatttgggtcaaccgcagacgctctcgtgtcagacgatgagaccaccaggctggtgacatccctggaggacgattttgacgaagagttagacactgaatattatgccgtaggaaaggaagatgaggagaaccaagaagacttcgatgagctcccattgctaaccttcactgatggagaggatatgaagaccccagccaagtccggggtggaaaagtaccccaccgacaaggaacagaattctaatgaagaggacaaggttcagctcacagtgccacctggtatcaagaatgacgataaaaacatattgacaacgtggggtgacacgatcttcagcattgttacagggggtgaagagacccgggatacgatggatctggagtctagctcctctgaggaggagaaagaggacgatgacgatgccttggttccggattcgaagcagggtaagccacagagtgcgaccgactatagcgacccagataacgtagatgatggtttattcattgttgacatcccaaagactaacaacgataaggaagttaatgctgaacaccacatcaaaggaaaagggcggggcgtgcaagagtccaagcgaggcctagtacaggacaagacagaactcgaggacgagaatcaggaaggtatgacagttcactcctctgttcactcaaataacctgaattctatgccagccgccgagaagggaaaggatacgctgaagagtgcctatgacgatacagagaatgacctgaaaggagcggcaatccatatctctaaggggatgttgcatgaagaaaagcccggcgagcagatcctggagggtggaagcgaatcggagtctgcccagaaagctgccggcaatcagatgaatgaccgaaaaattcagcaggagtctcttggaagcgctccattaatgggggatgatcatcctaacgcctcaagagatagcgtggaaggcgatgccttagtgaacggtgccaaattgcacaccctctcagtcgagcaccaaagggaggagctcaaagaagagctggttctgaagactcagaaccaaccgcggttctctagtcccgacgagatagacctgccacgtgagctcgaggacgaggtacccatcctgggcaggaaccttccatggcagcaggaacgagatgtggcagccacagctagcaaacagatgtccgaaaaaatcagactgagcgagggggaggccaaggaagacagcctggacgaagagttcttccatcataaagccatgcagggaaccgaagttggacagactgaccagacagacagcaccggcggtcccgccttcctaagcaaggtcgaggaggacgattaccccagcgaagagcttctcgaggacgaaaatgcaataaatgctaaacggagtaaggaaaagaatcctggaaatcagggcaggcagtttgacgtaaacctgcaagttcccgaccgagctgtattaggaacaatccatccagaccctgagatagaggaatcaaaacaggaaacatctatgatactagatagcgagaaaacctcagagaccgcagcgaagggcgtgaatacgggcggcagagagccaaatacgatggtagaaaaagaaaggcccctcgctgataaaaaagcccaacgcccttttgagagatctgacttcagcgactcaatcaagatccagactccagagctcggggaggttttccaaaacaaggactcagattacctgaagaatgataacccagaggaacacctgaagacttcgggtcttgctggggaacctgagggcgaattatccaaggaggatcacgagaatacagaaaagtacatgggaaccgaatcacagggaagtgccgctgctgagccagaagatgactctttccattggaccccccatactagcgttgagcctggacactccgacaagcgggaggacctactgatcatttcctccttcttcaaggagcagcaatccctgcaacgtttccaaaagtacttcaacgtacacgagcttgaggccctgctccaggaaatgtccagcaagctcaagagcgcccaacaggagagcctcccatataatatggaaaaagtcttagacaaggtgttccgtgcctccgaatctcagatcctcagcatcgcagagaaaatgttagacacccgagtggcagagaaccgggatttggggatgaatgaaaacaacatatttgaagaagcagcggtcctggacgacattcaggatctgatatattttgtgaggtataagcattcgaccgctgaggagaccgcgacactggtcatggctcctcctctggaggaaggcttaggaggagctatggaggaaatgcagccactgcatgaggacaacttctctcgtgagaagacagctgaactgaacgtccaagtccctgaggagcccacacacttggaccaacgggtgattggggacactcacgcatccgaggtgagccagaagcctaatacagagaaagatctcgatccaggtccagtcaccaccgaggacactccaatggacgctatcgacgcgaacaagcagccggagaccgctgccgaggagccagccagtgtcaccccactagagaacgcaattctgctgatttatagtttcatgttttacctgacgaagtcactcgtagccaccctgccagatgacgttcagcctggacccgacttctacgggctaccttggaaacccgtgttcataactgcctttctggggattgcaagttttgctatctttctgtggaggacagtattggtggtgagcaacactgtttattatgtgacagaacagcaaatctccgaaaaactgaagacaattatgaaggagaacaccgagttagtccagaagctatcaaattacgagcagaaaattaaggagtccaaaaaacacgtacaggagacccggaaacaaaacatgatcctgtccgacgaagccatcaagtataaagacaaaattaagactctggagaaaaaccaggaaatcctggatgataccgctaaaaacctaagagtcatgttggagagcgagagggagcaaaacgtaaaaaatcaggacctgcttcaacaggagattgaagactggagtaagcttcatgccgagctctcggagcagatcaaaagttttgagaagagccaaaaagacctcgaggtggcactgacacacaaagatgacaacataaacgctctgacaaattgtattacacagcttaatctcttagaatgtgagtccgaatcggagggccaaaataaaggtggcaacgactcagatgagttagctaacggtgaggtgggcggagaccgcaacgagaagatgaagaaccagataaaacaaatgatggatgtatcccggacacagacagccatcagcgttgtggaggaggatctcaagctgcttcagctaaagctgagagcctccgtgtctaccaagtgtaatctggaagaccaagttaagaaactagaggacgacaggaattcgctccaggcagccaaagcaggcctcgaggacgagtgcaaaactttgcgccagaaggtggagatactgaatgaattgtaccagcagaaagagatggctctgcaaaaaaagttaagtcaggaagagtacgagaggcaggaacgagagcaccggttaagcgcagctgatgaaaaagcggtatctgccgcagaggaggtaaaaacctacaagaggagaatcgaggaaatggaagacgaattacagaaaactgaaaggagctttaaaaatcagatcgccactcacgagaagaaagcccatgaaaattggcttaaagcccgcgccgcagaaagggcaatcgctgaagaaaagagggaagctgccaatctaagacacaagttgctggagctaacgcagaagatggccatgctccaggaagaacctgtcattgtgaaaccgatgcctggcaaacctaatacacaaaatcctccgcgtagagggccactgtcacagaacggctccttcggtccaagccccgtgagcggaggcgaatgttctcctcccctcaccgttgagcccccagttcgccctctgagcgcaacactgaaccgccgggatatgccgcgaagtgaattcggttcggttgacgggcctcttccacatccaagatggtctgctgaagccagcggaaagcctagtccatctgatcccggatccggcactgccacgatgatgaacagcagtagcagggggagctctccaacccgcgttctggatgagggaaaggtgaatatggccccaaaaggccctccacccttccctggggtccctctcatgtcgaccccaatgggaggtcccgtgcccccaccaatacgctacggtccaccaccccaactctgcggaccattcggcccgagacccctgccccctcctttcggaccgggaatgaggcctccgcttggactgagggagtttgctccaggcgtcccgcccgggcgcagagacttaccgctacatcctcggggtttccttcctggccacgcgccattccggcctctggggtcactgggcccacgcgagtacttcatacctgggaccaggctgcctccaccgacacatggaccgcaagagtaccccccgccccctgcagtgcgggatctgctgcccagcggtagtagagatgagccacccccagccagccagtcaacctctcaggactgtagccaggccctaaagcagtctccgtag

SEQ ID NO: 194721 - DNA, 2358 bp, synthetic construct
  misc_feature 1..2358: note = Description of Artificial Sequence: Synthetic coding sequence
  source 1..2358: mol_type = other DNA
atggacagcgtgcccgccaccgtgcccagcatcgccgccacccccggagatcctgagctcgttggacccctttcggtcttatatgccgcctttatagcgaagctattggagctcgtggcgacactaccggatgacgtacaacccggccccgacttctatgggctgccctggaaacctgtgtttattactgccttcctgggaatagccagttttgcaatttttctctggcgaaccgttcttgtggttaaggatagggtctatcaggtgactgaacaacaaattagtgaaaagctaaagacaataatgaaagaaaatactgagctggtccagaagctctctaattacgagcagaagatcaaggagtcgaaaaaacacgtccaggagacaagaaaacagaatatgatattgagcgatgaagctatcaaatataaagataagattaaaactttagagaaaaatcaggagatactggacgataccgccaaaaatctgcgggtgatgcttgaaagtgagcgagagcagaacgtcaaaaaccaggaccttatttcagagaacaagaagagcattgaaaagctgaaggacgttatcagtatgaacgcgtcagaatttagcgaggtgcagatcgccctcaatgaggccaagcttagcgaagagaaagttaaaagtgagtgtcatcgggtgcaggaagagaacgcgagactgaagaagaaaaaggagcagctccagcaggagattgaggactggtctaagttgcatgcggagctttctgagcagataaagtccttcgagaaatcccagaaagacttagaggttgctctgacccataaggacgacaacattaacgcactaaccaactgcatcactcagttaaatctgctagaatgtgaatcggagagtgaaggacaaaataagggagggaacgactccgacgagttggcgaacggcgaagtagggggtgacaggaatgagaagatgaaaaatcagatcaagcagatgatggatgtaagtagaacccagactgccataagcgtcgtggaagaagatctgaaactcttgcagctgaagctacgggccagtgtgtccaccaaatgcaatttggaagatcaggtgaaaaaattagaggatgacaggaacagtctgcaggccgccaaagcgggtctcgaagacgagtgcaaaactctcagacagaaagtggaaatcctcaatgagctgtaccaacagaaggagatggccctccagaagaaattgagccaagaagagtacgagcgccaggaaagggagcatcgtttgtcagccgctgacgagaaggctgtcagcgcagccgaagaggtcaaaacgtataaacgaagaatagaagagatggaggatgagctgcagaagaccgagcgaagcttcaagaatcagattgctacacacgaaaagaaggcccacgaaaattggctaaaggcccgagccgcagagcgggctattgcagaggagaagagggaagctgctaacctgaggcataaacttttagagctgactcagaaaatggctatgctgcaggaggagcccgtgattgtcaagcctatgcccggaaagcccaatacacagaatcctcccaggcgtgggcccctctcacagaatggctccttcggccccagccccgtcagtgggggagagtgcagtccgccattaacggtagaaccacctgttagacctctatcagccacccttaatcgtagggatatgcctcggtcagaattcggaagtgttgatggccctcttccccatcccaggtggtccgctgaggcgagcggaaagcccagcccttctgatcccgggagcggcaccgccactatgatgaatagtagcagtcgaggctccagcccaacgagagtgctggacgaggggaaagtcaacatggcacccaagggaccccctccctttcctggggtgcccctaatgtcgacgcccatgggtggacccgtgccccctcccattaggtacggccccccacctcagctctgcggcccatttggacctcgacccctgccacccccttttggccccggcatgagaccacctttgggcctgcgggaattcgccccaggcgtgccacccggtaggcgcgacttacccctccatccacgagggtttttgcccggccatgctccatttcgcccactgggttcactaggcccacgagaatacttcataccaggaacccgactacccccccctacgcacggtccacaggagtaccctcctccccctgccgttcgcgatcttctgccgagtggttcgagagacgagcctccgccagccagccaatcaactagccaggactgtagccaggcgctgaaacagtccccgtag

SEQ ID NO: 194722 - DNA, 5724 bp, synthetic construct
  misc_feature 1..5724: note = Description of Artificial Sequence: Synthetic coding sequence
  source 1..5724: mol_type = other DNA
atggccgccgcccccggcctgctggtgtggctgctggtgctgcggttgccctggagagtaccagggcagctcgaccccagtactggaaggaggtttagcgagcacaagttatgcgccgatgacgagtgctctatgctcatgtacaggggggaagctctggaagactttacaggccccgattgtagattcgtgaattttaaaaaaggagatcctgtttatgtctattacaaattagcaagaggttggcccgaggtgtgggctggttcagtggggaggacattcgggtatttccctaaggatctgattcaggtagtgcatgagtacaccaaagaagaactgcaggtgcctacagacgagacggattttgtgtgtttcgatggggggcgggacgacttccataactataatgtggaagagttgttaggcttcttagaactgtacaatagcgctgccacagactccgaaaaggcggttgagaagacactccaagacatggagaagaatcctgaactgtcaaaagaacgcgaacccgagcccgagccagtcgaggcaaattcggaggaatctgattccgtctttagcgagaatacagaggatttacaggagcagttcacaactcagaaacatcatagtcacgcaaacagccaggcgaatcatgctcagggcgaacaggcctcttttgaatctttcgaagagatgctgcaggacaaattgaaagtgccagaatccgagaataacaagacgtcaaacagcagccaggtgtctaacgagcaggacaagatcgacgcgtataagctattgaaaaaggagatgaccctagacctcaagaccaagtttgggagtacggccgatgccctggtgagcgatgacgagacaactaggctcgtgacgtccctcgaagacgattttgatgaagaacttgatacagagtactatgccgtagggaaagaggatgaagaaaatcaggaagatttcgatgaactacccctgctgacctttactgacggtgaagacatgaaaactcccgccaagtccggggtagaaaagtaccccacagacaaggagcagaactctaacgaggaggataaagtgcagctgacagtgccccctggcatcaaaaatgacgacaagaatatcctgacaacatggggagatactatcttctcaattgtgaccggcggagaagaaacacgggacactatggacctcgagtctagcagcagtgaggaggaaaaagaggacgacgatgacgcactggtgcccgattccaagcagggcaaacctcagagcgccacggattacagcgatcccgacaacgtagatgacggcttgttcattgttgatatccctaaaacaaacaatgataaggaagtaaacgctgaacaccacattaaaggaaaaggaagaggggtccaagaatcaaaacggggtttggtgcaggataaaactgaactggaggatgagaatcaggaggggatgacagttcactcctccgtgcacagcaataatctcaactcgatgccagccgctgagaaaggcaaagataccttaaagtccgcctacgatgacactgaaaacgatctgaagggagctgccattcacatttccaaagggatgttacacgaagagaaacctggagagcagatcttggaaggagggtccgaatcggagagtgcacagaaggctgccgggaaccagatgaacgataggaaaattcaacaagaaagcctaggaagcgctcccctgatgggggacgatcatccaaacgcctccagagattctgtagagggagatgcgctagttaatggcgccaaacttcataccttaagcgtggagcaccagagagaggagctgaaggaagaactagttctgaaaactcagaatcaaccaagattcagtagtccggacgagatagacttgccccgggaattggaggacgaggtcccaatccttgggcggaacctcccttggcagcaagaacgggacgtcgcagccactgccagcaaacagatgtccgagaagattcggctgtccgagggcgaggccaaagaggacagcctcgacgaggagttcttccaccacaaggccatgcaggggaccgaggtcgggcaaacagatcaaactgatagcaccggaggaccagcctttttatctaaggtcgaggaagatgactatcctagcgaggaactcctcgaggacgagaacgccataaacgcgaaaagatcgaaagagaagaacccgggtaaccagggcagacagtttgatgtcaatttacaggtgcctgatagggctgtgctcggaactatccatcccgatcccgagatagaagaaagcaagcaggagacttctatgatcctcgacagcgagaagacctcagaaacagccgcgaagggggtaaacactggcggacgggagcctaacaccatggtcgagaaggagcgccctctcgcggataagaaagcgcagagaccttttgagcggagcgacttttcggatagtattaagatccagacacctgagctaggcgaagtcttccagaacaaggatagcgattatctgaagaatgacaatccagaggagcacttgaaaacttccggcctggctggagagcccgaaggggaattaagcaaagaagaccacgaaaacacggaaaagtacatggggaccgagtcccagggttccgcagcggctgagccagaggacgattcttttcactggaccccgcataccagcgtggaacctggccacagcgataagagagaagacctgctaatcatatcatctttctttaaagagcaacaaagtctgcaacgctttcaaaaatacttcaatgtgcatgaattggaagcattgctccaagagatgtccagtaagctgaaatccgcgcaacaagagtcactcccgtataacatggagaaggtgctagataaagtgttccgggcctccgagagccagatcctgtccatcgccgagaaaatgttggatactcgagtggccgagaacagagacctcggcatgaatgaaaataatatttttgaagaagcggcagtgctggacgatatacaggacctaatttacttcgtgcgctataagcactcgacagcagaagagacggccacactggtgatggcaccaccactagaggagggactcgggggggcaatggaggaaatgcagccactgcacgaagataacttttctagagagaaaaccgccgaactgaatgtgcaggtccctgaagagcctacccacttggaccagcgcgtgattggagacacccacgcttccgaggtgtcccagaagcccaacacagagaaggatctggatccaggcccagttacgactgaggatacaccgatggatgcaatcgatgctaacaaacagccagagacagcagccgaagaacctgccagcgtgaccccgctcgagaacgctatcctgctaatatattcctttatgttttacctgaccaaaagtctcgtcgcaacgctgcccgacgacgtgcagcccggacccgacttctacggcctgccgtggaagcctgtattcatcaccgctttcttaggcatcgcatccttcgccatattcctgtggaggaccgtcctggtagtgtccaataccgtctattatgtgactgaacagcagatcagcgaaaaactcaagacaataatgaaggaaaacaccgagctggtgcagaaactgagcaactacgaacagaagatcaaagagagcaagaaacacgtccaggaaacgcgaaaacagaacatgatcctcagcgacgaggctattaagtataaagataaaatcaagactctcgaaaagaaccaggaaatcctggacgatactgccaaaaatctccgggtcatgctggaatctgagcgagaacaaaatgttaagaaccaggatctgatctccgagaacaagaagagcatcgaaaaactcaaagatgttatctccatgaacgcaagcgaattttctgaagtccaaatcgctctgaacgaggctaagctctcggaggaaaaagtgaagagcgaatgccatcgcgtccaggaggaaaatgctcggctgaaaaagaagaaagaacagctacagcaggagattgaagattggtcaaagctccatgccgagctctccgaacagataaagtcattcgagaagagccagaaagacttggaagttgctctcacccacaaggatgataatattaatgcactaactaattgtattactcaattgaatcttcttgagtgtgaatctgagtcagaggggcagaacaagggcggtaatgattccgatgaactggctaacggggaggttggcggagaccggaacgaaaagatgaaaaatcagattaaacagatgatggacgtgagccgcacccagactgcaatcagcgtggtcgaggaggacttgaagcttctccagctgaaactgagggctagcgtgtcgaccaagtgcaatttggaggatcaggtcaaaaagctcgaagatgaccgcaactctctgcaggcagcaaaagccgggctggaagatgaatgcaagacactgaggcagaaggtcgagatcttaaacgaactgtaccagcagaaggagatggctctccagaaaaagttgagccaggaggaatacgaacggcaggagagggagcatcggcttagcgccgctgacgagaaagcagtgtctgcagcagaagaagtgaaaacatataagaggagaattgaagaaatggaggacgaactacaaaagaccgaaagatcctttaagaaccaaatcgcaactcacgagaaaaaagcccacgagaactggttgaaagctcgcgctgccgagcgggctatagccgaagagaaacgagaggctgctaacttaaggcataagctcctcgaactgactcagaagatggctatgctgcaggaggagcctgtgattgttaagcccatgcccggcaagcctaacacccaaaatcctcccagacgagggccactcagtcaaaacggatccttcggaccctctcccgtgagtggaggcgagtgttccccgcccctgaccgttgaaccacccgttaggccactctccgctaccctgaatcggagagacatgccccgaagtgagttcggaagcgtagatggcccacttccgcatcctcgctggagtgccgaagcctcaggtaaaccgtccccttccgacccgggatcaggcacagctacgatgatgaattcttcaagccggggcagcagcccaaccagggtgctggatgagggcaaagtgaatatggccccaaaagggcccccgcccttcccaggtgttcctcttatgtcaacccccatgggtggacctgttccacctcctatccgctatggcccccctcctcagctgtgcggaccatttggaccccggcccctgccgccacccttcggccccgggatgcggcctcccttaggcctgagggagtttgctccaggcgtcccaccaggccggcgggacctgccactgcatccaagaggcttcctgcctggacacgctccatttcgaccgttgggctctctgggtccccgcgaatatttcatccctggtacaagactccctccccctacacacggacctcaagagtatccccctcctccggcagtgcgagacttactcccttctgggtctagggatgagccacctccggcctcccagtccactagtcaagactgctcgcaggctctcaaacagtccccgtag

SEQ ID NO: 194723 - DNA, 1503 bp, synthetic construct
  misc_feature 1..1503: note = Description of Artificial Sequence: Synthetic coding sequence
  source 1..1503: mol_type = other DNA
atggccgccgcccccggcctgctggtgtggctgctggtgctgcggctgccctggagggtgcctggtcagctggaccccagcaccgggaggagattctctgagcataagctctgcgcagatgatgagtgtagtatgctgatgtatagaggggaggcattggaggattttacaggtcccgactgccgcttcgtcaacttcaaaaagggggacccggtgtacgtgtactataagctagcccggggctggcccgaggtctgggctggatccgtcggccgcacgttcggctacttcccaaaggacctgatccaagtagtccacgagtacactaaagaggagctgcaagttccaactgacgagaccgacttcgtgtgttttgacggcggcagggacgactttcacaattacaacgttgaagaactgttgggcttcttggagttgtataattccgcggcgaccgattccgaaaaagctgttgagaagactctgcaggacatggagaagaacccagagctaagcaaagaaagagagcctgagcccgagcccgtggaagcaaatagtgaggaaagcgattccgtattctccgaaaatactgaggatctacaggaacagtttacaacccagaagcatcattcacacgcaaatagtcaagccaatcacgcccaaggagaacaggcctcatttgagagttttgaggagatgttgcaggacaaattgaaggtcccagagagtgaaaacaataagactagcaattcctcacaggtttccaatgaacaggataaaatagacgcttataagctgctaaagaaggagatgaccctggacctaaaaaccaaatttgggtccactgcagacgccctcgtctctgacgacgagacgactcgcctggtgacatccctggaggatgattttgacgaggagctggacacagaatattatgcagtagggaaggaagatgaagagaatcaggaggacttcgatgaactgcctctcctcacgtttactgatggtgaggacatgaaaactccggcgaagagtggcgtggagaagtatccgacagacaaggaacagaatagcaacgaggaagataaagtccagctaactgtgcctcctggcatcaagaacgatgataagaatattcttacaacatggggcgacacgatattttccatcgtaactggaggcgaagagacccgggacacaatggacctagagagcagcagctccgaggaggagaaggaggatgatgatgatgctttagtgccagacagcaagcagggcaagccacagtccgctacggattacagcgatcctgacaacgtggatgacgggctgtttattgtggatatcccaaagacaaacaatgacaaggaggttaacgcagaacaccacattaagggcaaaggacgtggagtgcaggagagcaaaaggggcttggtgcaggacaagaccgagcttgaagacgagaatcaggagggcttcaagaccgaaccgatcaaattgtag

SEQ ID NO: 194724 - DNA, 5724 bp, synthetic construct
  misc_feature 1..5724: note = Description of Artificial Sequence: Synthetic coding sequence
  source 1..5724: mol_type = other DNA
atggccgccgcccccggcctgctggtgtggctgctggtgctgcggctaccctggcgagttcccggccagttagatccgtccactggtaggagattcagtgagcataagctgtgtgccgacgatgagtgttccatgctgatgtaccgcggggaagccctggaagatttcactggcccagattgccgcttcgttaattttaaaaaaggagacccggtctatgtttattataaactcgcccgcggctggccggaggtctgggccggctccgttgggcgtactttcgggtacttcccgaaggatttgattcaggtcgttcacgagtacacaaaggaagaacttcaggtgccaaccgatgagaccgacttcgtgtgttttgatggaggcagagatgacttccacaactataatgtggaagagctgttaggctttctggagttgtacaattccgctgctacagattctgagaaagccgtcgagaaaaccctacaggacatggagaaaaaccccgaactcagcaaagaaagggaacctgaacccgagccagtggaagccaacagcgaagagagcgactcagtctttagtgagaacacggaggacctgcaggaacagtttactactcagaaacatcacagccacgctaactcacaggcaaatcacgcccagggagaacaggccagctttgagtccttcgaggaaatgctccaggataaactcaaagtacctgagagcgaaaataataaaacaagcaacagctctcaggtgtctaacgaacaagacaaaatcgatgcctataaacttctcaagaaagagatgacattagatttgaagaccaaatttggcagcaccgctgatgccctcgtgtccgatgatgaaactactcggttagttacctccctggaggacgattttgacgaagaactggacacagaatactatgcagtgggtaaggaagacgaggaaaaccaagaggacttcgacgaattacctttgctcaccttcaccgatggggaggatatgaaaacccctgcaaaatctggagtcgaaaagtaccctacagacaaggagcagaactcaaatgaagaggacaaagtccagttgaccgtgcctcccggcatcaagaacgatgataagaacattctcaccacgtggggtgacaccattttctccattgttacaggcggagaggaaacacgggataccatggacctcgaatctagctccagtgaggaggaaaaagaggatgacgacgacgccctcgtaccggatagtaagcagggcaagcctcagagtgcaaccgactactccgacccagataacgtggacgatggactttttattgtcgacataccgaaaaccaataatgataaggaagtcaacgccgagcaccatattaaggggaagggccgcggagtgcaggagtcaaagcggggccttgttcaggacaagaccgagctggaggacgagaatcaggagggtatgacagtacattcttccgtccattctaataatctgaattccatgcccgccgctgagaagggtaaagacactctcaagtccgcatacgacgatacagagaacgatcttaagggggcggcaatccacatctcaaagggaatgctgcacgaagagaaacccggcgagcaaattctggagggcgggagcgaaagcgagagcgctcagaaggccgcggggaatcagatgaacgaccggaagatccagcaggagagcctggggagcgctcccctcatgggggatgaccaccccaatgccagtagggatagtgttgaaggcgacgcgctcgtcaacggggcaaaactgcacaccttgtccgttgagcaccagcgagaggaactgaaggaggaattagttttgaaaactcaaaatcagcctaggttctctagccccgacgagatcgatctacccagagaactcgaggacgaggtccctatcctaggccggaatttgccctggcagcaggagcgcgatgtggctgcaaccgcctcaaaacaaatgtctgaaaagatcagactgtctgagggggaagctaaggaggattcccttgatgaggagttcttccaccacaaggcgatgcaggggactgaagtcggccaaacagaccaaacagattctaccgggggccccgcattcctgtccaaggtggaggaggatgactaccctagcgaagagctattagaagacgagaatgctattaatgccaaacgcagcaaagagaagaatccaggcaaccaaggaagacagtttgacgtaaacttacaggttcccgatagggctgtgctcggtacgatccatcccgaccctgaaatcgaagagagcaagcaggaaacaagcatgattcttgattcagagaagacatcagagaccgctgcaaagggtgttaacacaggcggccgggagcctaatacaatggtggaaaaggagcgtcccctggctgacaaaaaagcacaaagaccctttgagcgtagcgatttctcagactcaattaagatccaaaccccagagctgggggaggtatttcagaataaggactcagactacctgaagaatgacaatccagaggaacacttgaagacctccggacttgctggggaacccgaaggcgagctcagcaaggaggaccatgagaatactgagaagtatatgggaactgagtcacagggatcagcagccgcagaaccggaggacgactccttccactggacaccccatacctcagtggagccaggtcactccgataagagggaagatttactcatcatatcgagtttctttaaagagcagcagagccttcagagattccagaagtattttaacgttcatgaactggaagccctgttgcaggagatgagtagcaagttgaaatcggcgcagcaagagtctctgccctacaatatggagaaggtcctggataaggtgttccgggcctccgagtcacagatcctctctatcgctgaaaagatgctggacacacgggtggctgaaaacagggacctcgggatgaatgaaaataatattttcgaagaggcggctgtattggatgacatacaggatctgatctatttcgttcggtataagcatagtactgccgaagaaacggccactctcgtcatggccccccctctagaagaagggttgggcggagccatggaggagatgcagccactacatgaagacaatttctcccgcgaaaagacggccgagctcaatgttcaggtgccagaggagccaactcatctggaccaaagagtcatcggcgacactcacgcttcagaagtctcccagaaacccaatactgaaaaggatctggaccccggtcccgtgactaccgaggatacgcctatggatgccattgatgccaacaagcagcccgaaaccgccgcagaggaaccggcctctgtcacacccctggagaatgctattttgctgatatacagctttatgttctatttgacaaaatcactcgtggccaccttgccagatgacgtgcagccagggcccgatttctacggcttaccctggaagcccgtgtttatcactgcattccttgggattgccagcttcgctatctttctttggcgtaccgtcctcgtggtgaaagaccgagtttatcaagtaaccgaacagcagatttctgaaaagctgaaaactatcatgaaagagaacactgagctggtgcaaaagctgtccaattatgagcagaaaattaaagaaagcaaaaagcatgttcaggaaacgcgcaaacagaacatgattctttccgacgaggccattaagtacaaggacaagataaagaccctcgaaaagaaccaggaaatacttgacgataccgcaaaaaacctcagagtcatgctggaaagcgaacgcgaacagaatgtgaagaaccaggacctgatttcagagaacaagaaaagcatcgagaaactcaaggacgtgatttcgatgaacgccagcgagttttcggaagtccagatcgctttgaacgaggcaaagcttagcgaggagaaagtgaagagtgaatgccaccgggtacaagaggaaaatgccagactaaaaaagaaaaaggaacagttacagcaggagattgaggactggagtaagcttcatgctgagctgagcgagcagatcaaatcatttgagaaaagccagaaagacctggaggtggcgctgacccacaaggatgacaacattaatgcactgacaaactgtattacccagctgaacctactggaatgtgaatcggaaagcgaaggccagaataaaggtgggaatgattcagatgagctggcaaatggtgaggtgggcggtgatagaaacgagaagatgaagaatcagattaaacagatgatggatgtttcaagaacacaaactgcgatctccgtggtggaagaagaccttaagcttctacagcttaagttacgcgcaagcgtatccacgaaatgcaacctagaggatcaggtgaagaagctcgaggatgataggaattcactacaggcagccaaggccggcctggaagacgaatgcaagactcttcgtcagaaagtcgagatcctgaacgaactttatcaacagaaagaaatggccttgcagaagaagctgagccaggaagaatacgaacggcaggagagagaacatcgattgagcgcggccgacgagaaggcagtgagcgctgccgaggaagtaaaaacttacaagagacgtatagaagagatggaagatgaattgcaaaaaactgagaggtccttcaagaatcagattgccacgcacgagaaaaaggcccatgaaaactggttgaaggcaagggccgccgagcgggccattgcagaggagaagcgggaggctgcgaatttgagacataagttacttgagcttacccagaagatggctatgttacaggaggagcccgtcatcgtcaagcctatgcccggaaagcctaatacgcaaaacccaccgcgccggggtcccctttcacaaaatggcagctttggacctagccccgtcagtggtggggagtgtagccccccactaactgttgagcctcccgtgcggcccctcagcgcaaccctgaaccgcagagatatgccgaggtctgagtttgggagcgtggatggcccactgcctcatccgaggtggagtgctgaggcctcgggcaaaccctcgccgtccgatccaggatcaggaacagccaccatgatgaattcgtcttctcgcggctcgtctcctacaagggtgctcgacgaggggaaagtgaacatggccccaaagggaccgccccctttccccggagtccccttgatgtccacccccatgggcggccctgtcccacccccaattaggtatgggcccccacctcagctctgcggcccattcgggccacggcccttacctccaccctttggtcctggcatgagaccacccctcgggcttcgagagttcgctcctggagtgcctcctggcagaagggacctccctcttcacccccggggcttcctccccggccatgcgccattccgtcctttgggcagcttaggcccgcgagaatacttcataccggggactagactgcccccaccaacccacggaccgcaggaatacccccccccacctgccgtgcgagacctgctaccaagtggaagtcgggatgagccaccgcccgcaagccagagtacctcgcaggattgctctcaagccttgaagcagtctccttag

SEQ ID NO: 194725 - DNA, 3051 bp, synthetic construct
  misc_feature 1..3051: note = Description of Artificial Sequence: Synthetic coding sequence
  source 1..3051: mol_type = other DNA
tgactggtgcccgacagcaagcagggcaagccccagagcgccaccgactacagcgatccagataacgtggatgacggcttgtttatcgtggacatccctaaaaccaacaacgacaaggaagtgaacgcagagcaccacataaaaggaaagggcagaggcgtgcaggaatccaagcgggggctcgtgcaggataagaccgagctggaggacgaaaaccaggagggaatgaccgtgcacagtagcgtacacagcaataatctcaattccatgcccgcagccgagaaaggcaaagatactcttaagagtgcttatgacgacacagaaaacgacctcaagggggcagcaatccacatctctaaagggatgttgcatgaagagaagccgggcgaacaaattctggaggggggcagcgaaagcgagagcgcacagaaagcggccggcaatcagatgaacgatcgcaaaatccagcaggagtccctcggaagcgcgcctctaatgggcgatgaccaccccaacgcgtcaagagactcagtcgaaggagacgctctcgtgaacggtgccaaattacatactctctctgtggagcaccaaagagaggagctgaaggaagaactggtactgaaaactcaaaaccagcctcgcttctcatccccagatgagatcgatctgcccagagaactggaggacgaggtcccaatcctgggtcgcaacttaccgtggcagcaggaacgagatgtggccgccaccgcctctaaacagatgtcagaaaaaatcagactctcagagggcgaggccaaagaagatagcctggacgaagagttctttcaccataaggcgatgcaaggaactgaagtgggacagaccgatcagactgatagtacaggtggcccagcatttctgtctaaagtggaagaagacgattatcctagcgaagagttgcttgaggatgaaaatgctattaacgcaaagcgatctaaggaaaagaatcccgggaaccagggccgacagtttgacgttaatctccaggtgcctgatagggccgtccttgggaccatccacccagaccccgagatcgaggaatcaaaacaggaaaccagtatgattctcgattccgaaaaaacatcagagacggcggctaaaggggtgaataccggggggagggagcccaatacaatggtggaaaaagaacgtcccctggcggacaagaaagcccagaggccattcgagaggagcgacttcagtgattccattaaaatccagacaccggaactcggcgaggtgttccagaataaagacagcgattacctgaagaatgataatcccgaagagcatctgaaaacctctggactagccggagagccagaaggcgagctcagtaaggaagatcacgaaaataccgagaaatatatgggtactgagagccaaggatctgctgccgccgaaccagaagacgattcctttcattggacacctcacaccagcgtggagcctggacactccgataagcgcgaagatctcctgatcatcagctcattttttaaagaacagcagtcgctacaaagattccagaagtatttcaacgtgcacgaactggaggccctcctccaggaaatgtcctccaaactgaagtccgctcagcaggaatccctgccctataacatggagaaagtgctcgataaagtattcagggcctccgagtcacaaatcctaagtatagccgaaaaaatgctagatacaagggtagccgagaaccgggacctcggaatgaacgaaaataacattttcgaggaagccgcggtgctagatgacatccaggatctcatctacttcgtgcggtacaagcactccaccgccgaggagacggccaccctcgtgatggcccctcctctcgaagagggcctcggcggggccatggaagaaatgcagccactgcacgaggacaacttctcgcgagaaaagacagcagaactgaacgtgcaggtaccagaagagcccacccacttggaccagcgtgtgatcggggacacccacgcatctgaggtgtcacaaaagcccaatacagaaaaagatcttgaccccgggccggtgacaacagaagacacccccatggatgccatcgatgcaaataagcaacccgagactgccgcagaagagcccgcttcagtgacccctctggagaatgccatcctgttgatttactccttcatgttttacttaaccaagtctctcgtcgctacccttccggacgatgtgcagccgggaccagacttctatggcctcccttggaaaccggtgtttatcacagcatttctcggcattgcttcatttgcaattttcttgtggcgaactgtactggtcgttaaggatcgcgtgtaccaagtaaccgagcaacaaatcagcgagaagcttaagaccattatgaaggaaaacaccgagctggtgcagaaactgagtaactacgaacagaaaatcaaggagtcaaagaagcacgtccaggaaacaaggaagcagaatatgatcctatccgatgaggccattaagtataaagataagatcaaaactctcgaaaaaaatcaggagatactcgatgataccgcgaaaaatttgcgagtgatgcttgagtctgagagagagcagaacgtcaagaatcaagatctgttgcaacaagagatagaagattggtcaaaactgcacgctgagttaagcgagcagataaagtcctttgagaagtctcaaaaagacctcgaggtggccctgactcataaagatgacaacataaacgcacttaccaactgcattacacagttgaatctcctcgaatgtgaatccgagagtgaaggacaaaacaagggagggaacgacagcgacgagctggccaatggcgaagttgggggagacagaaatgaaaagatgaaaaaccagatcaagcaaatgatggacgtctccagaacgcagacagcgataagtgtagtggaggaggaccttaagctgttacagttgaagctgcgcgcatctgttagcactaaatgtaacctggaggatcaggtctag

SEQ ID NO: 194726 - DNA, 324 bp, synthetic construct
  misc_feature 1..324: note = Description of Artificial Sequence: Synthetic coding sequence
  source 1..324: mol_type = other DNA
tgaagcgccgaggccagcggcaagcccagccccagcgaccccggcagcggtacagccactatgatgaatagctctagtcgcggatcgtctccaactcgagttcttgatgaggggaaagttaacatggcacccaagggcccacccccattccccggcgtccctctgatgtcgacccccatgggcggacctgtgcccccccccatacgttacgggcctcctcctcaactctgcgggccctttgggccaaggcctcttccgcccccttttgacaaggatgggcgcccaggaaccgtggctcatgcatgtaacccatctaccctctag

SEQ ID NO: 194727 - DNA, 1803 bp, synthetic construct
  misc_feature 1..1803: note = Description of Artificial Sequence: Synthetic coding sequence
  source 1..1803: mol_type = other DNA
atgggcaagaagctggacctgagcaagctgaccgacgaggaggcccagcatgtgcttgaggttgtacaacgggactttgacctgcgacgtaaggaggaggagcggctggaagccctgaaaggtaaaatcaagaaggagagcagcaagagagagcttctcagcgacacagcacaccttaacgagacgcattgtgcacgctgtctacaaccataccagttactggtgaactccaagcggcagtgtctcgaatgtggtctgtttacctgcaagtcctgcggccgggtgcaccccgaagaacaggggtggatctgcgatccctgtcacttagctagagttgtaaaaatagggagtctggaatggtattacgaacacgtgaaagcaaggtttaaaagattcgggtctgcaaaggtcatccgatcactacatgggaggctccaggggggggccggtccagagctgatctcagaggaacggtcaggggattctgaccagacggacgaagacggtgaaccaggttctgaagcccaagcgcaagctcagccgttcggcagcaagaaaaaaaggctactgagtgtgcacgattttgacttcgaaggcgactcagatgatagtactcagccccaaggacactctctccatctgagcagcgtgccagaggcccgggatagtcctcagtcactgaccgatgaaagctgttcagagaaagccgcgccgcacaaagcagagggcttggaagaagccgacacaggtgcctcaggttgccatagccatccggaggagcagcctacatccatatcaccttctcggcacggtgccctggccgagctgtgtcctccaggcggctcacaccgaatggccctcggaaccgccgctgccctgggatctaatgtgatccgtaatgagcagcttccactgcagtacctcgctgatgtggacacttccgatgaggagagcatcagggctcacgtgatggcatcacaccactccaagcgcagaggacgcgcctcgagtgaaagtcagatatttgagctgaacaaacacatctcagccgtagagtgtctgcttacttatctagagaacacagtcgtcccgcccctggccaaaggcttaggcgccggcgtgcggactgaggccgatgtggaagaggaggccttacgaagaaagttggaggagcttacctccaacgtcagtgaccaggagactagtagcgaagaagaggaagccaaggacgagaaggccgaacctaatcgcgacaaaagtgtcggtccactgccgcaggccgatcctgaggtgggtactgcagcccaccagacaaaccgtcaggaaaaatcccctcaggacccaggcgacccagtgcagtacaaccggacgaccgatgaggagctgtcagagctcgaagatcgagtggccgtcacggcctccgaagtccagcaggcagagtcagaagtgtctgatatcgaatcccggatcgctgctctgagagccgccggcttgaccgtgaaacctagcggcaagccaagaaggaagtctaacctcccaatctttctccctagagtggcaggcaaattaggcaagcgaccagaggatcccaacgcagatccttcctccgaggccaaggcaatggccgtgccctacctattacggcgcaaattctctaatagcttgaaaagccaaggcaaggatgatgattcattcgataggaaatccgtttacagggggtccttaacgcagcgcaatcctaacgcccggaagggaatggcttctcacacttttgctaaacccgttgtggcccaccagtcttag

SEQ ID NO: 194728 - DNA, 1719 bp, synthetic construct
  misc_feature 1..1719: note = Description of Artificial Sequence: Synthetic coding sequence
  source 1..1719: mol_type = other DNA
atgggcaagaagctggacctgagcaagctgaccgacgaggaggcccagcacgtactggaagtcgtccagcgggactttgatctgcggaggaaagaagaagagcggctggaggcgctcaagggcaagattaagaaagaatcttctaagcgcgagcttctgagtgacaccgcccacctgaacgaaacgcattgcgccagatgccttcaaccttaccagcttttggtgaattcaaagagacagtgtctcgagtgcggcctgttcacctgtaagagttgcggacgggtgcatccagaagagcaggggtggatctgtgatccatgtcacttggcgagagtggtgaaaatcggcagcctggaatggtactatgagcatgtcaaggccagattcaaacgattcggctccgccaaagttatccggagcctccacggacggctgcaaggcggagccggcccggagctgattagcgaggaacgatccggagattcagatcagactgacgaggacggggagccgggctccgaagcacaggcacaggcacaaccctttggaagcaagaaaaaaaggctgctgagcgtccatgactttgactttgaaggggattcagatgattccacacagccgcaaggacactctttgcacctctcttcggtcccagaggccagagactcgccccagtcactgacagacgagtcctgcagtgaaaaagccgcaccacacaaagctgaggggttggaggaggcagatactggagcgtctggctgccacagccaccccgaggagcagccgacatccattagcccctcgaggcacggtgcgctggctgaactgtgtccaccaggcggctctcaccgaatggccctaggcaccgcagccgctctgggctctaacgttataagaaacgaacagctgccactgcaatacctggctgacgttgacacaagcgacgaagagtccattagagctcacgtgatggcaagtcaccattcaaaacgccgagggagagcctcatccgagtcgcaaggcctaggggccggggtgcgcacagaagcagatgtggaagaagaagctctcaggagaaagctggaggagctcacctcaaatgtcagtgatcaggaaacaagttcggaggaagaagaagctaaggatgaaaaggcggaacctaatagagacaagagtgtggggcccttaccccaggcggaccccgaggtaggcaccgctgcccatcagaccaaccgccaggaaaagtcaccccaggacccgggtgatcctgttcaatataatcgcactaccgatgaggagctgtctgagttagaagatcgtgtggcagtgacagctagcgaggttcaacaggccgagtctgaggtttctgacatcgaatcccgaattgcagctctgagagccgctgggctaacggtcaagcccagcggcaaacctcgacgaaaatcaaatttgcctatctttctgcccagggtggccggaaagctgggtaagagaccagaagatcccaatgccgatccaagtagcgaagcaaaggctatggcggtgccttacctgctccggaggaagttctctaattcactgaaatctcaaggcaaggatgatgattcctttgacaggaaaagtgtctaccgtggatcactcacgcagcgtaatccaaacgcgcggaaggggatggccagccacacctttgctaagccagtcgtggcccaccagtcctag

SEQ ID NO: 194729 - DNA, 396 bp, synthetic construct
  misc_feature 1..396: note = Description of Artificial Sequence: Synthetic coding sequence
  source 1..396: mol_type = other DNA
atgggcaagaagctggacctgagcaagctgaccgacgaggaggcccagcacgtgctggaggtggtgcaacgggatttcgatcttagaagaaaagaggaagaaagactggaggccctcaagggcaagattaagaaggagagtagcaagcgcgaactactctcagacactgctcacctcaatgaaacacactgtgctcggtgcctacagccttaccaactacttgtgaactccaagaggcagtgtctcgagtgtgggctcttcacctgcaagagctgtggcagggtgcatcccgaggaacagggatggatctgcgacccgtgtcacctggcccgcgtggtaaagataggatcattggagtggtactatgagcatgtcaaggcgaggttcaaacgatag

SEQ ID NO: 194730 - DNA, 213 bp, synthetic construct
  misc_feature 1..213: note = Description of Artificial Sequence: Synthetic coding sequence
  source 1..213: mol_type = other DNA
atgggcaagaagctggacctgagcaagctgaccgacgaggaggcccagcacgtcctggaagtggttcagagagacttcgacctccgcagaaaagaggaggagcggctagaggcgctgaaaggcaagatcaaaaaggaatctagcaaaagagaactgttatcagacaccgcccaccttaatgaaactcactgcgcacggtgcctgcagccgtag

SEQ ID NO: 194731 - DNA, 1656 bp, synthetic construct
  misc_feature 1..1656: note = Description of Artificial Sequence: Synthetic coding sequence
  source 1..1656: mol_type = other DNA
atgggcaagaagctggacctgagcaagctgaccgacgaggaggcccaacacgtgctcgaagtggttcagcgcgactttgacctacgcaggaaggaagaggagcgcctggaggctctcaagggcaagatcaagaaggaatccagcaagcgagagttgctgtctgatacagcccatttgaacgaaacacattgcgcacgctgcctgcaaccgtaccaactgctcgtgaactcaaagaggcaatgcttggagtgcgggctttttacatgcaaaagttgcggacgagtgcacccagaggaacagggttggatttgtgatccatgtcatcttgctcgagttgtaaagattggttctttagaatggtactacgaacacgttaaggcccgatttaagcggttcggaagtgctaaggtgatccggagtctgcacggtcggcttcagggaggagcaggccctgaactcatttccgaggaacggtccggcgattcagaccagacagacgaggacggagaacctggaagcgaggcccaagcccaagcacagcccttcgggtccaagaaaaaacgcctactgagtgtgcacgatttcgactttgagggagattcagatgattccactcagcctcagggccactcactccacctgtctagcgtacccgaagcaagggattctcctcaatccctgaccgacgagtcatgcagcgaaaaggccgccccccacaaagctgaaggattagaagaggccgatactggggctagcggttgtcactctcatcccgaagaacaacccacgtcaatatctccctcaagacacggcgctcttgcagagctgtgtccgccaggcggctcacacaggatggccttgggcacggctgcggcattgggctctaatgtcattagaaacgagcaacttcccttgcagtacctggcagacgtcgacaccagtgatgaagaaagcatcagggcgcacgtcatggcgtcgcaccactctaagcgccgcggccgcgcttccagcgaatcacagatatttgagctgaataaacacatctccgcagtcgaatgtctcctgacataccttgagaatacggttgtgccccctctagccaagggacttggggcaggggtgaggacagaagccgacgtcgaagaagaggctcttagaagaaaattggaagaactgactagcaacgtctctgatcaggagaccagttctgaggaggaggaagccaaagatgagaaggcagaaccaaacagggacaagtcggtgggcccattgccccaagctgaccctgaggtgggcactgccgcacaccagacgaataggcaagagaagagcccacaggaccctggggaccctgtgcagtacaataggactaccgatgaggagctttccgaattggaggatagggttgctgtgacggcctccgaagtacagcaggcagaatctgaagtcagcgacattgagtcccgtatagccgcactgcgggcagcaggcctgaccgtgaagccatccggcaaaccaagaagaaagtcgaatctgcctgctctctatgaagggacgctgtccctttgttcggaggatcttaagcatacgcacccagactcggtgaagagtaaacggtctcggttaaatcacgtagcttcatgtggtaatccatag

SEQ ID NO: 194732 - DNA, 675 bp, synthetic construct
  misc_feature 1..675: note = Description of Artificial Sequence: Synthetic coding sequence
  source 1..675: mol_type = other DNA
atgggcctgcgggactggctgcggaccgtgtgctgctgctgcggctgcgaatgcctcgaggaacgcgccttaccggagaaagagccactggttagtgacaacaatccatatagcagttttggtgccacactagtcagggatgatgaaaaaaatctgtggagcatgccccatgatgtaagtcacaccgaagctgacgacgatagaaccttatacaacctgatagtaatacggaatcaacaagctaaagattcagaggagtggcaaaagctgaattacgatattcacactcttaggcaggtcaggcgcgaggtgcggaaccggtggaaatgtattctggaggatctggggtttcagaaagaagccgacagcctactgtccgtcacaaaactctcaacaattagtgactcgaaaaatacccggaaagcaagggaaatgctgctgaagctggccgaagagactaatatctttccgacgtcttgggaactatctgaaagatacctatttgtggtggatagattaattgctctcgatgctgcggaagaatttttcaaactggcaaggcgtacatacccaaagaaaccaggggtcccatgtttggcagacgggcagaaagagctccacttatggggggacctgtcttgcaggctcgctcacatgcagggagtgcttcattag

SEQ ID NO: 194733 - DNA, 645 bp, synthetic construct
  misc_feature 1..645: note = Description of Artificial Sequence: Synthetic coding sequence
  source 1..645: mol_type = other DNA
atgggcctgcgggactggctgcggaccgtgtgctgctgctgcggctgcgagtgtttggaagagagggctctgccagagaaggaacccctagtgagcgacaacaatccgtacagctcatttggagctactctcgtgagagatgacgaaaagaacctttggtctatgccacacgatgtgagtcacacggaagccgacgatgacaggaccctctataatctgatcgttatccgcaaccagcaggcaaaagactcggaggaatggcagaaactgaactacgacatccacacccttcgccaggtgagaagggaagtgaggaaccggtggaagtgcatactggaggaccttgggttccagaaagaggctgactctctgttgagcgtgaccaaattgtcgactatatccgacagtaaaaacacccgaaaagcccgggagatgctgctgaaactcgccgaggagacgaacatatttccaacctcatgggagctctctgagaggtacctgttcgtggtggataggcttatcgccttggatgctgctgaagaatttttcaaattggctcgtcgcacctatccaaaaaagcctggagtgccttgcctggctgacggccagaaggaactccactacctgcctttcccaagcccttag

SEQ ID NO: 194734 - DNA, 645 bp, synthetic construct
  misc_feature 1..645: note = Description of Artificial Sequence: Synthetic coding sequence
  source 1..645: mol_type = other DNA
atgggcctgcgggactggctgcggaccgtgtgctgctgctgcggctgcgaatgtctggaagaacgagcactcccggaaaaagaacctctcgtgtctgacaacaacccctatagcagcttcggggctactcttgtacgagacgacgaaaaaaacctttggtccatgccccacgacgtttctcataccgaagccgacgatgataggactctgtacaatctgattgttattaggaaccagcaggccaaggactccgaagagtggcagaagctgaattacgatattcataccttgcgccaggtgcgaagagaggtgagaaacagatggaaatgcattctcgaggatctagggtttcagaaggaggccgacagtttactctccgttaccaagctgtcgacgatctctgattccaaaaacaccaggaaagcgagggagatgcttctgaaactggctgaggaaacgaacatcttccctacatcctgggaattatccgaaaggtacttattcgtcgtggatcggctcatagcacttgacgcagcagaggagttcttcaagctggccaggagaacgtaccccaagaagcctggcgtcccatgcttagcggatggacaaaaggagctgcactacctgccattcccctcgccatag

SEQ ID NO: 194735 - DNA, 1053 bp, synthetic construct
  misc_feature 1..1053: note = Description of Artificial Sequence: Synthetic coding sequence
  source 1..1053: mol_type = other DNA
atgcagggcaacggcagcgccctgcccaacgccagccagcccgtgttgcgcggagacggtgctcgcccgtcatggctcgcgtccgcattggcctgtgtgctaatcttcaccatcgttgttgacatcctgggaaatctcctggttatcctatcagtctacaggaacaaaaagctgcggaatgcagggaatatctttgtggtcagtctcgccgtagctgacttggtcgtcgctatctacccctaccccctagttctgatgagtatttttaacaacggatggaatctaggctacctgcattgccaagtctctggctttctgatggggctcagtgtgatcggatcgatcttcaacatcacaggaatcgccattaataggtactgctacatctgtcattcattgaaatatgacaagctttactcctccaagaacagcctgtgctatgtgcttctgatatggttgctcaccctggccgcagtgctacctaacctgagagcgggaaccctccagtacgacccaagaatctatagttgcaccttcgcccagagcgtaagttcggcctatactattgctgttgtggtcttccactttttagtgccaatgattatcgtgatcttttgttaccttcgcatttggatcctggttcttcaggtgcgccagcgagtgaagccagaccggaagccaaagctgaaaccacaggatttcaggaatttcgttacaatgttcgtagtgttcgtcctgttcgcgatttgctgggctcctctcaatttcatcgggttggccgtcgcttctgatcctgcctctatggtcccacgaattcccgagtggctcttcgtggctagttactatatggcctacttcaactcctgtctcaatgctattatttatggccttctgaatcagaatttcagaaaggagtaccgtcgaatcattgtgagcctgtgtactgctcgagtgttcttcgtcgattcgagtaatgacgtggctgatcgagtgaagtggaagccaagccctctgatgacgaataacaatgtggttaaggtcgacagcgtttag

SEQ ID NO: 194736 - DNA, 1089 bp, synthetic construct
  misc_feature 1..1089: note = Description of Artificial Sequence: Synthetic coding sequence
  source 1..1089: mol_type = other DNA
atgagcgagaacggcagcttcgccaactgctgcgaggccggcggctgggcagtcagacctggctggtccggcgccggaagcgccaggccctccagaacaccacgtccaccgtgggtcgcgccagctctttccgccgtgctaatcgtcaccaccgccgtcgatgtggtggggaacctgctcgtgatcctgagcgtcctccggaacagaaagctacgaaacgcaggaaacctgttcctcgtgtccctggcactggcagacctggttgtcgccttttacccttaccctctcattctcgtagccatcttctatgatggctgggcccttggcgaggaacactgtaaggcctcagcttttgtgatggggctatctgtcatcgggtctgtctttaatattactgcgattgccatcaaccgctattgctatatctgtcatagcatggcataccaccgtatttaccgtcgctggcacacgccacttcatatttgcttaatctggctcctcacggtcgttgcgctgctgcccaatttctttgttggctccttagagtacgatccacgtatctatagctgtacattcattcaaacagcaagtacacagtacactgctgccgtggtggttatccactttctgctgcccatcgccgtggttagtttttgctacctgagaatctgggtccttgtgcttcaagcaaggaggaaggccaagcccgagtctaggctgtgtctgaagccctccgatctgcgatccttcctcactatgttcgtggtgttcgtgatcttcgctatctgttgggcacccctgaattgcattggtttggccgtcgctataaaccctcaagagatggccccgcaaatccccgaggggttgttcgtgacatcttacctgttagcctacttcaatagctgcctgaatgctattgtttatgggctcctgaaccaaaactttcgtagggagtacaagagaatcctattggcactctggaacccaaggcactgcatccaggacgcaagtaaggggtctcacgcagaggggctccaatcccccgccccccctatcatcggtgtgcaacaccaggccgacgccctgtag

SEQ ID NO: 194737 - DNA, 3864 bp, synthetic construct
  misc_feature 1..3864: note = Description of Artificial Sequence: Synthetic coding sequence
  source 1..3864: mol_type = other DNA
atgagcaaggtgatccagaagaagaaccactggaccagccgggtgcatgagtgcacagtgaaacgaggcccccaaggcgagctaggggtgaccgtgctgggtggcgctgagcacggagaattcccctatgtgggagcggttgcagctgtggaagcggccggactgcctggcggaggagaaggcccccggctcggagaaggagaactgctgctggaggtgcagggggtgagagtctccggcctaccacggtacgacgtgctgggcgttatcgactcatgcaaagaggccgtgacgtttaaggcagtcaggcagggtggtcgattgaacaaagacttgaggcactttctcaaccagcggtttcaaaaagggtctcctgaccatgagctccagcaaaccattcgcgataatttgtatagacatgcggtcccttgtaccactcgaagccctcgagaaggcgaggtgcctggtgtagactacaacttcttaacagtgaaggagtttctggatctggaacagtccggtaccctgctggaagtcggcacgtacgagggaaattattacggcaccccaaagccaccctctcaaccagtatcaggaaaggttatcacaactgacgctctgcatagtcttcagtcagggagtaagcagtccaccccaaagcgaactaaatcctacaacgatatgcagaacgcggggatagtacacgctgaaaatgaggaagaagatgatgttcccgagatgaactcgtcttttacagcagactctggtgagcaagaggaacacacattgcaggaaaccgctctgccgccagtgaactcctcaataatcgccgcgccaatcaccgaccccagccagaaatttccgcagtatcttcctttgtccgccgaagacaacctcggccctctgcccgagaattgggagatggcatacacggagaacggggaggtgtacttcattgatcacaacaccaagacaacgagctggttggaccccagatgccttaataagcagcaaaaaccgctggaggaatgtgaggatgacgagggagttcacacagaggagctggattctgaactagagctacccgcaggctgggagaaaattgaggatccggtgtacgggatttactatgttgatcatatcaaccgcaaaacccaatacgaaaacccggtgctggaagctaagcgaaaaaagcagcttgagcaacagcagcagcagcaacaacagcaacagcagcaacaacaacagcagcagcagcaacagacagaggaatggaccgaagatcacagtgcactggtgcccccggtaattcccaaccatccaccatcgaatcccgaacctgcacgggaagtgcctctgcaagggaagcccttctttacgcggaacccaagcgagcttaaaggtaagttcatacatactaagctcaggaaatcttcccgcggatttggattcaccgtcgtcgggggggacgaaccggacgagttcctgcagatcaaatccctggtgctagacggacctgctgctcttgacgggaaaatggagacaggagatgtgatcgtgagcgttaatgatacctgcgttcttggtcacacccacgcccaggtggttaagattttccagagtatcccaatcggggcaagcgtggacctggagctgtgccgtggttatcctctcccctttgatcctgacgatcctaacaccagtctagtgaccagcgtcgctatcttggacaaggaaccaattatcgtgaacggccaggagacctacgacagtcccgccagccacagctccaagaccggcaaagtgaacgggatgaaggacgctcggccaagctctcccgctgacgtggccagtaattcgtcccacgggtaccccaacgataccgtgtccctggcgtctagcattgcgacccagcctgagctgattacggtgcatatcgtcaaggggccgatggggttcggctttaccattgctgactcccctggtggaggcggtcagagagtgaagcagatagtggacagccccaggtgccgagggctgaaagagggagatctcattgtggaggtgaacaagaagaatgttcaggcactgactcataatcaggtcgttgacatgctggtcgaatgtccaaagggtagtgaggttaccctgctggtgcagagaggaggccttcccgtaccgaaaaagtcaccgaaaagccagcctttggaacggaaagactctcagaactcttcccaacactccgtctcctctcaccgctcgcttcatacagctagtccctcccattccacccaggtgctgcccgaattccccccagcagaggcccaggctcctgaccagacagatagcagcgggcagaaaaagcccgacccattcaaaatctgggctcagtcaagatcaatgtatgaaaataggcccatgtccccaagtcccgcttcaggtctaagcaagggggagcgagaacgggaaattaattctactaacttcggcgagtgtcccatcccagattaccaggagcaggacatttttttgtggcgaaaggaaacgggctttggttttaggattctggggggcaacgaacctggcgagccaatttacatcgggcatattgtgcccctgggcgccgcggacacagacggccgcctaaggtccggtgatgaactgatttgcgtggacgggacgcccgtcatcggaaaatcccaccaactagtggttcaattgatgcagcaggctgccaagcagggacacgtgaatttgacggtgagaaggaaggtggtctttgcagttcccaaaacagaaaacgaggtacctagccccgcatctagtcaccactcttcaaatcagcccgcaagtctaacagaagaaaaaagaacaccacagggcagtcagaacagtctcaacaccgtgtcttccggctccggatctacctccggaatcggctcgggcggtggaggaggaagcggcgtggtgtcaactgtggtacagccatacgacgttgaaattcggaggggcgagaacgaaggcttcggctttgtgatcgtctcctcagtgtcaagacccgaagcagggacaacattcggcaatgcttgtgttgccatgcctcacaaaattggcagaattattgaggggtcgccagcggaccggtgcggtaagctgaaggtgggcgacaggattctggcggttaatggatgctctatcactaataaatctcacagcgacattgtgaacctaatcaaggaagcagggaacaccgtgactttaaggataatcccgggagatgagagcagcaatgccacattgttgaccaacgcagagaagatcgcaaccatcactaccacccacactcctagtcagcagggaacacaggagacacgaaatacaacaaaacccaaacaggagagccaatttgagttcaaagcaccccaggccacccaggagcaagacttctataccgtggagctagagcgcggcgctaaaggcttcggattctcgctgcgagggggcagggaatacaacatggacctctacgtccttagactggcagaggatggacctgctgaaaggtgtggtaaaatgagaatcggcgatgaaatcctagaaattaacggggagaccactaaaaacatgaagcacagcagggccattgagcttattaagaatgggggtcgtagggttcggctcttcctcaagcggggtgatggctctgttcctgagtatgctatgatcccgccaaacatcgccgcttgcatgcgaaatgaaaagctgggggaagcgtgcttttacctcatgggacacaatcagaccactacaccagccgccactgccactgcccctccgccagttcataaagtcttcaggaagtag

SEQ ID NO: 194738 - DNA, 4389 bp, synthetic construct
  misc_feature 1..4389: note = Description of Artificial Sequence: Synthetic coding sequence
  source 1..4389: mol_type = other DNA
atgagcaaggtgatccagaagaagaaccactggaccagccgggtgcacgagtgcacagtaaagcgaggaccacaaggggaattgggtgtcactgtcctgggcggtgcggagcacggcgaattcccgtacgtgggcgctgtggccgccgttgaggcagccggcctgccaggcggtggggagggaccccgccttggggaaggggagcttttgctggaggttcagggagtccgcgtcagcggcctgccccggtacgatgtgctcggcgtaatcgacagctgtaaggaggcagtgacattcaaagcagttaggcagggcgggagactcaacaaagatcttcgccattttctaaatcagcgcttccaaaagggctctccagaccacgaactgcagcagacgattagagataacctctaccgacacgccgtgccatgcactactcggagccctagagagggagaagtgccaggtgtggactataatttcctgacagtgaaagaattcctggacctcgagcaaagcggcacactgttagaagtcgggacatacgagggaaattactacgggacaccgaagcctcccagtcagccggtctccggcaaggtgattaccacagatgcactgcatagccttcagtctggcagcaagcagtctactccgaaaaggactaagtcatataatgacatgcagaacgcaggtatcgtccatgccgaaaacgaggaagaagacgacgtcccagagatgaatagctccttcactgctgattcaggagaacaggaggagcacactctccaggagaccgccctgcctcctgttaatagctcaattattgccgcgcctattactgacccttcccagaagtttccgcagtacctgcccctgagcgcggaagacaatctagggcctttgccggaaaactgggagatggcctatactgaaaacggagaggtgtactttatcgatcacaacacaaaaaccactagctggctggacccccgctgcctcaacaaacagcaaaaaccgctggaagaatgcgaagacgacgagggcgtgcacaccgaagaactggattcggagttagaattacctgctggttgggaaaagattgaagacccggtgtatggcatctactatgttgatcacattaacaggaagacccagtatgaaaaccccgtactggaagctaagcggaagaagcagctggagcaacagcagcagcagcagcaacagcaacagcagcaacagcagcagcaacaacaacagcagacggaggagtggacagaagatcacagcgcgctggtgccccctgtgatccctaaccatcctccgtcaaatcctgagcctgcacgcgaagtaccacttcaagggaagccattctttaccaggaatccctcggaacttaaaggaaaattcatccatactaaacttcgcaaatcctctagaggcttcggtttcacagtcgtaggcggtgatgagccagatgagtttctgcagattaaatcgttggtgctggacggacctgctgccctagacgggaagatggagacaggggatgtgatcgtctcagtcaacgatacttgcgttttggggcacacccacgctcaggttgtgaaaatctttcagtcgattccaataggcgcctctgtggacctcgaactctgtcggggatatccactgccattcgatcctgacgatcctaatacttcgctggtgactagcgtggccatcctggataaagaacctattatcgtgaatggccaggaaacttacgactcaccagcaagtcatagcagcaagactggaaaggttaatgggatgaaagacgccaggccaagctcccccgccgatgtggcaagcaattccagccacggctacccaaacgacaccgtatctctggcatccagtatcgcaactcagcccgaactgattacagtgcacatagtaaagggacctatgggattcggattcactatagcggacagcccgggtggaggcggacagcgagtgaagcagatcgttgatagtcctcgctgtcgggggttaaaggagggcgacctcatcgtggaagtgaacaagaagaacgtgcaggccctcacccataatcaggtcgtagacatgttggtagagtgtcccaagggatcagaggtcacactcttggtccagcgcgggggactccccgttcccaaaaagtcccccaagtcccagccactagaacgcaaggacagccagaacagcagccagcactcagtttcatcacacaggagtctgcacaccgcatctccttctcactctactcaagtgctccccgaattcccccccgccgaggcgcaggctcctgaccagacagactctagcggtcaaaaaaagcccgaccccttcaagatttgggcgcagtccagaagcatgtacgagaatcgcttgccggactatcaggaacaagacatattcctctggagaaaggagacaggatttggctttcgaatcttaggaggcaatgaacctggggagcccatatacattggtcacatagtgcctttaggggcggccgacactgacggtcggctgcgcagcggagatgagctgatatgtgtggacggtacaccagtcattggaaaatcgcaccagctcgtcgtacaactgatgcagcaggcagctaagcagggccacgtgaaccttacagtgcgcagaaaagtcgtattcgccgtcccaaagacagaaaacgaggtcccttcccctgcctcctcccaccattcttctaaccaacctgctagcctgaccgaagaaaagcgtaccccccagggcagtcagaacagcctaaataccgtgtcttcaggaagcgggtccacaagtggaatcggctccggcggagggggcggatccggtgtggtttcaaccgtggtgcagccttacgatgttgagattcggcggggagagaacgaggggttcggattcgtcattgtgagttcagtaagccgtccagaagcgggtacaacctttggcaatgcttgcgtggctatgcctcacaagattggacgaatcatagaaggaagtcccgccgaccgatgtggtaagctgaaagtgggcgacagaatactcgccgttaacggttgttccatcactaataaaagtcatagtgacattgtgaatctcatcaaagaagcaggtaataccgtgacacttcgaattatcccaggggatgagtcgagtaacgctaccctgctcacgaatgccgagaagatagccaccataacgaccacccacaccccctcacagcagggaacgcaggagacacggaacacaacgaagccgaagcaggaaagtcaattcgaatttaaagctccccaggcaacccaggaacaggacttctacactgttgaattggaacgcggcgccaagggatttgggtttagcctccgcggaggtcgggaatacaatatggatctctacgtgctgcgactggccgaagacggcccagcagaacgctgcggcaaaatgagaattggcgacgaaattttagaaatcaacggggagacgactaagaacatgaaacactctcgggcaattgaattaatcaagaatgggggaaggcgcgttcggctgttcctgaagcgtggcgacgggagtgtgcccgaatacgaccccagctcagaccgccatggacctgccaccggtcctcaaggcgtccccgaagtgagagccggccctgataggcgccagcatccttctttggagagttcctatcctcctgatctgcacaagagttcacctcacggggaaaagcgcgctcacgcacgggatccgaagggttcgagagaatattcaaggcagccgaacgagcaccatacctggaatgggacttccaggaagcctgacagcggcgcatgcagacctaaagacagggcacccgagggaaggagggatgcccaggccgagcgagcagccgctgctaatgggccgaaacgtcggagccccgaaaagcgacgtgaaggtactagaagtgctgataacaccctcgaacgccgagaaaagcacgaaaaaagacgagacgtcagtcctgaacgtcggagagagcgcagtccgaccagacgacgagatggcagtccctctaggaggcgcaggtctctagagcgtcttctagagcagcggcgcagccccgagaggagaagaggtgggagccctgagcgccgagctaaatccaccgatcgcaggcgagctagatccccagagagaaggagagagcgaagtctggacaagagaaaccgagaagaccgtgcctcacatagagaacgcgaggaagccaacctgaagcaggatgccggccggtcctcccgccaccctcccgaacagcggcggagaccatacaaagagtgttccactgatctgagcatctag

SEQ ID NO: 194739 - DNA, 3552 bp, synthetic construct
  misc_feature 1..3552: note = Description of Artificial Sequence: Synthetic coding sequence
  source 1..3552: mol_type = other DNA
ggcggccggctgaacaaggacctgcggcacttcctgaaccagcggtttcagaagggctcccccgaccacgaattgcagcaaactatcagggacaatctctaccggcacgccgtgccttgtactactcgcagcccacgggagggtgaggtcccaggcgtggattacaatttcctgacagtgaaagagttcctggatctcgaacagagtggcacgttgctagaagtgggcacttacgaggggaattactatggtacacctaaacctccatcccagccagtgtcaggaaaggtgatcacaactgatgcccttcattcccttcagtccgggtctaagcaatccactcccaaaagaactaagagctacaatgatatgcagaacgccgggattgtgcacgctgagaacgaggaggaagatgacgttccggagatgaatagtagcttcacagcggattcgggggagcaggaagaacacacattgcaagagactgcactgccaccagtcaattccagtattattgccgccccaataaccgatccatcacagaagtttccccagtatttgcccctgtccgccgaagacaatctgggtcctctgcctgaaaactgggagatggcttataccgaaaacggagaagtgtactttatcgaccataacaccaagacaaccagctggctggaccctaggtgtttaaataaacagcaaaagcccctcgaggaatgtgaagacgacgaaggagtgcatacagaggaactggacagtgaactggaacttcctgccgggtgggagaagatcgaggatccagtatatgggatatattatgtggaccacatcaatcggaaaacgcagtacgagaatcctgtgctggaagcaaaacgcaagaaacagctggagcagcagcagcagcagcagcagcagcagcagcagcagcagcagcagcagcaacagcagcagaccgaagagtggaccgaggatcatagtgccttagtaccaccggtaatccctaatcacccgcccagtaaccctgaacccgctagggaagtgccgctccagggaaaaccctttttcaccaggaatccaagcgaactgaagggtaagttcatccacacaaagcttcgcaagagttcacgaggcttcggctttacagttgtgggcggagatgagcccgatgaattcctccagatcaagagtttagtgttagatggccctgctgctcttgacggaaagatggaaacaggggacgtcatagtatctgttaatgacacatgcgttctgggccacacccacgcacaggtggtgaaaatcttccagtcgattcctattggcgcctccgtcgatcttgagctttgcagaggatatcctctgccgtttgatcctgatgatcccaatacaagcctggtcacttcagtggccatcttggataaggagcctattattgtaaatggccaggagacatatgactcccctgctagccacagcagtaagaccggtaaagtaaatggcatgaaggatgcacgtccttcctcacccgcggacgtcgcatcgaactccagccacggataccccaatgacaccgtttctctcgcctcatcaatagctacacaacccgaactgataaccgtgcacattgttaagggacccatggggttcggctttaccatagcggactcccccggtggcggggggcaaagagttaagcagatcgtagactcaccccgctgccggggtctgaaggagggcgacctgattgtcgaggtgaacaagaagaatgtacaagctctgacccataaccaggtagttgacatgctcgttgagtgccccaagggctcagaggtgacactcctggttcagaggggcggactgccagttcctaaaaaatcacccaagtcccaaccccttgaaaggaaagatagccagaatagctctcaacatagtgtgtcctctcataggtctcttcacacagcgagccctagtcactctactcaggtactccccgagtttcccccggccgaagcccaggcacctgatcagaccgacagctctggacagaagaagccagatcctttcaagatctgggctcaatctaggtcaatgtatgaaaacaggcccatgtctccgagccccgcctccggtctgtcaaagggcgaacgggaaagagagatcaactccacgaatttcggagagtgccccatccctgattaccaggagcaggatatattcttgtggcgaaaggagacagggttcggattcaggatcctggggggtaacgagcctggagagccaatttacattggccacatcgttcccctgggggcagcagatacagacggcaggctgcgctccggagacgaactaatctgcgtggatggaacacctgtgattggaaagagccaccaattagttgtgcagctgatgcagcaagccgccaaacaaggacacgtcaacctgactgtgcgtcgcaaggtagtctttgctgttcctaagacggagaacgaggttccctctccggcttcaagccaccactcatctaaccagccagcttcccttaccgaagaaaagcggacacctcagggatcacagaacagtttgaacacagtgagcagcggcagcggttcaacctccggcatcgggagcggtggcggaggcggaagcggagttgtatccactgtcgtccagccttacgacgtggagatccggaggggcgaaaacgaaggatttggattcgtcatcgtaagctctgtctctagacctgaagccggaaccactttcggcaatgcttgtgttgcaatgccccataaaatcggccgtattatcgaaggttctccagcagaccggtgtgggaaactcaaagtgggagatcgtatactcgccgtgaatgggtgtagtataaccaacaaaagccattctgatatcgttaacctgattaaagaggccggaaacaccgttactctccgcatcatacccggagacgagagttccaacgctactttgctaaccaacgcagaaaagatcgcgactatcactaccacccataccccttcccagcagggtacccaagagacccgtaacaccacgaagcccaagcaggaaagccagttcgaatttaaagcacctcaggccactcaagagcaggacttttacacagtggaactagagcggggcgccaaagggtttggcttcagcctgagaggcggtagggaatacaatatggacctgtatgtgctgcgtctggctgaggatggccccgcagagaggtgtggcaagatgcgaataggcgatgagatattggaaatcaacggtgaaaccacaaagaacatgaagcactcacgtgccattgagcttattaagaatggaggcagacgagtgcgcctcttccttaaacgcggggacggaagcgtacccgagtatgccatgatccctcccaatattgcagcttgtatgcgaaatgagaaactaggtgaggcatgcttctatctcatgggacacaaccagaccacaactccagcggctactgccaccgccccccctccggtgcacaaagtgttccgaaaatag

SEQ ID NO: 194740 - DNA, 3771 bp, synthetic construct
  misc_feature 1..3771: note = Description of Artificial Sequence: Synthetic coding sequence
  source 1..3771: mol_type = other DNA
atgagcaaggtgatccagaagaagaaccactggaccagccgggtgcatgagtgtaccgtgaagagggggccacaaggcgaactgggtgtgaccgtgctgggcggcgccgaacacggagaattcccctatgttggggccgtggcagcagtggaggccgcagggctgcccggcggcggcgaaggaccaaggctcggggaaggtgagttgctgctggaagtgcagggcgttagggtgtctggcctgccccggtacgacgttctgggggtaatcgatagctgcaaggaggccgtaacattcaaggcagtcaggcaagggggaaggctgaataaagacctgcgccattttctaaaccaacggttccaaaaaggatcccctgatcacgagctgcaacaaaccatccgggacaacctatacaggcacgctgtgccatgcaccactcgctcccccagagagggagaagtgccgggagtagactataatttcttgacagttaaggagtttctggatctggaacagagcggaaccttgcttgaggtcgggacgtatgagggtaactattatggaacgcccaagccacctagccaaccagtctccggaaaagtaatcactactgatgcgctgcatagtctgcagtccggatctaagcagtccaccccaaaaagaaccaaaagttataacgatatgcaaaatgccgggattgtacacgctgaaaatgaagaggaggatgacgtgcccgaaatgaactcatccttcaccgcagacagcggtgagcaagaagagcacaccctacaagagactgccctgccacccgtgaactcttccatcatagccgctcctattaccgacccgtctcagaaattcccccagtatcttcccctttctgctgaggataacttaggtcccttacccgagaattgggagatggcctatactgaaaatggggaggtgtactttatcgatcataacaccaagaccactagttggctcgatccacggtgtcttaataagcaacagaagcccctcgaagaatgtgaagacgatgaaggagtgcataccgaggagctggatagcgaactggaactgcccgccgggtgggaaaaaatcgaggatcccgtctatggcatctactacgtagaccatattaataggaagacccagtatgagaatcctgtgttagaagcaaaaaggaaaaagcagttagagcaacaacaacaacagcagcagcagcagcagcaacagcagcaacagcaacagcagcagcagactgaggaatggaccgaggaccactctgctctggtgccgcccgtgataccaaatcatcctccctctaaccccgagcccgcaagagaggtgcctctgcagggcaaacccttctttacacggaatcctagcgaacttaagggcaagttcattcatacaaagttacgaaaatcatcacggggcttcggatttaccgtcgtgggaggcgacgagccggatgagttcctccaaatcaaatcactggttctcgatggtcccgcggccctcgatggaaagatggagacaggagatgtgatagtgtccgttaatgatacctgtgttttgggccacacccatgcccaggtagtgaaaatctttcagtctatccccatcggagcatccgtggacctcgagctgtgcagaggttatcccctaccttttgatccggacgacccgaataccagtctggttacaagtgtagccatccttgacaaagaaccaatcatcgttaatggccaggaaacatacgactcccccgctagccactcttcgaagacgggcaaggtgaacggcatgaaagatgccagaccttccagcccagccgatgtcgcgagtaactcgtctcatgggtatccaaatgatactgtgagcctggccagctctattgccactcagcccgaactcataacagtgcacattgtcaagggaccaatgggctttggattcacaattgccgactcccctggcggtggagggcagcgagtcaagcagatcgtcgactctcccagatgccgcggactgaaggagggcgacttaatcgtggaggtgaacaagaagaatgtccaggcgctgactcacaatcaggtagtggatatgctggtagaatgccctaaaggcagcgaagtcacattattagtgcaacggggaggacttccagtccccaagaaatccccaaaatcgcagccacttgagcggaaagacagtcagaatagcagtcaacatagcgtgagctcacatcgcagtttacacacggcaagtccttcccacagcacacaggtgttgccagagtttcctccagcggaagcccaggcccctgaccagactgactcaagcggacaaaaaaaacctgatccgtttaaaatctgggcccagagcagaagtatgtatgagaatagacccatgagcccctctcctgcctcagggctcagcaagggcgagcgagagcgagaaattaattccactaacttcggagagtgccccattccagactaccaggagcaagatatcttcttgtggaggaaagagactgggttcggatttaggatattgggcggtaatgagcccggtgaacccatctatattgggcacatagtccctctgggggccgccgataccgacgggcgactgaggtctggcgatgaactcatatgcgttgacgggacccccgtgatcggaaaaagccatcagctcgtggtccagctgatgcagcaggccgctaagcagggccacgtgaatttaacagtaagacgaaaggtcgtgtttgccgtgcccaaaaccgagaacgaagtccctagccccgccagctcgcaccactctagcaatcagcctgcttccctgaccgaggaaaaacgtacacctcagggctcccagaatagcctgaatacggtatcgtccggcagcgggtctacctccggtatcggctcagggggcggtggcgggtccggggtggtatcaaccgtcgtccagccatacgatgttgagatcagaaggggagagaacgaggggttcggcttcgtaatagtctctagtgtaagcaggcccgaggcagggacaacttttgctggcaacgcgtgcgtcgcaatgccacataaaattggtagaattatcgaggggagccccgctgaccgttgtggaaaactgaaagtcggtgaccgcatccttgctgtcaacggatgctccattactaataagtctcactccgacatagtgaacttgatcaaagaagcgggcaatacagtaaccctgaggatcatccctggagacgaaagtagtaatgcaacccttctgaccaatgcagagaagatcgctacaataacaacaacacatacgccaagtcaacagggaacccaagagacccggaatactactaagcctaagcaagagtcccagtttgaatttaaggccccacaggctacccaagagcaagacttctataccgtcgagcttgaacggggtgcaaagggtttcgggttttccctgagggggggcagggaatataacatggatctgtatgtgctcaggttggctgaggatggacccgctgagcggtgtggtaagatgcggatcggagatgaaattctggaaattaacggtgagaccaccaagaacatgaagcacagccgcgccattgaactgataaagaatggggggcgacgggtacgcctttttctcaagcgtggagatgggtccgtacctgaatacgggggtagcaactacgagaacattccttcatttcctggcatgactccctag

SEQ ID NO: 194741 - DNA, 1488 bp, synthetic construct
  misc_feature 1..1488: note = Description of Artificial Sequence: Synthetic coding sequence
  source 1..1488: mol_type = other DNA
atggccgccgagccccagcccagcagcctgagctaccggaccaccgggtcaacctacctgcatcccctgtctgagctgctcggcatccctctggatcaagtgaacttcgttgtgtgccagctggtggctctgtttgcggccttctggttcagaatctatctgagaccagggactacgtccagtgatgttagacacgccgtggcaactattttcggcatttattttgtgatattttgttttggctggtatagcgttcacctatttgtgctggttctcatgtgctatgctattatggtgacagcctccgtgtctaatatccataggtatagcttcttcgttgctatggggtacttaaccatctgtcatatatccaggatttatatcttccactacggcatcctgacaactgatttttccggccccctgatgattgtgacacagaaaattaccaccctcgcattccaggtgcacgacggactgggcaggcgagccgaagatttgagtgctgagcagcaccgactggccattaaagttaaacctagttttcttgagtacctgtcatacctgttgaatttcatgtccgtgattgccggcccgtgtaacaacttcaaggactacatagcattcatagaggggaaacacattcacatgaaactgttagaagtcaattggaagcgaaagggatttcactccttgccagagcccagccccaccggcgcagtgattcacaagttggggattactttggttagccttctcctcttcctcaccctgacaaaaaccttccccgtcacttgccttgtggacgattggtttgtccacaaagcctcatttcccgcccgactgtgctacctttatgtcgtaatgcaagccagcaaaccgaaatattacttcgcttggacccttgccgacgcagtcaataacgcagccggctttggctttagtggcgtcgataagaacgggaacttctgctgggacctactctccaaccttaatatctggaaaattgaaactgcgaccagctttaagatgtacttggagaactggaatatacagacagcaacttggctgaagtgcgtttgttaccaacgcgtgccctggtacccaactgtcctgaccttcatcctttctgccctgtggcatggggtgtatccaggatactatttcacatttctgaccggtattctcgttactctggccgccagggccgtgaggaacaattacaggcattatttcttgtcaagcagggctttaaaggcagtatatgatgccggaacatgggctgtgacgcagctcgccgtatcctacacagttgccccctttgtgatgctggcggtggagccaaccatctctctgtacaagagcatgtacttctatctccatataatcagcctgctgatcattctgtttcttcctatgaagccccaggcccacacacaacggcggccacagaccctcaacagtattaacaagcgcaagacagactag

SEQ ID NO: 194742 - DNA, 726 bp, synthetic construct
  misc_feature 1..726: note = Description of Artificial Sequence: Synthetic coding sequence
  source 1..726: mol_type = other DNA
atggccgccgagccccagcccagcagcctgagctaccggaccaccgggtcaacctaccttcatcctttatccgagttgttaggaatcccacttgaccaagttaattttgttgtctgccagctggtcgccctcttcgctgccttttggttccgcatctatctgaggcctggcaccacctcatccgatgttcgccacgctgtagccacaatatttggcatatactttgttatcttctgcttcggatggtattccgtgcatctgttcgttttagtgctaatgtgctatgctatcatggtgaccgcatcagtctctaacatccacagatactccttcttcgttgccatggggtatcttaccatttgtcatataagtcgtatatatatttttcactacggcatcctcactacggacttctctggaccattgatgatcgtgacgcagaagattaccaccctggctttccaggtgcacgatggcttgggtagaagagctgaagatttatctgccgaacagcatcgattggctattaaggtgaagccttcttttctcgaatacctcagttatctgctgaattttatgtctgtgatagcaggtccctgtaataacttcaaggactacatagccttcatcgaagggaagcacatacatatgaaattattagaagttaattggaaaagaaaaggctttcactcgctgcctgagccgtcacctactggacatctctag

SEQ ID NO: 194743 - DNA, 1041 bp, synthetic construct
  misc_feature 1..1041: note = Description of Artificial Sequence: Synthetic coding sequence
  source 1..1041: mol_type = other DNA
atggagttcagcctgcggatcttcctgggcctgggccggcgggccgaagatctgagcgcggaacagcatcggctggcaatcaaggtcaagccctcatttcttgagtacttgtcatatttgctgaatttcatgtccgtgatcgctgggccgtgcaataattttaaggactacattgccttcattgaagggaagcacatccatatgaaactgctagaggtcaactggaagagaaagggcttccactctttaccagagccctcgccgacaggcgccgtcattcacaagttgggcatcacgcttgtgagtttgctgctgttcctgactctaacaaagacattcccggtcacctgcttggtagatgactggttcgtgcataaggccagctttcccgcccgcctatgttacctctacgtggtcatgcaggctagcaagcctaaatattattttgcttggacgttggcagacgccgtcaacaacgcagctggctttggcttttcaggagtcgacaagaatggcaatttctgttgggatttactgtctaaccttaatatctggaagatcgagacagccacatctttcaaaatgtacttggagaactggaacatccagacagcaacctggctaaagtgtgtgtgctaccagcgggtgccgtggtaccctacggtgttgacttttatcctgagcgccttgtggcatggcgtgtaccccgggtactacttcacatttctgactggcattctggtcacactggcggcacgcgctgtcagaaataattataggcactacttcctgtctagccgagcgctcaaagcagtgtacgacgccggtacctgggccgtaacacagctggccgtgtcctacacagtagcacccttcgtcatgttagctgttgaacccaccatttcactgtacaagagcatgtatttttacttgcacatcataagcctactgataatcctctttcttccaatgaagccacaggcacacacccagaggcgcccacagaccttgaactccatcaataaacgcaagacggactag

SEQ ID NO: 194744 - DNA, 1563 bp, synthetic construct
  misc_feature 1..1563: note = Description of Artificial Sequence: Synthetic coding sequence
  source 1..1563: mol_type = other DNA
atggccaccaccagcaccaccggcagcaccctgctgcagcccctgtccaacgctgtgcagctgcccattgatcaggtcaatttcgtggtctgtcagttgttcgctctgctggccgccatttggtttaggacatatctacattcttctaagacttctagcttcatcaggcacgtggtggcaacactactgggtctgtatttggccctattctgcttcggctggtacgccttgcactttttagtgcaatctggcattagctattgcatcatgattatcatcggtgttgagaacatgcacaattattgcttcgtattcgccctcggctatctaacagtgtgtcaggtgactcgagtatatatcttcgactatggccaatactccgctgacttctccggtccgatgatgattatcacacagaaaattactagcctggcttgtgagattcacgacgggatgttcagaaaagacgaggagctaaccagtagccagcgcgatttggctgttaggaggatgccgtcgctgctggagtacctgtcctataattgcaactttatggggattctcgcagggcctctctgctcatacaaggattacattacctttatcgaagggcggtcttatcacataacacagtccggagaaaacggaaaagaggagactcagtatgaaagaaccgagccttcccctaacaccgctgtcgtacagaagcttctcgtttgcgggctgtccttgttgtttcatttgaccatttgcaccactctccctgttgagtataatatcgacgagcacttccaggccaccgcaagttggcccacgaaaattatatatctgtatatatcactgctcgcagctaggccgaaatactactttgcctggacactcgctgacgccattaataacgccgcaggctttggcttcagggggtatgatgagaatggcgccgcacgttgggatttaatttcaaatctccggattcagcaaatcgagatgtctacctcgtttaagatgttcttagataattggaatatccagaccgcactgtggctgaagagggtgtgttacgagcggacatccttctcaccaactatccaaacattcatactatcggcaatctggcacggagtataccccggctattacttgacgttcctgactggggtcctaatgaccctggcagccagggccatgaggaataatttccgtcattattttattgagccctcccagctgaagttgttttatgacgtgatcacgtggatagtaacacaggttgccatctcctataccgtcgtgcccttcgtgttgctgtcaatcaaaccatccctgacgttctacagctcgtggtactattgtcttcatatactcgggattttggtattgttgttgctgcctgtgaagaagacacagagacggaagaacacccacgagaacatccagctgtcacagtcaaagaagtttgacgagggagaaaacagtctgggacaaaattcgttttctacgacgaacaatgtgtgcaatcagaatcaggagattgcatctaggcacagctccctgaaacagtag

SEQ ID NO: 194745 - DNA, 1308 bp, synthetic construct
  misc_feature 1..1308: note = Description of Artificial Sequence: Synthetic coding sequence
  source 1..1308: mol_type = other DNA
atggagtggctgtggctgttcttcctgcaccccatcagcttctaccagggtgccgccttcccttttgcgctcctgttcaattatctgtgtatcatggactctttcagtaccagagcccgataccttttcctgctgacaggcggcggagctcttgctgtggctgcaatggggtcttatgcggtcctagtttttaccccggcggtatgcgctgtggctctgctgtgtagtcttgcccctcaacaagtgcaccgatggaccttctgcttccagatgagctggcagaccttgtgtcatttaggactgcattataccgagtactatcttcatgagccaccctccgtgcgattttgcattacacttagctccctgatgctgctaacacagagagtgacttcattaagtctggacatatgcgaagggaaggtgaaggcagcttctggaggatttcgaagtcgatccagcttgtctgaacatgtatgcaaagccctaccatatttttcatatctcctgtttttccctgccctgctaggtggcagtctgtgttcctttcagagattccaagcacgagttcaaggtagttcagccctacaccctcggcactctttctgggccctctcttggcgtggcctgcagattctgggactagagtgtctgaatgtagccgtgtcacgggtcgtggacgccggcgccggcctgacagattgccaacagtttgagtgcatatatgtcgtgtggaccacagccggcctcttcaaacttacctactattcccactggattctcgacgattcccttctgcacgctgctggattcggtcctgagcttgggcagagccccggcgaggaggggtatgtgccagatgccgacatttggacacttgagaggacccacaggatctccgtgttttctaggaagtggaaccaaagcacagctcggtggctgagacgcttggtgttccaacattcccgagcatggccgctgttgcaaacctttgctttctccgcctggtggcatggactccaccctggtcaagtctttggattcgtatgctgggccgtgatggtggaagcagactatttgatccacagctttgcaaacgaatttattaggagctggcccatgcggctcttctacagaacacttacctgggcccacacccagctgattatcgcctacatcatgctggccgtggaagttagaagcctgagcagtctctggctgctctgtaatagctataattctgttttccctatggtgtactgtatcttactcctgttgctggccaagaggaagcacaagtgtaactag

SEQ ID NO: 194746 - DNA, 1341 bp, synthetic construct
  misc_feature 1..1341: note = Description of Artificial Sequence: Synthetic coding sequence
  source 1..1341: mol_type = other DNA
atgaccctgaaggccagcgagggcgagagcggcggcagcatgcacacagccttaagcgacctctatctcgaacacctccttcagaaacgcagcagacctgaagcagtgtctcatcccctgaacaccgtgaccgaagatatgtacaccaatgggtctcccgctccaggctcaccggctcaagttaaggggcaggaagttcgaaaagtccggctgatccaattcgagaaggtcaccgaggagcccatgggcattaccttaaagctgaacgagaaacagtcttgcaccgtcgcgcggattcttcacgggggaatgattcatagacagggtagtttacatgtgggggatgagatactagagattaatggaactaacgtgaccaaccattcagttgaccagctccaaaaagcaatgaaagagaccaagggcatgatctctctgaaggtgatccctaaccagcagtcacgcttgcctgcccttcaagaggctggtctcaagtttgctactggggacatcatccaaataattaacaaggacgacagtaattggtggcaggggcgcgtggagggatcaagtaaggagtctgcaggtctgataccgtctccagaattgcaggagtggcgggtcgcctccatggcacagtccgcgccatctgaggccccttcctgtagcccctttggaaagaaaaagaagtataaagataagtacctggctaagcattcctcaatcttcgatcagcttgatgtcgtgtcctacgaggaagttgtgcggctccccgctttcaagaggaagactttggttttgatcggggcctctggcgtcggacgatcccatataaagaatgccctgctgagccaaaatcccgaaaaattcgtgtaccccgtcccctatactactagacctcccagaaaaagcgaagaagacgggaaagaatatcacttcatctccacagaagaaatgactcgcaacatctctgctaatgagtttctggagttcgggtcttaccagggtaatatgtttggaacgaagtttgaaaccgtgcaccaaatccataagcagaacaagattgcaatactggacatcgagccgcagacactgaagatagttcgtaccgccgaactatctccttttatcgtgttcatcgctccgaccgaccaagggacgcaaaccgaagctctgcagcagctgcagaaagattctgaggcaatcagatctcagtacgcccactatttcgacctgagtctggtgaataacggcgttgacgagactctgaaaaagctgcaggaggccttcgatcaagcctgctcatcccctcagtgggtccccgtgtcatgggtttactag

SEQ ID NO: 194747 - DNA, 1401 bp, synthetic construct
  misc_feature 1..1401: note = Description of Artificial Sequence: Synthetic coding sequence
  source 1..1401: mol_type = other DNA
atgaccctgaaggccagcgagggcgagagcggcggcagcatgcacactgcactgagcgacttgtacctggagcacctcttgcagaaaaggagtcgccctgaagcagtgtcccaccctctgaacacggtcacagaggacatgtatacgaacggctcaccagcccccggcagccccgcccaggtgaaggggcaggaggtcagaaaagtgcggctcattcagttcgaaaaggttacagaggagccaatgggcatcactcttaagttaaacgagaagcagagttgcaccgtcgcgcggattctccatggtgggatgatccaccgtcaagggagcttgcacgtcggggacgagattctggagattaacggtactaatgtcacaaatcacagtgtagaccagctgcagaaggctatgaaggagacgaaaggcatgatctcactcaaggtgatccccaaccagcaaagtcgtctgcccgcccttcagatgttcatgcgggcccagttcgattacgatcccaaaaaggacaatctaataccatgcaaggaagcgggcctgaagttcgccacaggagacattattcaaatcattaataaggatgattccaattggtggcagggacgagtggagggcagctcgaaggaaagcgccggattgatcccgtcaccagaattacaagaatggcgcgttgcaagcatggcgcagtccgcccccagcgaagcaccttcatgttctccatttggcaagaagaagaaatataaagacaagtatctggctaagcacagcagtatctttgatcagcttgatgttgtctcttacgaagaggtagtgcggctgcctgcgtttaaacggaagaccctggtcctcatcggcgcctctggggtcgggaggtcacacatcaagaatgctttactgagtcaaaaccctgaaaagttcgtttatcccgtcccctataccacccgacctccacgcaaaagtgaggaggatggcaaggagtaccacttcattagcacggaggagatgactaggaacatttcagctaatgagttcttagagttcggttcctatcagggaaacatgtttggaaccaagttcgagacggtgcaccaaatccacaaacaaaataaaatagccatactcgatattgagcctcaaacgctgaaaatagtgcgaacagcagagttatccccatttatagtttttatcgcaccgacagaccagggaactcaaactgaggccttacaacaattgcagaaggatagcgaggcaatccgaagccaatatgcacactacttcgatctcagtctagtgaataacggagtggacgagacattaaaaaagctccaagaagccttcgaccaggcttgttcctcaccccagtgggtgcctgtgtcttgggtctactag

SEQ ID NO: 194748 - DNA, 1311 bp, synthetic construct
  misc_feature 1..1311: note = Description of Artificial Sequence: Synthetic coding sequence
  source 1..1311: mol_type = other DNA
atggagagctgggccgtgagccaccccctgaacaccgtgaccgaggatatgtacaccaacggctccccggcgccggggtccccagcacaggtgaaaggtcaggaagtgaggaaagtgcgactcatccagttcgaaaaggttacagaagaacccatggggatcacattgaaattaaatgagaaacaatcatgcaccgtggcaaggatcctgcacggcggaatgattcatcggcagggttctcttcacgtgggtgatgaaatcctggaaataaatggaactaatgtcacgaatcacagtgtggaccaactacagaaagcaatgaaagaaaccaaaggcatgatctctttgaaggtcatcccgaatcagcagtcccgccttcctgccctgcagatgttcatgcgagctcaatttgactatgatcccaaaaaggataatctcataccctgcaaggaggctgggctgaagtttgctaccggcgacatcatccagatcatcaacaaagatgatagcaattggtggcagggcagagtggagggcagctcaaaggagagcgccggacttatcccaagccctgagttacaggagtggagagtcgcctcaatggcccagagcgccccgtccgaggcaccttcttgcagccctttcggcaagaagaagaagtacaaggacaagtacttggctaagcactcttctatttttgatcaacttgacgtggtgagctacgaggaggtggtccggcttcctgcctttaaacgcaagaccttagtgctgattggtgcctctggagtgggccgctctcacatcaagaacgccttgctatcccagaatccggagaaatttgtttatcctgttccctacacaactcgtcctccccggaaaagtgaagaggacggcaaggagtaccattttatttctaccgaggaaatgacacggaatatctctgccaacgaattcttggagtttggctcatatcaaggaaacatgttcggcactaagtttgagactgttcatcaaatccataagcagaacaaaattgctatcctcgatatagagccacaaacattaaagattgtccgaacggcagaactgagtccttttattgtgttcatcgctcctaccgatcagggaactcaaacggaagctttacagcagctccagaaggattccgaggccattaggtcccaatacgctcattacttcgatctgtctctagtgaacaatggggtcgacgagacgctaaaaaaactccaagaggccttcgatcaggcgtgctcatccccccaatgggtccctgtgagttgggtatactag

SEQ ID NO: 194749 - DNA, 1659 bp, synthetic construct
  misc_feature 1..1659: note = Description of Artificial Sequence: Synthetic coding sequence
  source 1..1659: mol_type = other DNA
atgcccgtggccgccaccaacagcgagaccgccatgcagcaggtgcttgacaacctgggaagcctcccgagcgcaactggtgcggccgagctcgacctgattttccttagaggcattatggagagcccaatagtaagatcactggctaaagcccacgaaaggcttgaagaaactaaactggaggcagtccgggacaataatctggaacttgtgcaagaaattttgagagacctggcccatgtcgctgaacagtcaagcacagccgctgaactagctcacattctgcaggaacctcacttccaatccctgttggagacccacgatagcgtagcttcaaaaacgtatgaaacccctcccccatcacctgggctcgatcccacgttctccaatcagccagtgcccccggacgccgtaagaatggtcggtataagaaaaaccgcgggcgagcaccttggtgtgacatttcgcgttgaaggaggtgagctcgtaattgcccgcatcctgcacggcgggatggtggctcaacaaggcctcctgcatgttggtgatatcattaaggaagtgaacggccagccagtaggatcggacccaagagctctgcaggaactgttacggaatgcttccggcagcgtgatcctgaagatacttccaagctatcaagaaccacacctgcccaggcaggtgtttgtcaagtgtcacttcgactacgacccagctagggatagcttgattccttgcaaggaggccggcctgcgtttcaacgccggagacttgttacagatcgtgaatcaagacgacgccaactggtggcaggcttgccatgtggagggcgggtccgcagggctgataccctctcaactcctcgaagagaaacgcaaagctttcgttaagcgcgatctggagctcactcccaattctggaacactctgtggatctctatccgggaaaaaaaagaagcgtatgatgtacctgactactaaaaacgcggaatttgatcgacacgaactgttgatctacgaggaggtcgctaggatgccgccatttagaagaaagaccctggtgctgatcggtgcacagggagttggcaggaggtcgctgaagaacaaactcattatgtgggacccggatcgctacggtactacagtgccatatacctcacgcaggcccaaggattccgagagggagggtcaagggtactctttcgttagtcggggggagatggaggctgatgtacgggctggcaggtatctggaacacggtgaatatgagggtaatctgtacgggacccgcattgactctatacgaggcgtggtggccgcaggaaaagtatgcgtgctggacgtgaacccccaggctgtcaaggttcttaggacggctgaatttgttccatacgtggtctttatagaggctcccgatttcgagacactgcgggctatgaatcgggctgccttagaaagcggtattagtacaaagcagctgaccgaagctgacctgaggcggaccgtggaggaaagttctagaatacagcgaggctatggccattattttgacctctgtttggtgaacagtaaccttgagaggacgttccgagagctgcagacagctatggagaaactgagaactgagcctcaatgggtgccagtaagttgggtgtattag

SEQ ID NO: 194750 - DNA, 1731 bp, synthetic construct
  misc_feature 1..1731: note = Description of Artificial Sequence: Synthetic coding sequence
  source 1..1731: mol_type = other DNA
atgcccgtggccgccaccaacagcgagaccgccatgcagcaggtgctcgacaaccttgggtctctgccctccgctactggtgccgcagagctggacctgattttcctccgtggaataatggagagcccaattgtgagaagcctagccaaagttatcatggtgctgtggtttatgcagcagaacgtgttcgttcctatgaagtacatgctcaagtacttcggcgcccatgaaagacttgaggagaccaaactggaggctgtccgagacaataacctggaattggtccaagaaatactgagagacctggcccacgttgcagaacagtcctctaccgccgcggaactggctcatattttacaggaaccacattttcagtccctgctagagacccatgacagcgtagcttcaaaaacctacgaaaccccacccccaagcccaggactggatcctactttttcaaatcagcccgttccccccgacgccgttaggatggtgggcatccgaaagacagcaggagagcaccttggggtgacatttagagtggagggcggggagctagtgatcgcccgcatacttcatggcggtatggtagcccaacaggggttacttcatgtgggggacatcattaaggaagtgaacggccagcccgtgggatctgacccccgggccttacaagaacttctgagaaatgcttccgggagcgttattctgaagattttgccatcttaccaggaaccacacttgcctcgtcaggtatttgtgaaatgtcactttgattatgatccagctcgggacagcctgataccgtgtaaggaggccgggcttagattcaatgccggcgatcttctccagattgtgaaccaggacgatgcaaattggtggcaggcctgccacgtcgagggaggttccgctggcctgattccttcacaacttctggaggagaagcggaaagccttcgtaaaacgggatctcgaactgactccaaattcagggacattatgtggatctctgtcaggaaagaagaagaagcgtatgatgtatctcactacaaaaaatgccgagttcgaccgccacgagctgttaatctacgaggaagtcgccaggatgcctccattccgccgaaagactctggtgcttatcggcgcccaaggtgtgggacggcgttctcttaagaataaattaatcatgtgggatcctgatcgctatggaacaactgttccttacaccagtcgtaggcccaaggactcggaacgtgagggacaaggctattcgttcgtcagcaggggggagatggaggcagatgtccgcgcgggacgatacctggaacatggagaatacgaaggtaacttgtacggtacacggatcgactctattcgcggtgtggtggccgcagggaaggtctgtgtgctggacgtcaacccgcaggctgtcaaagtgctgaggaccgcagaatttgttccatatgtggtgtttattgaggcacctgacttcgagactcttagagccatgaaccgagccgccctggagtcaggaatttctactaaacagctgacagaggcggacttgcgccgtacagtcgaagaaagtagtaggatccagcggggatacggacattattttgacctgtgcctggtcaactccaaccttgagaggacattccgcgaactgcaaaccgcgatggagaagctgaggaccgaacctcagtgggtgccagtgagctgggtctattag

SEQ ID NO: 194751 - DNA, 96 bp, synthetic construct
  misc_feature 1..96: note = Description of Artificial Sequence: Synthetic coding sequence
  source 1..96: mol_type = other DNA
atgcccgtggccgccaccaacagcgagaccgccatgcagcaggtgctggacaacttgggcagccttcccagtgcaactggagccgccgagctttag

SEQ ID NO: 194752 - DNA, 456 bp, synthetic construct
  misc_feature 1..456: note = Description of Artificial Sequence: Synthetic coding sequence
  source 1..456: mol_type = other DNA
atgcccgtggccgccaccaacagcgagaccgccatgcagcaggtgctagacaacttagggagtctcccatctgcaaccggtgcagccgagctcgatcttatcttcctgagggggatcatggaatcaccgattgtcagatccctggccaaggcacatgagcgactcgaggagaccaaattggaggctgtgagggataataacttagaactggttcaagaaattctacgagatttggctcatgtagccgaacagtccagtacagcggcagaacttgcccatatactgcaggagccccactttcagagcctgctggaaactcacgatagcgttgcctccaagacctacgagacccctcctccatcacccggactcgaccctacattttctaaccagcctgttccgccagatgctgttcggatggtcggcattcgcaagaccgcaggggaacacttgtag

SEQ ID NO: 194753 - DNA, 381 bp, synthetic construct
  misc_feature 1..381: note = Description of Artificial Sequence: Synthetic coding sequence
  source 1..381: mol_type = other DNA
atgcccgtggccgccaccaacagcgagaccgccatgcagcaggtgctagataatcttggttcactcccgagtgccacgggagcagctgaactggatctgatttttctaagaggaatcatggagtcccctattgtccggtcattggcaaaagctcatgagaggttagaggagacaaaactggaagctgtgcgcgacaacaatttagagctggtgcaggaaattctccgcgacctggcacacgttgctgaacaatcgtctactgccgccgaactggcccacatactacaggaaccacattttcagagcttactcgagacacacgattccgtcgccagcaagacgtacgagacccccccacctagtcctggcttggacccctag

SEQ ID NO: 194754 - DNA, 222 bp, synthetic construct
  misc_feature 1..222: note = Description of Artificial Sequence: Synthetic coding sequence
  source 1..222: mol_type = other DNA
atgcccgtggccgccaccaacagcgagaccgccatgcagcaggtgctagataacctgggttccctgccgagcgctaccggggctgctgaactcgatctcatctttctcaggggaattatggagtctccaatcgtccggagtttggcaaaggcccacgaacggctcgaggagactaaactggaggccgtgcgggataacaatttagagctcgttcaggaatag

SEQ ID NO: 194755 - DNA, 447 bp, synthetic construct
  misc_feature 1..447: note = Description of Artificial Sequence: Synthetic coding sequence
  source 1..447: mol_type = other DNA
atgcccgtggccgccaccaacagcgagaccgccatgcagcaggtgttggacaatctcgggagtttgcctagcgcaacgggggctgcagaactagacctcatctttctgcgagggatcatggagtcgccaatcgttcgctccttggctaaagctcatgaaaggctggaagagaccaaactggaagctgtgagagacaacaatttagagctggtgcaggagatcctgagggatcttgctcacgttgctgagcagtcttccacagccgccgaactcgcgcacattcttcaggaaccacactttcagtcgctgctagagacccacgattctgtcgctagcaagacctacgagacaccgccaccgagtcccgggctggatcccacctttagtaaccagccggtgccgccggacgctgttagaatggtgggcataagaaagaccgccggatag

SEQ ID NO: 194756 - DNA, 1626 bp, synthetic construct
  misc_feature 1..1626: note = Description of Artificial Sequence: Synthetic coding sequence
  source 1..1626: mol_type = other DNA
atgcagcaggtgctggacaacctgggcagcctgcccagcgccaccggggcagccgaactggacttaatcttcctgcgcggaatcatggaatccccgatcgtgagaagtttggccaaggctcatgaacggctggaagagactaagctggaggcagtccgagacaacaacttggagctggtgcaggagattctgagagacttagctcacgtcgccgaacagtcatctaccgcagcagagctcgcccacattttacaggagccgcatttccagtctctgttagagacacatgattcagttgcctctaaaacctacgagactcctccacccagtcccggcctagacccgacattcagcaaccagcctgttccacccgacgcagtaagaatggtgggcatacgaaaaactgccggagaacacctgggcgtcacattccgcgtggaaggaggcgaactcgtgatcgctcgcattttgcatggcggcatggtcgcccagcagggactgctgcacgtcggcgatatcataaaggaggtgaatggccagcctgtaggatctgaccctagagctctgcaggagttgctacgaaacgcttccggtagcgttattttaaaaatcctaccttcgtaccaggaaccacacctgcctaggcaggtgtttgtcaagtgtcactttgactacgatccagcaagggatagtttgattccttgcaaggaggcgggtttgcgttttaatgccggcgatctgcttcagatcgtgaatcaagatgacgcgaactggtggcaagcgtgccatgttgagggcggatccgcggggcttattccttcccagctccttgaggaaaaacggaaggcatttgtcaagcgcgacttggagctcacccctaacagtggcaccctgtgcgggagtctgtcagggaagaaaaagaagagaatgatgtacctgacgaccaaaaacgccgagttcgaccggcacgaactcctgatttatgaggaggtagccagaatgcccccctttcggagaaaaacgttagtcctgattggcgcccagggagtgggcagaaggtctctgaaaaacaaattgattatgtgggaccccgaccgctatggtactacagttccttacactagccggcgaccgaaggatagcgaaagggaagggcaggggtatagcttcgtgtcaaggggcgagatggaggccgacgttagggcaggtagatatctggagcacggtgaatatgaggggaatctctacggcacccgaatagactccataagaggagttgtggccgcaggaaaggtgtgtgttctagatgtgaatccacaggctgtcaaggtgttacgtacagcggagttcgtgccatacgtcgtctttattgaagctccagatttcgaaacacttcgagcgatgaaccgggccgctctcgaatccggcatcagtacaaaacagcttaccgaggccgatctgcgccgcacagtcgaagagtcctcaagaatccagcggggctacggacactacttcgacctttgcctcgttaatagcaatttagagcgcacgttccgtgagctgcagaccgccatggaaaaactccggactgaacctcaatgggtcccggtgtcctgggtctactag

SEQ ID NO: 194757 - DNA, 1167 bp, synthetic construct
  misc_feature 1..1167: note = Description of Artificial Sequence: Synthetic coding sequence
  source 1..1167: mol_type = other DNA
atggagctgcagtaccccccccccccccccagcccccggatctgccgtgagagatccggcggagacaatgccagcatgcccgtgctcagtgaggatagcggtttgcatgagactcttgcgttgctgactagccagctgagaccagattcaaaccataaagaagagatgggatttttgcgcgatgtgtttagcgagaagtctctgagttacctcatgaaaatacatgaaaagctccgttactatgagaggcagagcccaacccccgtgctgcacagcgcggtggcacttgcagaggacgttatggaggagctgcaggcagccagcgtccacagcgacgaaagagagctgctgcagttactctccactccccacctgcgagctgtgctgatggtacacgacacagtcgctcaaaaaaacttcgacccggttctgccaccactacctgacaatattgacgaagacttcgacgaggaaagcgtcaagattgtcaggctggtcaagaacaaggaacccctgggagccacaatcagaagagatgagcactcgggtgccgtcgtggtggcccgcatcatgcgggggggcgcggctgaccgctcgggcctggtccacgttggcgatgagttgcgagaagttaacggtattgcagtgctccacaagaggccagacgaaatcagccagatcctggctcagagccaaggcagtattacgcttaaaatcattcccgccacacaggaggaagatcgcctgaaggagtccaaagtgttcatgcgagccctgttccactacaatccgagagaggatcgcgccatcccttgtcaggaggcaggcctgccttttcagcgaagacaggtgttggaagtggtgtcacaggacgaccccacctggtggcaggccaaacgggtgggagacacaaatctgcgagcaggcctcattccgtctaaggggtttcaggaacggcggctgtcctataggagagcttacggcacacccatctccccacagttctctcagcccaagcaagagctatcactgcctcgtcactgggccccgacacagctgctcccctcctgcggggcacactgtccggggggaaagggaactcacactccaacccttataccaatcctgctcagcccaagccttcagcttgagtttattcagtactag

SEQ ID NO: 194758 - DNA, 1758 bp, synthetic construct
  misc_feature 1..1758: note = Description of Artificial Sequence: Synthetic coding sequence
  source 1..1758: mol_type = other DNA
atgcccgtgctgagcgaggacagcggcctgcacgagaccctggccctcctgacatcacagctgcgcccagactccaatcacaaagaggagatggggttcctgcgggacgtattcagtgaaaagtctctgagctacctgatgaagatccacgaaaagctgaggtactacgagcgtcagtcgccaaccccagtactccattcagcagtggccctggccgaggatgttatggaagaactgcaggccgcctcggtccatagcgatgaaagagagttattacaacttctctccaccccccatttgcgcgctgtgttgatggtccacgacaccgtcgcacagaaaaactttgaccccgtcttgccaccccttccagataacatcgatgaggatttcgatgaggagagtgtgaagatcgtcaggttagtgaagaacaaagaaccactgggagccacaattcgccgggacgaacactctggcgcagtcgtcgtggcgaggattatgaggggtggcgccgccgatcgctcaggactcgtgcatgtgggggatgaactgagggaggtgaatggtattgcggtactgcataaacgccctgatgaaatttcacagattcttgctcagtcgcagggatctattacgctaaagattataccggccacacaagaagaggacaggctaaaggagagtaaagtgtttatgcgcgccctgttccactacaatcctcgcgaagaccgggctataccttgccaggaagccggactacccttccagcgccggcaggtcttggaagttgtgtcccaggacgatcccacctggtggcaggctaagcgcgtcggagataccaaccttagagccggcctaatccccagcaagggatttcaagagcgacgcttgagctaccgaagggccgccggaacactgccctcgccgcagtccctgcgtaaacctccatacgaccaaccctgtgataaggaaacctgcgactgcgagggatatctgaaaggccactacgtcgcagggctcaggaggagtttccgcttggggtgtcgagagcgcttgggtggcagccaggagggtaaaatgtctagcggcgctgaatccccggaactgctaacgtacgaggaagttgctcgctatcaacatcagcccggcgagcggccccgtcttgtcgtactgataggctcactgggggcgagactccatgagctcaaacagaaagtggtcgccgagaatccacagcattttggtgtggctgtccctcacaccaccagacctaggaaaagtcatgagaaggagggggtggaatatcacttcgtgtctaaacaggcttttgaagctgacctgcatcacaacaagttcctggagcacggagagtataaggagaacctatatggcacatctctcgaggctatacaggccgtaatggctaagaataaggtgtgcctcgtggacgtcgagccagaagccctaaagcaactgagaacaagtgaatttaaaccttacatcatttttgttaagcctgccatccaagagaagagaaagacaccccccatgagtcctgcgtgtgaggacaccgcagccccgtttgatgaacagcagcaggagatggctgcaagcgcagcatttatagatcgccactacgggcacctagtcgatgccgtgctggtgaaagaagatctgcaaggagcctatagccagctgaaggtggtactggagaagctgtcaaaggacacacattgggtacctgtttcctgggtgaggtag

SEQ ID NO: 194759 - DNA, 1833 bp, synthetic construct
  misc_feature 1..1833: note = Description of Artificial Sequence: Synthetic coding sequence
  source 1..1833: mol_type = other DNA
atggagctgcagtaccccccccccccccccagcccccggatctgcagggaaagatccggtggggataacgctagtatgcccgtcctttccgaggactctggactccacgaaacgttagccctacttacctctcaacttcgacccgattctaatcataaagaagagatgggatttctgcgagacgtattctctgaaaaatcgttaagttacctcatgaaaattcacgagaaactgcgatattatgagagacaatctcccacacccgttctccactccgcagttgctctggcagaggatgtgatggaagaacttcaggctgcttcggtgcacagtgatgagcgcgagctcctccaactcttgtccactccccaccttcgtgctgtgttaatggtgcacgataccgtcgcccagaagaacttcgatccagttctcccccccctgccggacaacattgatgaggatttcgatgaagaatctgtcaagatagtgcgcctggtgaaaaacaaagaacccctgggagccaccattcgcagggacgaacactcgggcgctgttgtggttgcccggataatgcgtgggggcgccgccgacaggtctggcctggtgcatgtgggtgacgagctaagggaggtaaacggtatcgccgtcctccacaagcgcccagacgaaattagtcagattctggcgcaatctcagggctctataacattgaaaatcattccggctacacaggaggaggataggctgaaggaatctaaggtctttatgagagcattgtttcattataaccccagggaggatcgtgccattccatgccaggaagccggactgccgttccagcggaggcaggtcctcgaagtcgtatcacaggacgatcccacttggtggcaagccaaacgcgtgggggatacaaatctcagggctggactgatcccgagcaaaggctttcaggaaagacgacttagttaccgcagggcagccggcactcttccgagccctcagtctctccggaagcctccatatgaccaaccttgcgacaaggaaacgtgcgactgcgaaggatacctaaagggtcactatgtggccggactcaggaggtctttcaggttaggttgtcgcgaacgcctcggaggctcccaagaaggaaaaatgtcaagtggagcagagtcccccgagctcctaacctatgaggaggtcgcacggtatcagcaccagccgggcgaacggccaagactggtggtactgattgggagcctcggagcccggctccatgagttgaaacagaaggttgtcgccgagaatccacagcattttggtgttgcggtaccacacacaactagaccccggaaatcgcacgaaaaggagggagttgagtaccatttcgtgtctaagcaggcattcgaggcagacttgcatcacaacaagttcttggagcacggcgaatataaggagaacctctatggaacttcgctggaggcaatccaagctgtcatggccaaaaacaaggtgtgtcttgtggacgtggagccggaggcgctcaagcagcttcgaacgagtgaattcaagccctatatcatctttgtgaagccagcaatccaagagaaacgcaagactccccccatgtctcccgcctgtgaagatacagcagcccccttcgacgagcagcagcaggaaatggccgcatcagccgccttcatcgacaggcactatggccacctcgtggacgccgtgctggtgaaggaggacctccagggagcctactcccagctcaaagtggtccttgagaaacttagcaaggatactcactgggtgcctgtaagttgggtgcggtag

SEQ ID NO: 194760 - DNA, 1782 bp, synthetic construct
  misc_feature 1..1782: note = Description of Artificial Sequence: Synthetic coding sequence
  source 1..1782: mol_type = other DNA
atgatccagagcgacaagggcgccgacccccccgacaagaaggacatgaagctctctactgcaaccaacccccagaacggcttgtcccaaatcttaagactggtcctgcaagagctaagcctgttctatggcagagatgtgaatggagtgtgcttactgtacgacctcctccacagtccttggctccaggcgctgctgaagatatatgattgtttacaagagtttaaagagaaaaaattggtcccagccacccctcatgcacaggttttgtcatacgaggttgtagaattgctcagggaaacacccacctctcctgagatccaagaactgcgccagatgctgcaagctcctcactttaaagccctcttgtctgctcacgatactatcgctcagaaggactttgagccactgctcccaccgttaccagataatatacccgagtccgaggaagcaatgcgcattgtgtgcttggttaaaaatcagcagcccttgggcgccaccatcaaaaggcacgaaatgacaggcgacatcctcgtggctcgcatcatccacggcggacttgctgagaggtcagggctgctgtatgccggcgataaactggtggaggtaaacggagtgagcgtcgagggccttgatcccgagcaggtgatccacatactagcaatgagtcgcgggaccattatgtttaaggtcgtcccggtctcagacccccccgtgaactctcagcagatggatccggacattccttgtatggacgccggcttgcctttccaaaaaggcgacatattgcagatcgtggatcagaacgatgccctgtggtggcaggcacgtaaaatctcagaccctgcaacctgcgccggcctggtgccttccaaccacctgctgaagcggaagcagcgggagttttggtggtcacaaccgtaccagccgcatacatgtctgaagagtacactgtataaggaggaattcgtgggctacggtcagaaattctttatcgccggatttcgcagatcaatgcgattatgtcggcgtaagtcacacctgtcgcctctgcacgcaagtgtatgttgcaccgggtcttgttactctgctgtgggggcgccatatgaggaggttgtgcggtatcaaaggagaccaagtgataaataccggctaatagtcctgatggggccatccggcgttggagttaacgagttacgtaggcagctgatcgaattcaatcccagccatttccagagcgccgtgccccataccacgcgtaccaaaaagagctacgaaatgaatggaagagagtatcactatgtgtctaaggaaaccttcgaaaacctcatctattcccacaggatgctggaatatggtgagtataaaggccacctgtatggtacaagtgtcgacgctgtgcaaactgtcctggtagaagggaagatctgtgtcatggacctagagcctcaggacattcagggcgtgcggactcatgagctgaagccttatgtgattttcattaagccctctaatatgagatgcatgaaacagagccggaaaaatgccaaagtcatcacagactactacgttgacatgaagtttaaggatgaggatttacaggagatggaaaaccttgctcagcggatggagacccaatttggacagttttttgatcatgtcatcgtaaacgatagcctgcacgatgcctgtgcccagctgttaagtgctatacagaaagcccaggaggagccccagtgggtgccggcaacctggatctcatccgatacggagtctcagtag

SEQ ID NO: 194761 - DNA, 1809 bp, synthetic construct
  misc_feature 1..1809: note = Description of Artificial Sequence: Synthetic coding sequence
  source 1..1809: mol_type = other DNA
atgatccagagcgacaagggcgccgacccccccgacaagaaggacatgaagctgtctactgccaccaaccctcagaacgggctgtcccaaatcctccgtctcgtcctccaggaacttagcctgttctatgggagagatgtcaatggagtgtgtctgctgtatgacttgctccacagcccatggttacaggccctgctaaaaatttacgactgtttgcaggagttcaaggaaaagaagctcgttccagccaccccccatgcccaggtgctgtcttacgaagtggtggagttgctccgcgaaactccaacttcgcccgagatccaggaactccgacagatgctccaggcccctcatttcaagggcgcgactataaagaggcatgagatgaccggagacattctggtagcccgtatcatacacgggggcttagccgagcgtagtggcctgctctacgccggggataaactcgtggaagtgaatggagttagcgtggagggccttgaccccgaacaggtgatacacatccttgcaatgtctaggggcactattatgtttaaggtagtgcctgttagtgaccctcccgtcaattcccagcagatggtttacgtgagagcaatgaccgaatactggccccaggaagaccctgacatcccgtgtatggacgccgggttgcctttccagaagggagatatcctccagatagtcgaccagaatgacgctctgtggtggcaggcgaggaagataagcgatccagctacctgtgccgggctggtcccctctaaccatcttctgaaacggtggagtttcgctttagtggctcaagctggcgtacagtggcactatctggacagcttacagcccctccctcccggctttaagaggttttcctgccttagcctgcccaggagctgggattatatcgaggacgacatgaaaatcgacgaaaagtgcgtggaggctgagaaggaatctatcgagactgacaaggaggagttcgtagggtacggtcaaaaatttttcattgccggattcagaaggtccatgcgtctgtgtcgacggaagtcgcacctgtcccctctgcacgcttccgtttgttgtactggttcttgctattccgctgtaggcgccccatacgaggaggtggtgcggtatcagagacgacccagtgataaatatagactgatcgtccttatggggccatcgggcgtcggcgtcaatgagcttaggaggcagctgatcgaatttaacccttcacatttccagtcagcagtgccccacaccaccagaacaaagaaaagttatgaaatgaacggaagagagtaccattacgtatccaaagagacttttgagaaccttatttactcccatcgcatgttagaatatggggagtacaagggccacctgtacgggacctccgtggacgcagtccagaccgtactggtagaaggaaaaatctgtgtgatggatctcgaaccacaggacatccaaggagtgcgcactcacgagcttaagccttatgtgatctttataaagccgtctaacatgcgatgtatgaagcaaagccgaaagaatgcaaaggtgattactgattactatgtagatatgaaatttaaagacgaagacctgcaggaaatggaaaacctagctcagaggatggagacgcaattcgggcagtttttcgatcatgttattgtgaatgatagcctccacgacgcttgcgcacagcttttgtccgccatccagaaagctcaggaggagcctcaatgggtgccagccacctggatttcctctgatactgagagtcaatag

SEQ ID NO: 194762 - DNA, 1914 bp, synthetic construct
  misc_feature 1..1914: note = Description of Artificial Sequence: Synthetic coding sequence
  source 1..1914: mol_type = other DNA
atgatccagagcgacaagggcgccgacccccccgacaagaaggacatgaagctctcaacagcaactaatccccagaacggcctgtcccagattctacgtttggtgcttcaggagctctcactcttctatggtcgtgatgttaatggagtgtgtttgctctatgatttattgcattctccctggctgcaggccttgcttaaaatttatgattgtttacaggagtttaaggaaaaaaaactagttcctgcaactcctcatgcacaggtgctcagctacgaagtcgtggagctgctgcgcgagactcccacatcccctgaaatacaggagctacggcagatgttgcaggctccacatttcaaagcactcttgagcgctcatgatacgattgctcagaaggatttcgagccgctgttgccccctctcccggacaatattccggagtcagaggaagccatgcgtatcgtctgtctggtgaaaaaccaacagccgctgggcgcaacgataaagaggcatgaaatgaccggagacattctggtggctagaattatccacggcggactagctgagcgtagtggactgctgtacgctggtgataagctggtggaggtgaacggggtgagcgtggagggccttgatcctgagcaggttattcacatcctggctatgagtcgcggtaccattatgttcaaggtcgtccctgtctccgatccccccgttaacagccagcaaatggtgtatgtgagggcaatgaccgagtactggccacaggaagatccggacattccatgcatggacgctggcctgcctttccagaagggcgatatcctccagattgtagatcagaatgatgccctgtggtggcaagctaggaaaatcagtgacccagccacctgtgcagggcttgtccctagcaatcaccttcttaaaagaaaacagcgggaattttggtggtcacagccttaccagccacacacatgtctgaaatccactttgtccattagcttgaaaggagaagacgacatgaagatcgacgagaagtgcgtcgaagcggaaaacagcacagccgaatccgaagagttaaactccgacaaggaagagttcgtgggatatgggcagaaattttttatcgccggtttccgacgctctatgcgtctctgtaggcgcaagagtcatctgtctccactccatgcaagcgtctgctgtacaggtagctgttacagcgcagtgggggccccatacgaggaagttgtgcggtaccagagaaggccctctgataagtatagactgatagtattgatgggaccaagtggggtcggcgtcaatgagctgcggaggcagctgatcgagtttaacccctcacatttccagtcagccgtcccacataccaccagaacaaagaaaagttacgagatgaacgggcgcgaatatcattacgtgagcaaggagactttcgaaaaccttatttactctcaccgcatgctggagtatggtgaatataaaggtcacttgtatggaacatcggtggacgcggtgcagactgtcctggtggagggaaaaatttgtgtgatggacctagaacctcaagacatccaaggggtgaggacccatgagctgaagccctacgttatctttatcaagccttccaatatgcgttgcatgaagcagtcccggaagaacgccaaagttattacagactactacgtggacatgaagtttaaggacgaagacctccaggagatggagaatctggcacagcggatggagacccagtttggccagttcttcgaccatgtaatagtgaacgattccctccatgatgcttgtgcgcaactgctctccgcaatacagaaagctcaggaagagccgcagtgggttcctgctacctggatatcctctgataccgagagccaatag

SEQ ID NO: 194763 - DNA, 1701 bp, synthetic construct
  misc_feature 1..1701: note = Description of Artificial Sequence: Synthetic coding sequence
  source 1..1701: mol_type = other DNA
atgatccagagcgacaagggcgccgacccccccgacaagaaggacatgaaactcagcactgcaaccaacccgcagaacggactctcacagatacttagactggtgttgcaggaactgtctctgttctacggaagggatgtaaatggggtctgtctgctctacgatcttctccactctccgtggctgcaggcccttctcaaaatatacgactgtttacaagagttcaaagagaaaaagcttgttccagccacacctcacgcccaggtcctaagttatgaaggcgctaccataaagcgccacgagatgaccggtgatatcctcgttgcacgtataatccacgggggcttggctgagagaagcggcttgctgtacgccggagataaactggtcgaggtgaacggcgtgtctgtcgagggtctggatcccgagcaagttattcacattctggccatgtctcgcggtacaataatgttcaaagtagtgccagttagtgacccccctgtcaactcacaacaaatggtgtacgtcagagcgatgacagagtactggccccaggaagatccagatattccatgtatggatgctggtctgccattccagaagggcgacatcttgcaaattgttgatcagaacgatgctctttggtggcaagctcggaagatctctgaccccgccacatgcgcaggcctggttcccagtaaccacctgctgaaacgcaagcaacgagagttttggtggagtcaaccctaccaacctcatacctgtctgaaatctaccctcagtatttccttgaaaggagaggacgatatgaagatcgacgaaaagtgtgtagaggccgaaaattcaaccgcggaaagtgaggagctcaacagcgacaaggaggagtttgttggatacggacagaagttcttcattgcgggctttaggcggtccatgcggctatgtcgaagaaaatcgcacctgtccccactgcatgcttcggtatgctgcaccggaagctgttacagtgctgtcggagcaccgtacgaagaagtcgtcagatatcaacggagacctagtgataaataccggctgatcgtcctgatgggaccaagcggggtcggtgtgaacgaactccgtcggcagttgatcgagtttaatccatcacactttcagtccgcagttcctcatacaactcggaccaagaaatcttacgagatgaatgggcgggagtaccactacgtgtctaaggagaccttcgaaaatctgatttattcacacaggatgctggaatacggagagtataaagggcatctgtatgggactagcgttgacgcagtgcagacagttctggttgagggaaagatctgtgtgatggacctagagccacaggatattcagggcgtgagaacacacgaactgaagccatacgtcatctttatcaaaccttctaatatgagatgtatgaaacagtccagaaagaatgccaaggttattacggattactacgtagacatgaagtttaaggatgaggacttgcaagagatggagaatttggcccagcgcatggagacacaattcggccaattcttcgatcatgtgatcgtcaacgacagtctgcacgacgcgtgtgcacagctgctaagtgcaatccaaaaagcacaggaggagccacaatgggtgccggctacttggatctcaagcgacacggaatcacagtag

SEQ ID NO: 194764 - DNA, 1914 bp, synthetic construct
  misc_feature 1..1914: note = Description of Artificial Sequence: Synthetic coding sequence
  source 1..1914: mol_type = other DNA
atgatccagagcgacaagggcgccgacccccccgacaagaaggacatgaagctgtctaccgcaacaaacccccaaaatggcctatcacagatcttaaggctggtgctacaggaactcagcttgttctatggtcgggacgttaacggagtttgcctgctgtacgaccttttacatagcccatggctgcaggctctgctaaagatctacgattgtttgcaggagtttaaggagaaaaaactggttcctgctacaccccacgctcaggtcctgtcttatgaagtagtggagctcctgcgggagacgcccacctcccctgaaatccaagagctgcgacagatgctgcaggcgccgcactttaaggccctgctgtccgcccacgacacgattgcccagaaggattttgagcctctcttgccgcccctccctgataacatccctgaatctgaagaagccatgcggatcgtgtgcctggtgaagaaccagcaacccctaggcgcaactatcaaacgccatgaaatgacgggagatattctggtggcccgcatcatacatggtggcctcgcggaaagaagtgggctgctgtatgctggggacaaactcgtggaggtcaatggggtgagtgtggaaggcctcgatccggaacaagttatccacatcctggccatgagccgagggacaattatgtttaaggtcgtgcccgtgtcagaccctccagtgaattcacaacagatggtatatgtgagggccatgactgaatactggccgcaagaagaccccgatatcccatgcatggatgccggcttgccttttcagaaaggggatatccttcagattgttgatcagaacgatgcattgtggtggcaggctcggaagatttctgacccagccacatgtgccgggctggtgccctctaatcacctgctcaagagaaagcaaagggaattttggtggagtcaaccctatcagccccatacgtgcctgaaatctactctgtccatcagcatggaggaagaagatgatatgaagatcgatgagaagtgtgtcgaagccgacgaagaaacctttgaatccgaagagttgagtgaggacaaggaagagtttgtagggtacgggcagaagtttttcattgcaggattccgccgctccatgagactgtgtaggcggaagtctcacctcagcccactgcatgccagtgtgtgttgcacagggtcctgttacagcgctgttggcgctccgtacgaagaggtggttcgttatcaacgtaggccctctgataagtacaggttgatagtgctaatgggaccatccggtgttggcgttaatgagctgaggcggcagctgatcgaatttaaccccagccactttcagtctgctgtcccccacacaacccgtaccaaaaagagctacgaaatgaacggtcgagaataccactatgtgagtaaagagacttttgaaaacctgatatactctcacaggatgctcgaatacggggagtacaagggacatttgtatgggacaagtgtagacgctgttcagactgtcctcgtggaggggaaaatctgcgtcatggacctggagccccaggacatccagggtgtaaggactcacgagctaaaaccatatgtgatttttatcaagccttccaacatgcgttgtatgaagcagtcgagaaagaacgcgaaggttataaccgattactacgtggatatgaaattcaaagatgaggatctgcaggagatggagaacctggcccaacgaatggagactcagtttggccaatttttcgatcatgtcatagtgaatgacagcctgcatgatgcctgtgcacagctactgagcgcgatccaaaaggcacaggaggagccccagtgggtgcctgccacctggatctctagtgatactgagagccagtag

SEQ ID NO: 194765 - DNA, 2028 bp, synthetic construct
  misc_feature 1..2028: note = Description of Artificial Sequence: Synthetic coding sequence
  source 1..2028: mol_type = other DNA
atgaccaccagccacatgaacggccacgtgaccgaggagagcgactcagaagtgaagaatgtggacctggcaagtcccgaagagcaccaaaagcacagagagatggcggtggattgtcccggggatctgggcactcggatgatgcccattaggagatcggctcagctggagcggatccggcagcagcaagaagatatgaggcgccgaagagaagaggaaggaaaaaagcaggagcttgatctgaattcctctatgagactgaagaaactcgcccagatcccaccaaagactggcatcgacaatcctatgtttgacacagaggaaggaatcgtactggagtctcctcactatgctgttaaaatcttggagatcgaggacctgtttagttccttaaagcacattcaacacacactggttgatagccagtcccaagaagacatctcgcttctactccagctcgtgcagaacaaagattttcagaacgcttttaaaatccataacgctatcacagttcacatgaataaagctagtccaccctttccactcatttctaacgcccaggatctggcgcaagaggtgcagactgtcctgaagcctgtgcaccataaggaaggccaagagctcaccgccttacttaatacaccccatatccaggcccttctgttggcccatgacaaagttgcagagcaggagatgcagcttgagccaatcactgacgaaagagtttatgagagcattggccagtacggcggagaaacagtgaagatcgtgaggattgagaaagcccgggacatcccactcggggccacagttagaaatgagatggattcagttataatttctcgcatagtgaaaggaggagctgccgaaaagtctggattgttacacgagggggacgaggtactggaaatcaacggcatcgaaatcaggggcaaagacgtgaacgaggtgtttgatctcctgtcagacatgcacggcaccctcaccttcgtcctcatcccatcccagcagatcaaacccccccccgcgaaggaaactgtaattcatgtgaaggctcatttcgactacgatccttcagacgatccctatgtgccatgtagggaattgggactgtctttccagaagggcgacatcttgcatgtgatttcccaggaagatcccaattggtggcaagcgtaccgcgagggggacgaagacaatcagcccctagccgggctggttcccgggaagagctttcaacaacagcgcgaggctatgaagcagacaatagaagaggataaagagccggaaaaaagtggtaagctatggtgtgccaaaaagaacaagaagaagaggaagaaggtgctctataacgccaataagaacgatgactacgacaacgaggagatcctgacctatgaggaaatgtctctttatcaccagccggctaatagaaaaagaccaataattctgatcggacctcaaaattgcgggcagaatgaacttcggcagcgactcatgaacaaggagaaagatcggttcgctagcgccgtgccccacaccacccgaagccggcgcgaccaggaagtcgccgggcgcgattaccacttcgtcagcaggcaagcattcgaggcagacatcgcagccggtaagtttattgaacacggcgagttcgagaagaacctgtatggaacctcgattgattccgtccgccaggtgataaactctggcaagatttgcctgctgtctctccgaacacaatctctgaaaaccctccgcaacagtgacttgaaaccctatataattttcattgcccctccttctcaggagagattacgagccctcctggccaaggaagggaaaaatccaaaaccggaagaattgagagagattatcgagaagacccgggagatggaacagaataacgggcattatttcgacaccgcgatcgtcaacagcgacctggacaaagcatatcaggaactgttgcgattgattaacaaactggacactgagccgcagtgggtgccttcaacctggctcagatag

SEQ ID NO: 194766 - DNA, 1926 bp, synthetic construct
  misc_feature 1..1926: note = Description of Artificial Sequence: Synthetic coding sequence
  source 1..1926: mol_type = other DNA
atggccgtggactgccccggcgacctgggcacccggatgatgcccattaggaggtccgcacaactggaaagaatccgccagcagcaggaagatatgcggaggcgtagagaagaagaaggaaagaaacaggagttagatctgaactcctcaatgcggctgaaaaagctagcacaaatacctcccaagacaggaatcgataatcccatgttcgacacggaggaggggattgtgctggagagcccacactatgcggtgaagatcttagagatcgaggatctcttctccagtctgaagcacatccaacacactttggtcgatagccagtcccaggaggacattagcttacttctgcagctggttcaaaacaaggattttcagaacgccttcaaaatccacaatgccataaccgtacacatgaataaagcctcccctcctttcccactgatttccaatgcccaggacctcgctcaggaggtgcagaccgtgcttaagcccgtccaccacaaagagggccaggagctcacagcactgttgaataccccacatatacaggccctgctgctggcccatgataaagtggctgaacaagaaatgcagcttgaaccgattacggacgaacgagtgtacgaaagtatcggacagtatggaggggaaaccgtgaagatcgtgagaatcgaaaaggcgagagatatccccctgggcgcgactgttcggaatgagatggactctgtcatcatctctcgaatcgtcaaaggaggtgctgccgagaagtcaggacttttgcacgagggcgacgaagttctggaaatcaacggaatcgagattagaggcaaggatgttaatgaggttttcgacctcctttccgatatgcatgggacactgacgttcgtactgattccaagtcagcagatcaagcctcctccagccaaagagactgttatccacgtgaaggctcattttgattacgacccatctgacgacccatacgttccgtgccgggagctgggtcttagttttcagaagggtgacattttgcatgtgatttctcaggaggaccccaattggtggcaggcttatcgtgaaggagacgaagacaaccagcccctcgccgggctggtgcccggtaagagtttccaacagcaacgggaagccatgaaacagacaattgaggaagacaaagagcctgaaaagtcgggaaagctctggtgcgcgaaaaagaataagaaaaaacggaagaaggtcctgtacaacgctaacaaaaacgatgactatgataacgaagagatcctgacgtatgaagagatgtctctttaccaccagccagctaaccgaaagagacccatcattctgatcgggccacagaactgcggacaaaatgaactaaggcaacggctgatgaacaaggagaaggatagatttgcctctgctgtcccgcacactacaagatcacgcagggaccaggaggtagccggcagagattatcatttcgttagccgtcaggcctttgaggccgacatcgctgcgggtaagttcattgaacacggtgaattcgaaaagaatttatacgggacttccattgattcagttcggcaagtgattaacagcggtaaaatttgcctcttgtcactccgcactcagagccttaaaacgcttaggaattccgatctgaaaccatacatcatctttatcgctcctccttctcaagaacggttgagagcactgttggccaaagagggcaagaatccaaagccggaggagctcagggagatcatagaaaaaaccagagagatggagcagaacaacggccattattttgatacggctattgtgaacagtgacttagataaagcctatcaagagttactgcggctgatcaataaacttgatacggagccgcagtgggtaccgtccacctggctgcgctag

SEQ ID NO: 194767 - DNA, 15 bp, synthetic construct
  misc_feature 1..15: note = Description of Artificial Sequence: Synthetic coding sequence
  source 1..15: mol_type = other DNA
atggccgtggactag

SEQ ID NO: 194768 - DNA, 450 bp, synthetic construct
  misc_feature 1..450: note = Description of Artificial Sequence: Synthetic coding sequence
  source 1..450: mol_type = other DNA
atggccgtggactgccccggcgacctgggcacccggatgatgcccattcggcgctcagcccaacttgaaagaatacgacagcaacaggaggatatgcgcagaagaagagaggaggagggtaaaaagcaggaactggacctcaattcatcgatgcgcctgaagaaattggcccagatcccgccgaaaaccggcatcgacaatccaatgtttgacacagaggaagggatcgtgctcgagagtccacactatgctgtcaagattctcgaaatagaggatttattttctagcctgaaacatatacagcacactcttgtggacagtcaatcacaggaagatattagccttctgctccagctggtacaaaacaaagatttccagaatgcattcaagatacacaatgcgataactgtccacatgaacaaggcttctccccctttccctttgatttag

SEQ ID NO: 194769 - DNA, 870 bp, synthetic construct
  misc_feature 1..870: note = Description of Artificial Sequence: Synthetic coding sequence
  source 1..870: mol_type = other DNA
atgaccggcgtgttcgaccggcgggtgcccagcatccggagcggcgacttccaggcaccatttcagacgagcgccgccatgcaccaccctagtcaagagagccctaccttacccgaaagcagcgccacagatagcgactactattcacctaccgggggcgccccgcacggatattgcagtccaactagcgcctcgtacggaaaagccctgaatccttatcagtaccaataccacggcgttaacggaagcgcaggctcctacccagccaaggcctacgccgactactcctatgcctcctcttaccaccagtatgggggcgcgtataatagggttcccagtgccaccaatcagccagagaaggaagtgactgagcccgaggtacggatggttaacggtaagccaaaaaaggtccggaagcccagaacaatctatagcagtttccagcttgcggcacttcagagacggtttcaaaagactcagtatttagctctccccgagcgcgcggagctcgcagcatcactgggactgactcagacccaagtcaagatctggtttcagaataagcgatctaagataaagaagatcatgaaaaacggcgagatgcccccggagcattctccttccagctctgatcctatggcttgcaactcaccacagtccccagccgtgtgggagccccaagggtcttctaggtcacttagccatcatccccacgctcatccaccaacctcaaatcagtctccagcatccagttatttggagaactctgcatcgtggtacacttctgcagcttctagcatcaactcccacctgccacccccagggagcctacaacatcctctagcgctcgcctctgggacgttatactag

SEQ ID NO: 194770 - DNA, 1623 bp, synthetic construct
  misc_feature 1..1623: note = Description of Artificial Sequence: Synthetic coding sequence
  source 1..1623: mol_type = other DNA
atgcagcaggtgctggagaacctgaccgagctgcccagcagcaccggcgccgaggagattgatttaatctttctcaaagggattatggaaaaccccatcgtgaagtcattagcaaaggcccacgagcggctcgaagatagcaagctggaagctgtgtctgacaacaacttggaactggtcaacgaaatacttgaggacatcacacctttaattaatgtggatgagaatgtggctgaactggtgggaattctgaaggagccacatttccagagtctactggaagcccacgacattgttgcttctaaatgctacgatagcccaccttctagtcctgagatgaacaattcaagcatcaataaccaattgctccctgttgatgcaattaggattctcggcattcacaagcgcgctggggagcccctgggagttacgttccgcgtcgaaaataacgacctggtcatcgctaggatccttcatggggggatgatcgatcggcagggactcctgcatgtgggcgatattatcaaggaggtgaatggccacgaagtgggaaacaatccaaaggagctccaggagttacttaagaatatcagcggtagcgtcactctcaagattctgccctcatatcgggataccatcacacctcaacaggtgttcgtaaaatgtcatttcgattacaatccgtacaacgataatctgatcccttgcaaggaggcgggacttaagttctctaaaggagagatcctgcagatagtgaatcgggaggacccgaattggtggcaggcaagccacgtgaaggagggcggatcagccggcctgatcccctctcagtttctcgaggaaaagcggaaagcctttgtgcggcgcgactgggacaactcaggccccttctgtggcaccattagctctaaaaagaagaaaaagatgatgtatttaacaacacgcaacgcagagttcgaccggcacgaaatacagatatatgaagaggtagcgaagatgccccccttccagaggaaaaccctggtgttgatcggggcacagggagtgggcagacgctccctgaagaaccgttttatcgttcttaatcctacacgcttcggcacaactgtgccatttacgtcgaggaagccccgggaagacgagaaggatggtcaggcgtacaagtttgtctctcggtctgaaatggaggccgatatcaaagctgggaagtatctggagcacggtgagtacgagggaaatttatatggcacaaaaatagactctattctggaagtggtccagacaggtagaacgtgtatcctcgacgtgaaccctcaagctctgaaggtgctgagaacatcggaatttatgccctatgtggtgttcattgctgctcctgaattagaaacactcagggccatgcataaggcagtggtcgatgccggcatcaccaccaaattgctaacggatagcgatctcaagaagacggttgacgagagcgcgcgtatccaacgggcttataatcattatttcgacctgatcattatcaacgacaacttggacaaggcattcgagaagctgcagacagcaatcgaaaagttacgcatggagccccagtgggtcccaatttcttgggtgtattag

SEQ ID NO: 194771 - DNA, 1287 bp, synthetic construct
  misc_feature 1..1287: note = Description of Artificial Sequence: Synthetic coding sequence
  source 1..1287: mol_type = other DNA
atgaacaacagcagcatcaacaaccagctgctgcccgtggacgccataaggattcttggcattcacaagcgagcaggggagcccctcggggtaaccttccgcgtggagaataacgacctggtaatcgctaggatcctgcatgggggcatgattgacagacaggggctgttgcatgtgggagacatcatcaaggaggtcaacggacatgaggttggcaacaaccctaaggagttgcaggaacttttgaaaaatatcagtgggtcggtaaccctgaaaatcctgcctagctatcgcgataccataactccacagcaagtttttgtcaagtgccacttcgactacaacccttataacgacaatctcatcccttgtaaagaggctggccttaaattcagcaaaggagaaattcttcagatagtcaatagagaagaccctaactggtggcaggcatctcatgtgaaggaggggggtagcgctggactcatcccctcacagtttctggaagaaaagagaaaggcattcgtccggcgcgattgggataattccggaccgttctgcggcacaatatcttcgaagaaaaaaaagaagatgatgtacctgacgacacgtaacgccgaattcgacaggcacgaaatccagatttacgaagaggtcgcaaagatgccgcccttccaacgcaagacactggtacttatcggcgcgcagggtgtggggcgtagatcgctcaaaaaccgctttattgttttgaaccccacccgattcggtacgacagtgcctttcacgtcccggaaaccccgggaggacgaaaaagatggccaggcatataagttcgtgtctagatctgagatggaagccgatatcaaagcaggaaagtatctggagcatggcgagtacgaggggaacctgtatggaacaaaaatcgatagcattcttgaagttgtccagacgggcaggacttgtatattggatgtgaacccacaggctctaaaggtgctgcggaccagtgagttcatgccatatgtggtgtttatcgcagctccggagcttgagaccctgagggcaatgcacaaggccgtggtggatgcaggaataaccacgaaattattgactgattccgatttaaagaagacagttgacgaaagtgcccgaatccagcgggcctataaccactacttcgacctgatcattatcaacgacaaccttgataaggcttttgagaaactccagacagctatcgaaaagttgagaatggagcctcaatgggtaccaattagctgggtgtattag

SEQ ID NO: 194772 - DNA, 924 bp, synthetic construct
  misc_feature 1..924: note = Description of Artificial Sequence: Synthetic coding sequence
  source 1..924: mol_type = other DNA
atgcagcaggtgctggagaacctgaccgagctgcccagcagcaccggcgcagaggaaatcgacttgatcttcctgaagggaattatggagaaccctatcgtgaaaagcttggccaaagcacatgagagactggaagattcaaaactcgaagctgtgtccgataacaatcttgagctggtaaatgagattctggaggatatcacgcccctgatcaacgtggatgagaatgtagctgagctggttggaattcttaaagaaccccacttccaaagccttctcgaagcgcatgatattgtggcatcaaaatgttacgattccccaccctcgtcccctgaaatgaacaactcttccatcaataaccagcttctaccagtggatgccatccgaatacttggcattcataaacgtgctggcgaacccctgggcgtcacctttagggtggaaaacaatgatttggtgatcgcccggatcctccatggtgggatgatcgacagacaaggcctgcttcacgtaggggatatcatcaaagaggtcaatggtcacgaagtgggaaataaccctaaggaactacaagagctgcttaaaaacatcagtggatcagttactctgaagattctgccttcctatcgagacaccatcactccccaacaggtgtttgtcaagtgtcactttgattataatccttacaatgataacttgataccatgcaaggaggccggtctaaaattttccaaaggcgaaatactccagatcgtgaaccgtgaggatcctaattggtggcaggcgagccacgttaaggaagggggcagcgctggccttattcccagtcaatttctggaggaaaagcgtaaagcctttgttaggagggactgggacaacagtgggccattctgcggcactataagcagtaagaagaagaagtag

SEQ ID NO: 194773 - DNA, 654 bp, synthetic construct
  misc_feature 1..654: note = Description of Artificial Sequence: Synthetic coding sequence
  source 1..654: mol_type = other DNA
atgcagcaggtgctggagaacctgaccgagctgcccagcagcaccggagctgaggaaatcgatctgatatttctgaaagggataatggaaaatcctattgtaaagagcctcgcaaaagcgcatgaacgtttagaggattctaagctggaagccgtatcagataataacctggagctcgtcaacgagatcctggaggacatcactcctctaattaatgtcgatgagaacgtagccgaactggtcggtatcctgaaagaacctcacttccaaagcctgctggaagcacacgatattgtggcttcgaaatgctacgattcgccaccttcttcacccgagatgaacaactcatccatcaataaccagctcttgcctgttgatgccatcagaatccttggcattcataagagagctggcgagcccttgggagtgacatttcgggtggagaacaacgacctcgttattgctaggattctccatggtgggatgatcgatcggcaaggcctgctccatgtgggcgatattattaaagaggttaatgggcatgaagtgggtaataatcctaaagaactacaggagctactgaaaaacatcagcggaagcgttacactgaaaatcctcccgtcctaccgggacactatcactccccagcaatag

SEQ ID NO: 194774 - DNA, 1731 bp, synthetic construct
  misc_feature 1..1731: note = Description of Artificial Sequence: Synthetic coding sequence
  source 1..1731: mol_type = other DNA
atgcccgccctgagcaccggcagcggcagcgacaccggcctgtacgagttgctggccgcacttcctgcccagctccaaccccacgtagacagccaggaggacctgactttcctgtgggacatgtttggcgagaagtctctgcatagcttggtgaagattcacgaaaaactacactattatgagaagcagtctccagtgcccatcctgcatggagctgcagcactggcagacgacctcgcggaggagctgcaaaataagcctcttaacagtgagatacgggaactgctgaaacttttatccaagcctaatgtgaaagcactcctcagcgtgcacgatacagtggctcagaagaattacgacccagtgctgcccccgatgcctgaggatattgacgacgaagaggattcagtcaaaatcattcgcctcgtgaaaaacagagagcccctcggcgccactatcaagaaggatgagcagaccggagccataatcgttgccaggattatgcggggcggggcagccgatcgcagtgggctgatacacgtgggagatgaattgagagaggtcaatggcataccagttgaagataagcgcccggaagaaattattcagatcctggcacagagtcaaggcgcaatcacgttcaaaatcattccgggcagcaaggaggagaccccaagcaaggagggcaaaatgttcatcaaggccctgtttgattacaatcctaatgaggacaaagcaataccttgtaaggaagccggactttcgtttaaaaagggggatatcctgcaaataatgtcacaggatgacgcaacctggtggcaggctaaacatgaagccgatgcaaacccccgggccggcctcatcccttccaaacattttcaagagagaaggctggcactgagacggcccgagatactggtgcagcctctcaaggtctccaatcgcaaatctagtgggtttaggaaaagcttccgactatcacggaaagataaaaagaccaataagagtatgtacgagtgtaagaagtccgaccagtatgacaccgctgacgttcccacatatgaggaggtgacaccctatcgacggcagactaatgaaaaatacaggcttgtcgtgctagtggggccagtgggagtcgggctgaacgagcttaaaagaaagcttctcatttccgatacacagcattacggggtgacggtaccacacactacacgggcccgacgtagccaggagtcagatggagtggaatatattttcatttcaaaacacctgttcgagaccgacgttcagaacaacaaatttatcgagtacggagaatataaaaacaattactatggcacctctattgacagtgtccggtctgtgctggccaagaataaggtgtgtctcctggacgtccaaccacatactgtcaaacacctgcgcactctcgaattcaaaccatacgtaatattcatcaagcccccgagcattgagcgtttgagggaaactcgcaaaaacgccaaaattatcagcagtagagatgaccaaggcgcagcgaagcccttcacggaagaggacttccaggagatgatcaagtctgcccagattatggagtcccagtatgggcatctgttcgacaaaattattataaatgacgacctcaccgtggcatttaacgaactgaagacgactttcgacaaactagagacagagacacactgggtacccgtctcctggctgcacagctag

SEQ ID NO: 194775 - DNA, 1731 bp, synthetic construct
  misc_feature 1..1731: note = Description of Artificial Sequence: Synthetic coding sequence
  source 1..1731: mol_type = other DNA
atgcccgccctgagcaccggcagcggcagcgacaccggcctgtacgaactcctggctgcgctgcccgcccaacttcagccccacgttgactcgcaggaggatttgaccttcctgtgggacatgttcggggagaaatcgctgcacagtttggttaagattcatgagaaactacactactacgaaaaacaatccccagttccgattttacacggggctgctgcattggcagacgacctggccgaggagctccagaataaaccgctgaattcagagatccgggagcttctgaagcttttatccaagccgaatgtcaaagcattgctttcagtccacgacaccgttgcgcagaagaactacgatcctgttttgccgcccatgccggaagacatcgacgatgaggaagactcagtcaaaataatccgcttggtaaaaaaccgggagcccttgggagctactatcaagaaggacgagcaaactggcgctatcattgtggcccgcatcatgcggggcggcgctgctgaccgcagtggtcttattcacgtgggagatgaactgcgggaggtgaatggcatccctgttgaggacaagagaccagaagagatcatccagattctagctcagtcccagggcgctattactttcaaaataatccccggcagcaaagaggaaactccatcgaaggaaggcaaaatgttcatcaaggcgctatttgattataaccccaacgaggataaggccataccctgcaaggaagccggcctgtcttttaaaaagggggatattctgcaaataatgtcacaggacgatgccacctggtggcaggccaagcatgaggccgacgcaaacccacgggctgggttgataccttccaaacactttcaagaaaggaggctggccctcaggcgacctgaaatcctggtccagcctctgaaggtgtccaatcgaaaaagttcgggatttagaaagtccttccggctgagccgaaaagacaagaagactaataagagcatgtatgagtgtaaaaaatcggatcaatacgacacagcagacgtacccacctacgaggaagtcactccttaccggagacagaccaacgaaaagtaccgcctggtcgtcttggtgggccctgttggagtgggcctgaacgagctgaaacggaagctgttgatctccgacacccagcactacggagtcacggtcccacatactactagagctaggaggtctcaggaatcagatggagtggagtatatttttatcagcaaacatctgttcgaaacagatgtacagaataacaagttcatagagtacggtgaatataagaataactactatggaactagcatcgattccgttagatccgttcttgcgaagaacaaagtgtgcctgctggacgttcaaccgcacacggtcaagcaccttcggaccttagagtttaaaccctacgtcatattcattaagcctcccagtattgagcggctgcgagagactcgcaagaatgctaagataatcagctcgcgagatgatcagggagcggccaagccattcaccgaagaagactttcaggagatgatcaaaagtgcgcagattatggagtcccagtacggacacctgttcgacaagatcataatcaatgatgaccttaccgttgcattcaacgagctgaaaaccacgttcgataaattggaaactgagacccactgggtgcccgtgagttggctacatagttag

SEQ ID NO: 194776 - DNA, 1731 bp, synthetic construct
  misc_feature 1..1731: note = Description of Artificial Sequence: Synthetic coding sequence
  source 1..1731: mol_type = other DNA
atgcccgccctgagcaccggcagcggcagcgacaccggcctgtacgaactgctcgccgccctgcccgcacagcttcagccacatgtcgatagccaagaggacctgacttttctctgggacatgttcggagaaaagagcctgcatagtctagtgaaaatacatgagaagctgcattattacgaaaaacagtcccctgttcccatactgcacggcgccgcagcattagccgacgatctggctgaggagctgcagaacaagccgctgaatagcgagatccgcgaactgttgaagctactctccaaacccaacgttaaggccttgctgagcgtgcacgatacagtagcacaaaaaaattacgacccggtgttacctcctatgcctgaggatatcgatgatgaggaagactccgtgaagataatccgtctggtgaaaaatagagaaccattgggagccaccatcaagaaagatgaacaaacgggtgctatcatcgtggccagaattatgagaggaggagccgccgatcggagtgggctgatacacgtcggtgatgagctgagagaagttaatgggatcccagttgaagacaagcgacctgaggaaatcatacaaattctggcccaatctcagggagccatcaccttcaaaattatcccgggctccaaggaagagaccccctcgaaggaaggaaaaatgtttatcaaggctttgttcgactacaaccctaacgaggacaaagccatcccgtgcaaggaagcgggcctgtcctttaaaaaaggtgacattttgcagatcatgtcccaagatgacgcaacttggtggcaggccaaacatgaggctgacgcgaatccccgggctgggctgattccatccaaacacttccaggaacggaggttggccctaaggcggcccgaaatactcgtgcagccccttaaggtctccaacagaaaaagctcgggctttcgcaaatcctttaggctgtccagaaaggataagaaaacaaataaatctatgtatgaatgcaaaaagtcggatcagtacgataccgctgatgtgcctacatatgaggaggttacaccctaccggcgtcagacgaacgaaaaatatcgccttgtggtattggtgggccccgtgggggttggcctgaacgagctgaagcgaaaactgttgatttccgatacccagcactacggcgtcacagtaccacacactacgcgtgcccggcgatcacaggagtccgacggcgtcgagtacatctttatctccaagcatttgtttgaaacagacgtacagaacaataagtttatcgagtacggcgaatataaaaacaactactatggcacctcgatagactcagtgcggagtgtcctggccaaaaacaaagtctgcctcctggacgtgcaaccccacaccgttaagcacctaagaaccctagaattcaagccctacgttatcttcatcaaacctcccagtattgaaagactccgggaaacaaggaaaaatgccaagatcattagctcccgggatgaccagggggccgcaaagccttttaccgaggaggatttccaggaaatgatcaagtctgcccagataatggagtctcagtacggccatctcttcgacaaaataatcatcaatgacgacctcactgtggcattcaacgagctgaagacgacctttgacaaactggaaactgaaactcattgggtgcccgtgagctggctccactcctag

SEQ ID NO: 194777 - DNA, 939 bp, synthetic construct
  misc_feature 1..939: note = Description of Artificial Sequence: Synthetic coding sequence
  source 1..939: mol_type = other DNA
atgcccgccctgagcaccggcagcggcagcgacaccggcctgtacgaactattagctgctctgccggcacagctccagccgcacgtcgattcccaagaggatctgacatttctttgggatatgtttggtgagaagagccttcatagcctggtgaagcatttccaagaaagaagactggctctgcgacgcccggagattttggtccagcccctgaaggtctctaatagaaagagcagcggattccgaaagtctttcagactgtcccggaaagacaagaagaccaataagagtatgtatgagtgcaagaagagcgaccagtatgacactgcggacgtacctacctacgaggaagttacaccttatcgcaggcagaccaatgagaaataccgattagtggtcctggttggaccggtcggtgtcgggcttaacgaacttaaacggaagctccttatcagtgatactcaacattatggagtcaccgtgccacacacaacgcgggcaaggcgctcacaagaaagcgacggggttgaatatatttttatctccaaacatctcttcgaaacggatgtgcagaacaataaattcatcgagtacggcgaatacaagaacaactactacggcacttctatcgattccgtgcgcagcgtgctagcgaagaacaaggtatgtctattggacgtgcagccacacaccgttaaacatctgaggacgctggagtttaaaccctacgtgatcttcatcaaaccaccatctatcgagagactcagggagacacgcaaaaatgccaagatcatctcttcgcgcgatgaccagggcgctgccaaaccattcactgaggaagacttccaggaaatgatcaagtctgctcagatcatggagagccagtacggccatttgtttgacaagattattatcaacgatgatctgaccgtcgcgtag

SEQ ID NO: 194778 - DNA, 1125 bp, synthetic construct
  misc_feature 1..1125: note = Description of Artificial Sequence: Synthetic coding sequence
  source 1..1125: mol_type = other DNA
atgcccgaggacatcgacgacgaggaggacagcgtgaagatcatccgtcttgttaagaaccgcgagcccttaggcgcaaccatcaagaaggatgaacagacaggggccatcatcgtggcccggattatgcgaggcggtgcagctgaccgatcaggtctgatccatgtgggcgacgagttgcgggaggtgaacggcattccagtggaggacaagagaccagaagaaatcatccaaatactggcacaatcccaaggggcaattacttttaagatcattcccggtagcaaggaggaaactcctagcaaggagggaaaaatgtttataaaagctctcttcgattataaccccaacgaggataaggccattccatgcaaggaggcaggccttagcttcaagaaaggagatatcctgcagattatgtcccaggatgacgccacatggtggcaagccaagcacgaggctgatgctaacccaagagctggactaatcccttccaagcactttcaggagcgccgcctggctctccggcgcccagagatcctggtgcaacctctcaaagtatccaataggaagtctagcggattcaggaagagttttcgcctgtcacgcaaagataaaaaaaccaataagtccatgtacgagtgcaagaaatctgatcagtacgataccgctgatgtgcctacgtatgaggaagtgacaccatatcgtaggcagacaaatgagaaataccgcttagttgtcctggtaggccccgttggagtcggtctcaatgagcttaaacgcaagctcctgatatccgatacacagcattacggggtcactgtaccccatacgaccagagctaggaggtctcaggaaagtgacggagttgagtacatcttcatctctaagcacttatttgaaactgacgtccagaataataaatttatcgaatatggcgaatataaaaataattactatggtactagcatcgattcagtgcgctccgtactggccaagaataaagtatgcctgctggacgtgcagccccacggaccttggttcctgctccctttgatggccgtaccttggggagccaaaccaccaaatgcgaggatgacttgcggctcccccctggatctgtag

SEQ ID NO: 194779 - DNA, 1731 bp, synthetic construct
  misc_feature 1..1731: note = Description of Artificial Sequence: Synthetic coding sequence
  source 1..1731: mol_type = other DNA
atgcccgccctgagcaccggcagcggcagcgacaccggcctgtacgagctgctagccgccctgcccgcacaacttcagccccacgtggattcacaagaggatttaacattcctgtgggacatgtttggcgagaagtctctgcactccctggtaaaaatacatgaaaagcttcattactacgaaaagcaaagccctgttccgatcctccacggagctgctgctcttgctgatgacctggccgaggagctgcaaaataaacctctaaacagcgaaattcgcgagctgctgaagttactttcaaaaccaaacgttaaggcccttctcagtgtccacgacaccgtcgcccagaaaaactatgacccggtattacctcccatgcccgaggatatagatgacgaggaggatagcgtgaaaattatccgtctcgtcaagaatcgcgagccattaggcgccaccattaaaaaagatgagcagacgggagcaataatcgtggcacgcatcatgcgcggtggagctgccgatcgtagtggcttaattcacgttggggatgagctgcgggaagtgaacggtataccagtggaagataagcgacctgaggaaattatccagatcctcgctcagtctcagggagctattacgtttaaaattatccccggttctaaagaggaaacacctagcaaggaaggcaaaatgtttattaaagccctgttcgattacaacccaaacgaggataaggcaatcccgtgcaaagaagcagggctgagctttaagaagggagacattctgcagatcatgtcccaggatgacgccacttggtggcaggcaaaacacgaggcagatgccaacccgagagccgggctgatcccttccaagcactttcaggagcgccgcctagccctgcgccgacctgaaattttagtacagcccctcaaagtcagcaataggaaatcttccggctttcgaaagtcattccgcctgagccgcaaggataaaaagactaacaagagcatgtatgaatgtaaaaagagtgatcagtacgacactgccgatgtgcccacatatgaagaagtgactccctacagaaggcagactaatgaaaagtaccggttagtggtccttgtcgggccagtgggggtgggacttaatgagctgaagcggaagctactgatctctgatacccagcattatggtgtgaccgtcccccatactacaagagcgagacgctcacaagagtccgatggtgtggaatacatttttatcagcaaacacctcttcgagacggacgtgcagaacaataagttcatcgagtacggcgaatataagaacaactattacggcacatctatcgattccgtgaggtcagttttggccaaaaacaaagtctgccttctggacgtacagccccatacagttaagcatctgaggactcttgaatttaagccctatgtgatctttatcaaacccccatctatcgaacgactgcgtgagactcgcaagaatgctaaaattatttcctcacgagacgaccagggcgctgcaaagcccttcaccgaagaggactttcaggagatgatcaagtctgctcagatcatggagtcgcagtatggccacctgttcgataagatcataattaacgacgacctgacagtggcctttaatgagttgaagactacttttgacaagctggagacggagacgcactgggtgccagtatcttggcttcatagctag

SEQ ID NO: 194780 - DNA, 870 bp, synthetic construct
  misc_feature 1..870: note = Description of Artificial Sequence: Synthetic coding sequence
  source 1..870: mol_type = other DNA
atgctgggctggtgcgaggccatcgcccggaacccccaccggatcccaaataacactcgaacccccgaaatatctggggaccttgccgacgcaagccagacatcaaccttgaacgaaaaaagccccggtcggtctgcctcccggtcctcaaatattagcaaggccagttcacccaccacaggaaccgcccctcggagtcagagtcggctgtcagtgtgcccttccactcaggacatttgtcgtatttgtcattgtgagggggacgaggaatcgcccttgatcaccccttgcaggtgcacgggcaccttgagatttgtgcaccagtcgtgtctacaccagtggattaagtccagtgatacgcggtgttgcgaactttgtaagtatgactttatcatggagacgaagctcaagcccctccgaaaatgggaaaagcttcaaatgaccacaagtgagcgccggaagatcttttgctccgttacatttcacgtcatcgcaatcacttgcgtggtgtggtcactgtacgtactaatcgaccgcaccgctgaggaaatcaaacaaggaaacgataacggagttttggagtggcctttctggacaaagctcgtcgtggtggccataggattcacagggggtctggtcttcatgtacgtgcaatgcaaggtctatgtacagctgtggcggcgcctcaaagcctataatagagtcatattcgtgcaaaattgtcctgataccgccaaaaaactggagaagaattttagctgtaacgtgaacacagatataaaggacgctgtggtagtgccagtcccccagacaggcgctaactccctcccaagcgccgaggggggccctcccgaggtggtgtcagtttag

SEQ ID NO: 194781 - DNA, 819 bp, synthetic construct
  misc_feature 1..819: note = Description of Artificial Sequence: Synthetic coding sequence
  source 1..819: mol_type = other DNA
atgaccagcagccacgtgtgctgcaacttcctgaacatgtggaagaaatccaaaatatcaacaatgtattaccttaatcaagatgccaaactgtctaacttgtttctgcaggccagcagcccaactaccgggaccgcaccaaggtcacagtcacggctgtctgtgtgtccatccactcaagatatctgcaggatctgccactgtgagggcgacgaagaaagtccccttatcactccctgcaggtgtacagggaccttacgctttgttcaccagtcttgcctgcatcaatggattaagagtagcgacactagatgctgtgagctgtgcaagtacgatttcattatggagactaagttaaagcctctccgcaagtgggagaagctacagatgacaacatctgaacgccggaaaatattctgttcagtcaccttccatgtgatcgccattacttgcgtcgtatggtcgctctatgtgctgatagatcgcaccgcagaagagattaaacagggtaacgataatggagttctggaatggcctttctggaccaagctggtagtcgtggctatcgggtttacgggggggctggtctttatgtatgtgcagtgcaaggtgtatgtgcagctgtggcgcagattaaaggcctacaatagagtgatatttgtgcagaattgtccagataccgctaagaaactcgagaagaacttctcttgcaacgtaaatacggacattaaagatgctgtggtggttcccgtgccacagacaggggccaattcattgccctcagccgagggaggccctccggaagtggtgtctgtctag

SEQ ID NO: 194782 - DNA, 870 bp, synthetic construct
  misc_feature 1..870: note = Description of Artificial Sequence: Synthetic coding sequence
  source 1..870: mol_type = other DNA
atgctgggctggtgcgaggccatcgcccggaacccccaccggatcccaaacaacactagaacaccagaaatctccggcgatctagccgatgccagtcagacatctaccctgaatgagaaatctcccggcaggtccgcttcccgttcttcaaatatcagcaaagcatcatctcctacaacgggcaccgctcccaggagccagagcagattgtctgtttgtccctcgacccaggacatttgtcggatttgccactgtgaaggagatgaagagagccctttgattactccttgcagatgtacaggaactctgcggttcgtccatcagtcgtgtctgcatcagtggataaaatccagcgacacacggtgctgtgagctttgcaagtacgacttcattatggagacaaagctgaaaccactccgaaaatgggaaaaactgcagatgaccacttccgaacgaagaaagatattttgcagtgtcacatttcacgtgatagccattacgtgcgtggtttggtcactctatgtgctgatagacagaaccgctgaagagatcaagcagggcaacgacaatggcgtcctggagtggcccttctggactaaactggtagtcgtggccatcgggttcaccggcggcctggtgtttatgtatgtacagtgtaaagtgtatgtacaactctggcgccgactcaaagcctacaaccgcgtcatctttgtgcagaactgtcccgataccgctaaaaagctggaaaagaacttttcgtgcaacgttaatactgatattaaagacgccgtggtcgtgccggtgcctcagaccggcgccaactctctgccttcagctgagggcggaccccccgaagtcgtgagcgtttag

SEQ ID NO: 194783 - DNA, 426 bp, synthetic construct
  misc_feature 1..426: note = Description of Artificial Sequence: Synthetic coding sequence
  source 1..426: mol_type = other DNA
atgctgggctggtgcgaggccatcgcccggaacccccaccggatcccaaacaatacaaggaccccagaaatcagtggggatctcgctgacgcgagtcagacatctactttgaacgagaaaagcccaggcagatcagcttctcgaagctctaatatatccaaggcgtcctcacccaccactggcaccgcccctcgttctcagtccagattatcggtgtgcccgagcactcaggatatttgccggatctgccattgcgagggagatgaagagagccctttgatcacaccatgcaggtgtaccgggaccctgcgctttgtgcaccaatcttgtctgcaccagtggattaagtcatccgacactcggtgctgcgaattgtgtaaatacgacttcattatggaaacaaagctaaaaccactgcgtaagtag

SEQ ID NO: 194784 - DNA, 2427 bp, synthetic construct
  misc_feature 1..2427: note = Description of Artificial Sequence: Synthetic coding sequence
  source 1..2427: mol_type = other DNA
atgctgcacgacgcccgggaccggcagaagttcttcagcgacgtgcagtaccttcgggatatgcaacacaaggttgactctgagtaccaggcgtgcttgcgccggcaggaatacagacgcgaccctaacgagaagaaaagggaccaattttggggacaggagaccagttttgaaagatctcgattttcttccagatcctcctccaaacagagttccagtgaggaagatgcactgactgagccgcgctcatctattaaaatcagcgcattcaaatgtgacagcaagcttccagctattgatcaaacctctgtgaagcagaaacataaaagcactatgacagtcagaaaagctgagaaggtggatccctctgagccatctcccgcggaccaggcaccaatggtactactgaggaaaagaaagcccaatctgcggcgcttcaccgtctcccctgaaagtcactctccgagagcctccggcgaccgatcccgccagaagcagcagtggccagctaaagtgcctgtccctagaggggctgatcaggtagtacagcaggagggactgatgtgtaacacgaaattgaagagaccgaaccaagagcgtaggaacctggtcccgtccagccagcctatgaccgagaacgctccagacagggctaaaaagggggacccatcagctccctcacagagcgagctccaccctgcactgtcgcaggcttttcagggaaagaacagtccgcaggttctgtctgagttttctgggcctcccctgacacctactactgtgggcggaccacgtaaagcttcctttcgttttagagacgaagacttttacagcatcctttcccttaacagtcggagggagagcgatgacaccgaagaggagacacagtcagaagagtgtttatgggtgggagtccgctctccctgttcaccctcccaccacaagaggtcccgattcgggggaacaagtactccccaggcaaaaaacaaaaattttgaggaaaacgccgagaattgtcgcggccattctagtaggcgatcagagccatcacatgggtcactcagaattagtaatgctatggagcccgccacagagagacctagtgctggtcagcgactcagtcaagatccgggattgcctgaccgtgaaagcgccaccgaaaaggaccgcggcggttccgaaaatgccaagaagtcacccctttcttgggatactaaatcggagccgcgccaggaagtcggcgtgaatgccgagaacgtgtggtccgactgtatttctgtagagcaccggcccggcacccatgactctgagggatactggaaagattacttaaacagctcccagaatagcctcgactacttcattagtggccgccctatatctccacggagcagcgtcaactcttcatataacccacccgcatcatttatgcactccgccctaagggacgacattccagtggatctgtccatgagctctacaagcgttcacagttctgacagtgaaggcaattccggcttccatgtgtgtcaaccactttccccaatcagaaacaggactcctttcgcatcggccgagaatcacaactacttcccagtgaattccgcgcatgagttcgccgtgagagaggcagaggacactacgctgacctcacaaccacagggagccccactgtatacagacctgttgctgaacccgcagggcaatttgtctttggttgattcgagctcctcctcgcctagcagaatgaactcagaaggccacctacacgttagcgggagtctgcaagagaacacaccgtttactttcttcgcggtctcgcactttcccaaccagaacgacaatggaagcagaatggccgccagcggattcacagatgagaaggagacaagtaagatcaaagcagatccagagaagttgaagaagcttcaggaatcactcctagaggaagactctgaagaggaaggggacctgtgcagaatatgccaaattgctggaggatccccaagcaatccgctgttggagccttgtgggtgtgtcggctcactccaattcgtacatcaggagtgtctgaagaaatggctcaaggtgaaaatcacttcaggagcagatctgggagctgtaaagacctgtgagatgtgcaaacaggggctgttagtggatcttggtgatttcaatatgatcgagttttaccagaaacaccagcagagtcaggcacagaacgagcttatgaatagtggactttatcttgtcttgctcctgcatctgtacgagcagagattcgctgagctgatgcggcttaaccacaatcaagttgaaagagaacggttatcccgtaattaccctcagccccgcaccgaagagaatgagaactctgagctgggggacgggaatgaaggcagcatatctcagagccaggttgtctag

SEQ ID NO: 194785 - DNA, 2427 bp, synthetic construct
  misc_feature 1..2427: note = Description of Artificial Sequence: Synthetic coding sequence
  source 1..2427: mol_type = other DNA
atgctgcacgacgcccgggaccggcagaagttcttcagcgacgtgcaatacctgcgcgatatgcagcacaaggtggattccgaatatcaggcctgcttgcgccgacaggaatatcgaagggaccctaatgagaagaaacgcgaccagttttggggacaggagaccagttttgagagatcacgattcagtagtcgcagctctagcaagcagtctagctccgaagaagacgccttaacagagccacgcagctccattaaaatttctgcgttcaagtgcgattccaaactgcccgcaattgaccagacctcagtgaaacagaaacacaaaagcaccatgactgtgaggaaggccgagaaagtggacccctccgagccttcgccggctgatcaggcccctatggttctcctgcgcaagaggaagccgaatctgagaaggttcacagtctcccctgagagtcacagccccagagcctcaggcgaccgaagccggcaaaaacagcaatggccagcaaaggtcccagttccgagaggcgctgaccaggtggtgcaacaggaggggttgatgtgtaatactaagctgaaacgccccaaccaggaacggagaaacctggtaccttccagtcaaccgatgaccgaaaatgcccctgaccgggccaaaaaaggtgacccaagtgcccccagccaaagcgagcttcacccagctctgtcccaagctttccaaggcaagaacagcccacaggtgctcagcgagttctccgggcctcccctgacaccaacaacggtcggtgggccacgaaaagcaagttttaggttccgggacgaagacttttacagtatcctgtccctcaattccagaagggagtccgatgacacagaagaggaaacacagtccgaagagtgtctgtgggtaggcgtaaggagtccatgttcgccatctcatcacaagagatcacggtttgggggaacttcgaccccccaggctaaaaataagaactttgaggagaacgcagagaactgccggggccatagctctagaaggagcgagccatcgcatggtagtctgcggatcagtaacgcgatggagccagccacggagagaccatcagccggacagcgcttaagtcaggatccaggtctcccagatcgtgaatctgccaccgaaaaggatcgaggaggaagtgaaaatgccaaaaagagccctctctcctgggatacgaaatccgaaccacgacaagaagttggagtgaatgctgaaaacgtgtggagtgactgtatctccgtggaacaccgcccagggacacatgactccgaaggttactggaaggactacctcaattctagccagaacagcctggactacttcataagcggacgtccgatcagcccccgatcatctgtgaacagctcttataatcccccagcctcattcatgcatagcgctcttcgtgatgacataccagtggacctgtcaatgtcttccacatccgtgcactcgtctgattccgaggggaactccggatttcacgtgtgtcaacctctaagccctatccgcaatcgcacaccattcgcctccgctgagaaccacaactattttccagtgaactccgcccacgagttcgcagtgagggaggcagaagatactacgctgacctcacagcctcagggtgccccactgtacaccgatctcttgctgaaccctcagggaaatctgtccctcgtggactcttcatcttcctctccatctagaatgaactctgagggacacctgcatgtgtccggttccctccaggaaaataccccgttcacgttctttgcagtgagccacttcccaaaccagaacgataacggcagccggatggcagcgtccgggtttaccgacgaaaaagaaacctcgaaaatcaaggctgacccagaaaaattaaagaaattacaggagtcactcctggaagaagattctgaagaagaaggtgatctctgccgaatctgccaaatcgcgggtggtagtcctagcaatcctttattggagccttgtggatgtgtggggtcgctgcagttcgtacatcaagagtgtctcaagaaatggctgaaggtaaagatcacaagcggcgcagatctcggagcggtcaagacctgtgaaatgtgcaagcaggggcttctggtggacttgggagacttcaacatgattgaattctatcagaaacaccagcaatctcaagcccagaacgagctaatgaatagtggattatacctggtattacttctccatctttacgaacaacgtttcgctgagctgatgagattgaaccacaatcaagtagagcgcgagcgattgtcaagaaattatccccaacccagaaccgaggagaatgagaatagtgaattgggagatggaaatgaggggtccatctctcaaagccaggtggtatag

SEQ ID NO: 194786 - DNA, 2400 bp, synthetic construct
  misc_feature 1..2400: note = Description of Artificial Sequence: Synthetic coding sequence
  source 1..2400: mol_type = other DNA
atgctgcacgacgcccgggaccggcagaagttcttcagcgacgtgcagtacctgagggacatgcagcacaaggtggactctgaataccaagcttgtttgcgcaggcaggaatatcgtcgggatcctaacgagaagaaacgcgaccaattctggggtcaggaaacaagcttcgaacgaagccgattctcatctagaagtagttctaagcagtcttccagcgaggaggacgctctgacagagccccgatcctccatcaagatttcagcttttaaatgcgactccaagctccctgccattgatcagacctcagtgaaacagaagcacaagagcactatgaccgtgcgcaaggctgaaaaggtcgatccttctgagccatcgcccgaccaggctcccatggtcttgttgcgcaaacgtaagcctaacttgagacgattcaccgtttccccggagtctcattcaccccgcgcttcaggggaccggagtcgacagaagcagcagtggccggccaaggtgcctgtcccaagaggcgctgatcaggtcgtccagcaggaggggctgatgtgtaacaccaagctcaaacgacctaatcaggagaggaggaatctcgtgccatcttcacagccaatgactgagaacgcccccgacagggcgaagaaaggcgacccatccgccccttcacagagcgaacttcatcccgccctctctcaggcatttcaggggaagaactctcctcaggtgctgagcgaattttcgggcccccccctcactccaacaacagtcggcggccctaggaaagcgtcgttccgctttagagatgaggatttctactctatcctgtcgctcaacagcaggcgcgagtcggatgacactgaggaagagacgcagtctgaggagtgtctgtgggtgggagtacggagcccatgcagcccatcccaccacaaacgaagcagatttggcgggaccagtactccacaggcaaagaataaaaactttgaggaaaatgcagagaactgtcggggtcactccagtagacggtctgagccttcccacggctctctgcggattagtaatgccatggagcccgcaaccgaaagacccagcgctggtcagagattaagtcaggaccctggcctgccagacagagaatctgcgacagagaaggatcggggagggtcagagaatgctaagaagagcccgctgagctgggacacaaagtccgaaccaagacaggaggtgggcgtgaatgcggagaatgtatggagtgactgcattagtgtggagcacaggcctgggacccatgacagcgaagggtattggaaagattatctgaactcttcccagaattctctcgactactttataagcggtcggcccatttcgcctcgctccagcgtcaacagttcttacaatcccccagcctcttttatgcacagcgctctgagggatgatatacctgtggacctgtctatgtcctctacttcagttcacagcagtgatagcgaaggcaactcagggttccacgtgtgtcagcccttaagccctattcgcaatcggacccctttcgcgtcagcggaaaatcataactacttcccagtcaattccgcccatgaatttgccgtacgcgaggcagaagacacgacgctcacttcccaaccacagggggctcccctgtacacagatctgctgttgaatccacaaggaaatctcagtctcgtggactcctcctcctcctcgcctagccgcatgaatagcgaggggcatctccacgtatccggctcccttcaggagaacacgcccttcacattttttgccgtctctcacttcccaaatcagaacgataatggttcacggatggctgcttcaggatttaccgacgagaaggaaacaagtaagatcaaggcagatcctgaaaaactcaagaaactgcaggagtccttactagaggaggacagcgaggaagaaggagatctctgtcgcatctgtcagattgctggaggctcccctagtaacccattgctggaaccttgcggctgcgtgggatccttgcagttcgtacatcaagagtgtcttaaaaagtggctgaaagtcaagataacttcaggcgcagatctcggcgccgtgaaaacatgtgagatgtgtaagcaagggctcctggttgacctaggagatttcaatatgattgaattctatcagaagcaccaacagtcccaagcccagaacgaattgatgaatagcggactgtacctggtcctgctgctccatttatacgagcaacgtttcgcagagctgatgaggctaaaccacaatcaggtcgaaagagaacgtctgtcacgaaattacccccagcctaggacagaggagaatgagagtaggttttggggtccagtcctgcccttctag

SEQ ID NO: 194787 - DNA, 1209 bp, synthetic construct
  misc_feature 1..1209: note = Description of Artificial Sequence: Synthetic coding sequence
  source 1..1209: mol_type = other DNA
atgagcttcgagggcggccacggcggcagccggtgccggggcgccgagtctggggacgctgaacctccgccgcagccccctcccccgcccccaccaactccaccacctggggaacctgctccggtgcctgcagcccctcgttatctgccgcctctcccagcttcccccgaaacgcctgaaagagccgcggggccatccgaacctctcggagaagtggcccctcggtgtcggggggctgatgagcttcccccacctcccttacccttgcagcccgcaggccaagaagtagctgcggcaggagatagtggcgagggaccaagaagacttcctgaagctgccgccgcaaagggcggacctggggagtcagaggctggcgccggtggcgagagagaaaggaggggggccggagatcagcctgaaactaggtcagtctgttctagcaggtcaagttcttcgggaggcggagatcagcgagctggacaccaacatcaacaccaccagcctatttgcaagatatgctttcagggcgctgaacagggcgaacttttaaatccctgtcggtgtgacgggtcagtgagatacactcaccagttatgcttgctcaaatggatttccgagcgcggcagctggacttgcgagctctgctgttaccgatatcacgtaatcgccattaagatgaagcagccctgtcagtggcaaagtatcagcatcaccctcgtggaaaaagtgcagatgatcgccgtgatcctcggtagcttattccttatcgcctccgttacatggctcctgtggtcagcattttcaccttacgctgtgtggcagcgtaaggatatcttgttccagatatgctatggaatgtacggcttcatggatctggtctgtatcgggttaattgtgcatgagggagctgctgtgtacagggtcttcaaacgctggcgggccgtcaacttgcattgggacgttctgaactatgacaaggccaccgatatcgaggaatcctcgcgcggagaatctagcacgtccaggacgctttggctgcccctgacagcactgagaaataggaatctggtgcaccccacccagctgacgtcacccaggttccagtgcggatacgtattactgcatctgtttaatagaatgcggccacacgaagatctcagcgaagataattcttcaggggaagttgtgatgcgcgtgacaagtgtgtag

SEQ ID NO: 194788 - DNA, 1818 bp, synthetic construct
  misc_feature 1..1818: note = Description of Artificial Sequence: Synthetic coding sequence
  source 1..1818: mol_type = other DNA
atggccctgcggaagggcggcctggccctggccctgctgctgctgagctgggtggctcttgggccgaggagcctcgagggcgcggaccccggaactcccggcgaagccgagggccccgcatgccctgccgcttgcgtgtgctcgtatgatgacgacgctgatgaattgagcgtcttttgctcctcaagaaatctcacccggctccctgatggcgtgcctggcggcacacaggctctatggctggacggtaataacctcagctcagtccctcctgccgcgttccagaatctgagcagtcttggcttcctaaatctgcaggggggccagctcggatcgctggaaccccaagctctgctgggtctcgaaaacttatgccacctgcatctggagcggaaccagctgcgtagcttagcgttggggactttcgcgcacacccccgcccttgcatccctgggcctttccaacaacaggctttctagactggaggatggcctttttgaagggttgggatcactctgggacctgaacctggggtggaattcacttgctgttcttcctgacgccgcctttcgcgggctcggatcgttacgggagcttgttctggccggaaatcgactcgcttatctacagccagctctgttttctggcctggctgagctacgtgagctagatctgtcgcgtaatgccctccgagcaatcaaagctaatgtgttcgtgcagttgccgaggcttcagaagctgtacctcgaccgcaacctgatcgctgccgtggcaccgggcgccttcttggggctcaaggctcttcgctggttagatctgtcacataatcgcgtcgcgggtctgctggaggacactttccctggtctgttgggcttacgcgtgctgaggttgtcccataacgctatcgcatccctgaggcccagaacctttaaagatctccattttcttgaggaactccagttgggacataatcgcattagacagctggcagagaggtcatttgaaggcctcggtcaactcgaagtgttgaccttagaccataatcagctccaggaagtgaaggcaggggcttttctcgggcttacaaatgtggccgtgatgaacctctcaggcaactgtcttagaaatctccccgaacaggtgtttcggggccttggtaagctgcactccctgcacctggagggcagctgtctgggtcgtatcaggccgcacaccttcacaggtttatctggcttgcgacgtctgttcctcaaggacaatggcctggtaggaatcgaggagcagagcttgtggggtctcgccgaactgctcgaactggatctcacatcaaaccagctaactcacctgccccacaggttgtttcaaggccttggtaaacttgagtatctgttgctgtccaggaatagactggcagagttgccagcagacgcccttggtcccttgcaaagggcattctggctggacgtgagtcataacaggctggaggctttgccaaattctctgttagcccctcttgggcgcttgcgatacctgtcccttcgtaataactccttacggacgttcaccccccagccacccgggctggagaggctgtggttggaaggaaatccatgggactgtggatgccccctcaaggccttgagggactttgcccttcaaaatccatctgcagtgccccggttcgttcaggccatctgcgagggagatgactgccagccacctgcttacacctataacaatattacttgtgccagtcctcctgaagtggtgggactggatctcagggatctttccgaggctcacttcgcaccttgctag

SEQ ID NO: 194789 - DNA, 531 bp, synthetic construct
  misc_feature 1..531: note = Description of Artificial Sequence: Synthetic coding sequence
  source 1..531: mol_type = other DNA
atgaccaccggcgactgctgccacctgcccggcagcctgtgcgactgctcaggctcacctgctttcagcaaggtcgtcgaagcgaccggactgggccctccacaatatgttgcacaggtaacttcgcgagacggtaggctcttgagcaccgtgatccgggccttggatacaccttccgatggccccttctgtcgtatttgccacgaaggggcaaacggggagtgcctgctgtcaccatgcggatgtaccggcactctgggcgccgtgcacaaatcatgcctggagaaatggcttagcagctctaatacaagctactgtgaactctgccacaccgagtttgctgtggaaaaacggcctcgaccactaactgaggtcagcttcagatatcactgtcagctatacagtgagtggcggaagactaatcagaaagtgcggctcaaaattagagaagctgactcaccagagggcccccagcacagtcctctcgcagctggtttactcaagaaggtggctgaggaaactcccgtatag

SEQ ID NO: 194790 - DNA, 741 bp, synthetic construct
  misc_feature 1..741: note = Description of Artificial Sequence: Synthetic coding sequence
  source 1..741: mol_type = other DNA
atgaccaccggcgactgctgccacctgcccggcagcctgtgcgactgttctggaagccccgccttttctaaggttgtggaagcaaccggtcttgggcctccccagtacgtcgcgcaggtgacatcacgcgatggcaggttgctctccacagtaatcagagccttggacacacccagtgacggaccattctgccggatttgccacgagggcgcaaatggcgaatgcctgctctctccatgtgggtgcacgggcaccctaggagccgtgcataagtcttgcctggagaagtggctctccagttcaaacactagctactgtgaattatgccacacagagttcgcagttgagaaaaggccgcgaccactcacagaatggttgaaggatccaggaccacgtacggagaagagaaccctttgctgcgatatggtatgtttcttgttcataacccctctggctgccatctctggatggctgtgccttcgtggggctcaagaccatctgcgtctccacagccagctggaagccgtgggcctcatcgctctcacaattgcactttttaccatatacgtgctttggaccttggtatcctttagatatcactgtcagttatactccgagtggagaaagactaatcaaaaagtgaggctgaaaatcagggaggcagacagccctgaggggcctcaacatagtccattggccgccggcctgctgaagaaggtggctgaggagacccctgtgtag

SEQ ID NO: 194791 - DNA, 762 bp, synthetic construct
  misc_feature 1..762: note = Description of Artificial Sequence: Synthetic coding sequence
  source 1..762: mol_type = other DNA
atgaccaccagccggtgcagccacctgcccgaggtgctgcccgactgcaccagtagtgccgcgcccgtggtgaagaccgtggaggattgtggcagcctggtcaacggtcagccccagtatgtgatgcaggtctctgcgaaggacgggcagttactatcaactgtggttaggacacttgccacccagagcccttttaatgacagacctatgtgccgtatatgccacgaaggtagctctcaggaagacctgcttagtccttgtgaatgcacagggactctgggcacaatccatcggtcctgcctggaacactggttgagctcttctaacacttcctactgtgaattgtgccacttccgatttgccgtcgagcgcaaaccacgacctctcgttgaatggctaaggaatcctggaccccaacacgagaagagaacactgttcggagatatggtgtgctttttgtttatcaccccgctggcgactatcagtgggtggctttgcctgcgaggcgctgtggatcatctccacttcagctcgaggctggaagccgtggggttaattgcactgactgttgctctgttcacaatttacctgttttggacactcgtctcgttcaggtatcattgtaggctgtacaatgagtggagacgcaccaatcagcgagtcattttgctgattccaaagtcagtaaatgttccatccaaccagcccagcctgttagggctgcactccgtcaaaaggaattcaaaggaaacggttgtgtag

SEQ ID NO: 194792 - DNA, 1233 bp, synthetic construct
  misc_feature 1..1233: note = Description of Artificial Sequence: Synthetic coding sequence
  source 1..1233: mol_type = other DNA
atgctgatgcccctgtgcggcctgctgtggtggtggtggtgctgctgctctggctggtactgctacgggttatgcgctccagccccacagatgctcaggcaccaggggcttcttaagtgcaggtgtaggatgctgttcaacgatctcaaggtgttcctgctgcgtagacctccccaagcgccactgcctatgcatggcgaccctcagcctcctggcctcgcagccaacaatacactgcctgcccttggggccggtggttgggcgggctggaggggcccacgggaggttgtcgggcgggagcccccccctgtcccacctcctcctccactgccaccaagctccgtggaggatgactggggcggccccgccactgagcctcctgcttcactgctcagcagcgctagcagtgatgatttttgtaaagagaagactgaggacagatactccctggggtcgtcattggactccgggatgcggaccccactctgcaggatctgttttcagggccctgaacaaggggaactactctctccatgccggtgtgacggaagcgtcaagtgcacccatcagccttgtcttatcaagtggatttcagaaagaggttgttggagctgcgaactttgctattacaaatatcacgtcatcgctatatccacaaaaaaccctttgcaatggcaggctatatccctcactgtgattgagaaagttcaagtggcagccgccatactcggctccttatttttgattgcctccataagctggctcatctggtccacgttcagccccagcgctcggtggcagcgccaagatctactgttccagatttgctatgggatgtacggttttatggacgtggtctgtataggactgatcatacacgaaggaccctccgtgtatagaatttttaaaagatggcaggctgttaaccaacagtggaaggtactgaattatgacaagacaaaggacctggaggatcagaaagcaggtggacggacaaacccacgtacctcgtcatcgactcaagctaatatcccctcgtcagaggaggagaccgccgggacacctgctcctgagcaggggcccgcccaggcggctgggcacccttctgggcccctgtcccatcaccactgtgcatacacaatcttacacatactgagccacctgcgacctcacgagcagagatcacctcccggaagttcgagggaacttgttatgagagtgactaccgtttag

SEQ ID NO: 194793 - DNA, 837 bp, synthetic construct
  misc_feature 1..837: note = Description of Artificial Sequence: Synthetic coding sequence
  source 1..837: mol_type = other DNA
atgcccgaccaggccctgcagcagatgctggaccggagctgctgggtgtgctttgccacagacgaagacgataggaccgccgagtgggtgcgaccatgccggtgtcgcgggtccacgaaatgggtccaccaagcttgtctgcagagatgggtggatgagaaacagagagggaacagtaccgccagggtagcttgtccccagtgcaatgcagaatatctgattgtcttccctaaactggggccggtggtgtatgtattagacctggccgatagactcataagtaaagcctgtccttttgctgcagccggcattatggttggaagtatatactggacagccgtgacctatggggcggttactgtgatgcaggtagtgggccataaggagggtcttgacgtcatggagagagcagacccgctcttcctcctgattggccttcccacaattcccgttatgctgatcctcggtaagatgattcggtgggaggactacgtcttaaggttatggcgtaagtacagtaacaaattgcagatcctgaactccattttccctggaatagggtgccccgtgccgcggatccctgcagaagccaatccacttgccgatcatgtctcagccacgaggatcttgtgtggggctctcgtattccccactatcgctactatcgtcggaaagctcatgttctccagtgtcaacagtaatctgcagaggaccatcctcgggggcatcgcctttgtggctattaaaggcgcctttaaggtttacttcaagcagcagcagtaccttcgacaggcacacagaaagattctgaactatcccgagcaggaggaggcttag

SEQ ID NO: 194794 - DNA, 2733 bp, synthetic construct
  misc_feature 1..2733: note = Description of Artificial Sequence: Synthetic coding sequence
  source 1..2733: mol_type = other DNA
atggacaccgccgaggaggacatctgccgggtgtgccggagcgaggggacacctgagaagcccctataccacccatgtgtgtgtaccggcagcattaagtttatccaccaggaatgcttagtgcagtggctgaaacatagccgcaaggagtattgtgagctgtgcaagcaccggtttgcattcacacctatctactctcccgacatgcccagccgcctgcctatccaggacatatttgccgggttggtgaccagtatcggaactgctattaggtattggttccactacacgctggtcgccttcgcgtggcttggcgtggtgccgctgacagcatgtcgaatctataaatgcctgtttaccggtagcgtgtctagcctgctcaccctgcccctcgatatgttgagtactgaaaacttgctggcagactgcctccagggatgtttcgtggtgacctgcaccctctgtgccttcatctcactcgtgtggttgcgagagcagattgtccacgggggggcgcccatctggctggagcatgctgctcctccatttaatgccgccgggcatcatcaaaacgaagcccccgctggcggaaatggggcagaaaatgtggcagcagaccagccggccaatccacccgctgaaaacgcggtggtcggagaaaaccccgacgcacaggatgatcaagcagaagaggaagaggaagacaacgaggaggaagatgatgcaggtgttgaggacgcagcagacgcaaacaacggggcccaggatgatatgaattggaacgctttggagtgggatagagccgcagaagaattgacgtgggaacggatgcttgggttggacggctctctcgtgttcctggagcacgtgttctgggtggtttcactaaatacgttgttcatactagtgtttgccttctgcccttatcatatcggacatttcagcctggttggcctggggttcgaggagcacgtccaggcaagccactttgaaggcctgatcaccactatcgtcgggtatattctgctggcaataaccctgataatttgtcacggcctcgctacactggtgaaatttcaccgctcccggagactgctgggcgtgtgctacatagtggtcaaggtaagtttactcgtggtcgttgaaatcggcgtgtttccgcttatatgcggatggtggctcgacatctgtagtctggagatgttcgacgctacactgaaggatcgcgaactgtcatttcaatcagcacccggaacaacaatgttcctgcactggctcgtcggaatggtgtatgtcttctactttgcctctttcattctcctgctgagggaggtgcttcgacccggagtgttatggttcttgaggaatctcaatgaccccgacttcaatccagtgcaggagatgattcatcttccgatatatcggcatctgaggagatttatcctatccgtcattgtattcggatctatcgtcctgctgatgctctggctcccaatacggatcattaagtcggtgctgcccaacttcttaccttacaatgttatgctgtacagtgacgctcccgtgtctgagctctctctcgagttactgctgcttcaggttgtgcttcctgcactcctggagcagggacatactagacagtggctgaaggggcttgtaagggcctggaccgtaacagcgggttatctgctggacctacatagctacttattgggagaccaagaggaaaatgaaaactctgcaaaccagcaggtgaacaacaatcaacatgcccgcaacaacaacgcaatccccgtcgtcggcgagggacttcatgcagctcaccaggccattctgcaacaggggggaccggtgggattccagccttaccgtcggcctctgaatttccccctgagaatattcttattaatcgtgtttatgtgtatcactctgctgatcgcgtcacttatatgtcttaccctcccagtgttcgctggcagatggttgatgagcttttggacaggtacagccaagattcacgagctttatactgccgcatgtggactctatgtttgctggttgaccattagagcagtgacagtgatggtggcgtggatgccccaaggaaggagagtgatattccagaaagtgaaagaatggagtctcatgatcatgaaaactctcattgtggcagtgctgctggccggcgtggttcctctgttactggggctcctctttgaactagtcatcgtggccccattaagagtgccccttgatcagaccccgttgttttatccatggcaggattgggctttaggggtactccatgctaaaatcattgcggccattacacttatgggcccccaatggtggttaaagaccgtcatagagcaggtttacgcaaacggcataaggaatatcgaccttcattacattgtgaggaaactggcagcccctgtgatcagtgtgttgctgctcagcctgtgtgtgccatatgttatagccagcggagtggtaccactcctgggagtgactgcggaaatgcaaaatttggtgcatcggcgcatctacccattcctgttaatggtcgtggttctaatggcgatcttatccttccaggtgcgtcagttcaagcgcctttacgaacacatcaagaacgataaatacttagtgggccagagactagtcaactatgagaggaagagcgggaaacagggatcatctccaccaccaccacaaagctctcaggagtag

SEQ ID NO: 194795 - DNA, 2115 bp, synthetic construct
  misc_feature 1..2115: note = Description of Artificial Sequence: Synthetic coding sequence
  source 1..2115: mol_type = other DNA
atggagagcaagcccagccggatcccccggcggatcagcgtgcagcccagttctagccttagtgccaggatgatgagtggttctcgcgggagctctctgaacgacacgtaccactctagagattcatcttttcggttagactcagagtaccagagcacaagtgccagtgccagcgcctccccatttcagagcgcctggtactctgagagcgagatcacacagggtgctaggtcacgatcacagaatcaacagagggatcacgatagcaagcgtcccaaattaagctgcaccaattgtacaactagcgcagggcgcaatgtgggcaatgggctcaacacactgagtgatagctcttggagacactcccaggtcccaagatcttcctcaatggtactggggagctttggtacagacctgatgagagaacgaagggatctggaaaggaggacggattcaagtattagcaatctgatggattattctcacaggtcaggggacttcaccactagttcttatgtgcaagatagagtgccatcttattcgcaaggggcacgccccaaggaaaacagtatgtcaaccctgcagttgaatacctcttcaaccaaccatcagttgccttcagaacatcagactatcctctcctctcgagactctagaaattcgctcaggagcaacttcagcagccgcgaatctgaatcaagtagaagcaacacacagcctggtttcagctactcgtccagcagagatgaggcccccatcatctcaaactcagaaagggtggttagctcccagaggccctttcaggagtccagcgacaatgaaggacggaggacaacaagacgtcttcttagtcgaattgcgagttccatgtcttccactttttttagccgccgttcctcgcaggacagtctgaacacaaggagcctaaacagtgaaaactcgtatgtgtctccacgtatcctaacagcttcccagagcaggtctaacgttccctccgcctctgaggtgccagacaacagggcctctgaggcaagccagggatttaggttcctgcgacgcagatggggactttcatccctctcccacaaccactcctctgaatctgacagtgaaaatttcaaccaggagagcgaggggcggaacactggaccgtggctgtcttcaagcctcaggaataggtgcacaccactgttctctcgcagacggcgcgaaggaagggacgagtccagtcggattccaactagcgacacctcgtcacgatctcatatcttccgtcgcgagagcaatgaggttgttcatttggaggcccaaaatgaccctttgggggccgctgccaatcgtccacaggcctccgccgccagctctagcgctaccactggaggctcaacgagcgatagcgctcaggggggccggaacactggcatatctggcattttaccgggttcactgtttaggttcgctgtgccacccgccttaggctcaaacctcactgacaatgtcatgatcaccgtagacatcattccctctggttggaactcagctgatgggaagagcgacaaaaccaagagcgccccgtcccgggaccccgaaaggctgcagaagataaaggaaagcctgctcctggaggattctgaggaggaagaaggcgacttatgtagaatttgccagatggccgcagcttctagctccaatctgctgattgaaccttgtaagtgcacgggaagtctacagtatgtgcaccaagactgcatgaaaaagtggctccaagctaagatcaactctggttcatctctcgaggcagtcacgacatgtgagttgtgtaaggagaagctggagctaaatctggaagacttcgacattcatgagcttcacagggcccacgcaaacgaacaggctgaatatgaatttatctcctcaggtctatacctagttgtacttctccacctctgcgagcagtcattctcagatatgatgggaaacactaatgagccaagcacccgagttaggttcattaatctcgccaggacactgcaagcgcatatggaagatctggagacgtcagaagacgattccgaggaagatggggaccacaaccggaccttcgatatcgcctag

SEQ ID NO: 194796 - DNA, 2115 bp, synthetic construct
  misc_feature 1..2115: note = Description of Artificial Sequence: Synthetic coding sequence
  source 1..2115: mol_type = other DNA
atggagagcaagcccagccggatcccccggcggatcagcgtgcagccaagttccagcttaagcgcccgcatgatgtcagggtcacgggggagttccctcaacgacacttaccacagccgggatagctcgtttcggctggactccgaatatcagagcacatctgcctcagcatcggcttctcctttccagagtgcatggtacagcgagtccgaaattacacagggcgctagatctagatctcagaaccagcagagagatcacgactccaaacgacccaagttgagttgtactaactgcactacgtctgccggccggaatgtcggaaatggactgaataccctgtcagattcttcatggcgacactcacaagttcctagatcatcttcgatggtccttgggagctttggcactgatctcatgcgagagcggagagatctcgagcggcgaaccgatagctcaatcagtaatctgatggattattcccatagaagcggagattttaccaccagcagctatgtgcaggaccgagtgccctcatattctcaaggagcccggcctaaggaaaatagcatgtctacgctgcagctgaacacctcatctactaaccaccagcttccatcagagcaccaaacaattctgagctctcgcgattctagaaacagcctccgtagcaactttagctcccgggagagcgaatcatctaggagcaacactcagccaggatttagctacagtagcagtcgcgacgaagctccaattatcagtaattccgaaagagtcgtgagcagtcagcggccatttcaggagtcctccgacaacgagggaagacgtactacccgcaggctcctgtccaggattgcatcatctatgagttcaaccttttttagtcgccgaagtagccaggatagcttgaatacccggagcttgaactccgagaattcttatgtgtcaccacgcatactgactgcatcccagtccagatctaatgtgccatccgctagtgaggtgcccgacaacagagcgagtgaagccagccagggattcagatttttgagaagacgatgggggctttctagtctgtcacataatcacagtagcgagagtgactccgaaaacttcaaccaggaatcagaaggtcgaaacactggaccatggcttagcagctctctgcgcaacagatgtactccactgttttctagacggcgcagggagggtcgagacgagagcagcagaatacctactagcgatacttcgagccgtagccacatttttagacgcgaatctaatgaggtagtacatctggaggcccaaaatgaccccctgggtgccgccgcaaacaggccccaggcgagcgcagcttcttcatctgccactactggcgggtccacctctgatagtgctcaaggggggaggaacaccggaatctccggaatcctcccaggttcgctgtttagatttgctgtgcctccagctctgggctctaacctgacagataacgtgatgatcactgttgacattattcccagtgggtggaactccgcagatggcaaaagcgacaagacaaagagtgcaccctcccgggatcctgagaggctgcagaagatcaaggagtcactgctgctggaggattccgaggaggaggagggcgacttatgcaggatttgccagatggcagccgccagttcaagcaatctgctaattgagccatgtaagtgcacaggatcattacaatatgtccaccaagactgtatgaagaagtggcttcaggctaaaataaactctggtagctccctcgaagccgtaactacttgcgagttgtgcaaggaaaaactggaactgaatttggaggattttgacatacacgagctccaccgagcccacgccaacgagcaggcggaatacgaatttatatcgtcaggactgtatctggtcgttctgctccacctgtgcgagcagtctttttcagatatgatgggaaatacgaatgagccatcaactcgggtccggttcatcaatctggcacgcactcttcaggcgcatatggaggacctggaaacatctgaagatgactccgaagaggatggtgatcataacaggacgttcgacattgcttag

SEQ ID NO: 194797 - DNA, 306 bp, synthetic construct
  misc_feature 1..306: note = Description of Artificial Sequence: Synthetic coding sequence
  source 1..306: mol_type = other DNA
atggagagcaagcccagccggatcccccggcggatcagcgtgcagccttcatcaagcctcagcgcccgtatgatgtccggatcccgaggttcatctttaaatgacacttatcactctcgagacagctctttcaggctggacagcgagtaccagtctacatccgcctctgccagcgcctcacctttccagtctgcctggtattctgaatccgagatcacccagggcgcacgaagccgatcacagaaccagcagagagatcacgatagcaagaggcccaagttgtcctgtaccaattgcaccacgtag

SEQ ID NO: 194798 - DNA, 1908 bp, synthetic construct
  misc_feature 1..1908: note = Description of Artificial Sequence: Synthetic coding sequence
  source 1..1908: mol_type = other DNA
atggagagcaagcccagccggatcccccggcggatcagcgtgcagcccagttccagtctgtctgcccgtatgatgtccggatcacgaggttctagtctcaatgacacctaccacagcagagactcttcatttaggttggattccgaatatcagtctaccagcgcctccgcatcggcctcacctttccaaagtgcatggtactccgaatcagaaatcacccaaggcgcccgctctcgctcccagaaccagcagcgcgatcatgactccaaacggccgaagctgtcttgcaccaactgtaccacatcagctgggcggaatgtggggaacgggcttaatactctttccgatgtgcaggaccgtgtgccatcttactcacagggggcccggcctaaggaaaattctatgtccaccctgcagcttaatacttcctccactaaccatcaactgcccagcgagcaccagaccattctgtcctcgagagacagtcgcaattctctcagaagcaatttcagcagccgggagagcgagagctcacgtagcaatacacagcccggcttttcttactcgtccagcagagatgaagcacctattatcagcaattctgaacgcgtggtcagttcccagcggccctttcaagaatcatccgacaacgagggccgccgcacgaccaggcgactgctgtccaggatcgcaagctccatgtcaagcacattcttcagcaggcgcagctctcaggatagcttgaacactcggtctctgaatagcgaaaattcttacgtgtctccaaggattctgacggcctctcagtcaaggtccaacgtgccatccgcatcagaggtccccgataacagagccagtgaagcctcccagggctttagatttttgcgtcgcagatggggcctcagcagcctcagtcacaaccattcctcagaaagcgacagcgagaatttcaatcaggaatctgagggaagaaacacgggtccgtggttgagctcttctttacgaaatcgttgcactccactattcagccgaaggcgaagggagggacgggacgagtcttcaagaatcccgacgtccgatacaagctcaagatcacatattttcagacgcgagagcaacgaagtcgtgcacctcgaagcgcagaatgatccactgggcgccgccgcgaacagaccacaggcatcagctgcatcaagcagcgccaccacaggcggcagtacctccgactcagcccagggggggcgaaatactggtatttccggaatcctcccagggtctctgtttcgtttcgctgtgcctcctgcactgggcagtaatctgacagataatgttatgatcacagtcgacatcatcccttcaggttggaacagtgctgacgggaaaagcgacaaaacgaaatctgctcctagccgggaccccgagcgcctccagaaaatcaaggagtcactgctcctcgaagactccgaggaggaggaaggtgacctttgccggatatgccagatggcagccgcttcgagcagtaatcttctgatagagccgtgcaagtgtactggcagtctgcagtatgtgcaccaggattgtatgaaaaagtggttgcaggctaaaattaactccgggagctcactcgaggctgttaccacatgcgagctctgcaaggaaaaactggaattaaatctggaggattttgacatccacgaattacatcgtgcccatgccaacgagcaggcagagtatgaattcatcagtagcgggctgtacttggtggtgctgctgcacctgtgtgagcagagctttagcgatatgatgggtaacactaatgaaccctccacacgcgtgcgactgcagagaatgatccccaaaaaaaccgaaacgatcaccgggcaccttattttgccaaactttatatag

SEQ ID NO: 194799 - DNA, 876 bp, synthetic construct
  misc_feature 1..876: note = Description of Artificial Sequence: Synthetic coding sequence
  source 1..876: mol_type = other DNA
atgagcatgcccctgcaccagatcagcgccatccccagccaggacgcaatatctgctcgggtctaccgctccaaaactaaggagaaggagagggaggagcagaatgaaaagactctgggccacttcatgagccacagtagcaacatcagcaaagctgggtccccgcccagtgcatccgccccagctcctgtgtcctcatttagtcggacaagcatcacaccctccagccaggatatttgcagaatctgccattgtgaaggggacgacgagagccctctgattaccccctgtcattgtacaggatcactccatttcgtccatcaggcttgtttacagcagtggatcaaaagctccgatacacggtgttgcgagctctgcaaatatgaattcattatggagaccaaactgaagccactgcgcaaatgggagaaacttcaaatgacatcctccgagaggagaaaaatcatgtgttccgttactttccatgttattgccattacttgcgtagtttggagtttgtacgtgctcattgataggactgccgaggagatcaaacaaggccaggcaacggggattttggaatggccattctggactaaactggtggtcgtggcaatcggcttcacagggggcctgctcttcatgtacgtacagtgcaaggtttatgtgcaattgtggaagcgcctgaaggcctacaacagggtaatctatgtgcagaattgcccggaaacctccaagaagaatatatttgaaaaatctcctttgactgaacccaattttgagaacaagcacggctatggcatttgtcactccgacacgaattctagctgctgtactgagccggaggacaccggcgcagagattatccatgtttag

SEQ ID NO: 194800 - DNA, 876 bp, synthetic construct
  misc_feature 1..876: note = Description of Artificial Sequence: Synthetic coding sequence
  source 1..876: mol_type = other DNA
atgagcatgcccctgcaccagatcagcgccatccccagccaggacgcaatttctgccagagtctatcgtagcaaaactaaggaaaaggagagagaagagcaaaatgaaaaaacccttgggcacttcatgtctcattcctccaacatctccaaggcaggcagcccaccttcagcatcggcccctgccccggtgtcctcctttagtagaacttctatcacaccttcctctcaggatatctgccgaatctgccattgtgaaggagacgatgaaagtccacttattacaccgtgtcattgcacaggatccctgcatttcgtgcaccaggcttgcttgcaacagtggatcaaaagctctgacactagatgctgtgagctgtgtaaatacgagttcatcatggagaccaagcttaagcccctcagaaagtgggagaagctccagatgacatcatctgagagaagaaaaattatgtgtagcgtgacgtttcacgtcatagccattacttgtgtcgtctggagcttatacgtactgattgataggaccgcagaggagatcaagcagggtcaggcaaccggcatactggaatggcctttctggacaaaactggtggttgttgccattggctttactggaggcctgctcttcatgtatgtacaatgcaaagtgtacgtgcagttatggaaacgactgaaagcatataaccgcgtaatctacgtccaaaactgtcctgaaacctcgaagaagaacatttttgaaaaatctcctttaacagaacccaactttgaaaataagcacggatacgggatttgccacagcgataccaacagttcgtgctgtacagaacctgaagatacgggagccgaaataattcatgtgtag

SEQ ID NO: 194801 - DNA, 876 bp, synthetic construct
  misc_feature 1..876: note = Description of Artificial Sequence: Synthetic coding sequence
  source 1..876: mol_type = other DNA
atgagcatgcccctgcaccagatcagcgccatccccagccaggacgctatatccgcacgcgtctaccgcagcaaaacaaaagagaaagaaagagaagagcaaaacgagaaaactttgggccatttcatgagtcacagtagtaatatcagcaaggctggttctccgcccagcgcatctgcgcctgccccagtctcctccttcagtcgaacctctatcactccttcctcacaggacatctgtaggatttgccactgtgagggcgatgatgaatccccactgattacaccctgtcactgcacagggtccttgcattttgtacatcaggcttgcctacaacaatggatcaagtcctccgatacacggtgttgtgagttatgcaagtatgagttcataatggaaactaagttaaagcccctgcggaaatgggagaaacttcagatgacttcttctgagcggcggaaaatcatgtgctccgtgaccttccacgtaatagcgattacgtgtgtagtatggtccctttacgtcctcatagacagaaccgcggaggagatcaaacagggccaggcaacaggaatcctcgaatggccattttggacgaaattggtggtcgtagccataggctttacaggcggcttgctgttcatgtacgttcaatgcaaggtgtatgtccaactttggaagcgtctgaaagcatacaatagagtgatctatgtacagaactgcccagagacaagtaagaagaatatctttgaaaagtctccgctaacagaacctaatttcgagaataaacacgggtacggcatttgccatagtgacacaaacagctcctgctgcaccgaacccgaagatactggagctgagattattcacgtctag

SEQ ID NO: 194802 - DNA, 1371 bp, synthetic construct
  misc_feature 1..1371: note = Description of Artificial Sequence: Synthetic coding sequence
  source 1..1371: mol_type = other DNA
tgaatctgcaaggacaccctgcaggccagcaagcggaacagcttcgggtctgagtgggcacaggcactcaaaccagcgaaaaacaccaaagctaggcgtacattgaaatttagcaggtcactcaacgacgtaggggaaaaggcccaagataccagtgagtccttcgcctacgttgagcggacttgtagtgaggggaaactgatcctgccccaagatacatgtttgagaacgaaccgatttcaccataaagaaaagcggacattgaaccacaaacccctggggaattctaagcactcctgtgtgtcctgtctgtccgcgggccgtagtacagccagtgaggtagaagcaggaaagggcggaaggcccggactgctcctcgaggagaaagcagacggagaggctacctctagaagccggcagctgctgcagtatctgttttctctcagccacgggcttagcgcttcttctctgcatcgattccacgagctggaatcctgcgccgcccgtctgcataccgcaaagtccagctctggcctcgctgggtccatgggattctgtagcgatgagatgggcgatgacgacgtctttgaagactctacatcagccaagctgaaatctagagtgttgagagctcccttgtgttccaccgagaaagactctgatctagattgcccaagccctttctccgagaaactaccgcctatctcccccgtgtccacatcaggtgatgtctgtcgcatctgtcattgcgagggggacgatgagtcaccactcatcacaccttgccactgcaccggcagcctacactttgtccaccaggcctgccttcagcaatggatcaaatcctccgataccagatgctgcgaattgtgtaagtacgagttcataatggaaaccaagctgaagcctctgcggaagtgggagaaattacagatgacaagctcagaaagacgaaagataatgtgctcagttaccttccacgtgattgcaatcacctgtgtggtttggtcactttatgtcttgattgaccggaccgccgaagaaatcaaacagggccaggctacgggaattctagaatggccgttctggacaaagctagtggtggtggcaattggttttaccgggggtctgctgtttatgtacgtgcagtgtaaggtgtacgtccaactgtggaaacggctgaaggcctataaccgggtgatttacgttcagaattgtcccgaaacatctaaaaagaatatctttgagaagtcacccttgacagagccaaacttcgaaaacaagcatggatacggtatttgtcactctgacaccaattccagctgttgtaccgaacctgaggacactggggctgagattatccatgtctag

SEQ ID NO: 194803 - DNA, 270 bp, synthetic construct
  misc_feature 1..270: note = Description of Artificial Sequence: Synthetic coding sequence
  source 1..270: mol_type = other DNA
atgagcatgcccctgcaccagatcagcgccatccccagccaggacgctatttccgcaagggtctaccgtagtaagacaaaggaaaaagaacgagaggaacagaatgaaaaaaccctgggccatttcatgagccactcaagtaacatctctaaagctggatctccaccatccgcttctgccccagcccccgtgtcatcattcagcaggacctcgattactccatctagtcaggatatttgcagaatatgtcactgtgagggtgatgactag

SEQ ID NO: 194804 - DNA, 1041 bp, synthetic construct
  misc_feature 1..1041: note = Description of Artificial Sequence: Synthetic coding sequence
  source 1..1041: mol_type = other DNA
atgctgaagagccggctgcggatgttcctgaacgagctgaagctgctcgtactgacaggaggaggccggccacgagccgaaccgcaaccccgtggagggaggggcggcgggtgcggctgggctccttttgctggctgctccacaagggatggggatggggatgaggaagagtactacgggtccgagcctagagcccggggcctcgctggcgacaaggaacccagagcagggccgctgccccctccagctccgcctctgcctccacctggggcgctcgacgcgttaagtctcagcagttctctcgatagcggcctgagaactcctcagtgcagaatttgctttcagggtccagagcagggtgagcttctctccccctgtcgatgcgacggcagtgtgcggtgtacccatcagccatgtttgattcgctggatcagcgagcgcggctcttggtcctgcgagctgtgctacttcaagtatcaggtgttagcaatctccaccaagaatccactacagtggcaagccatctctctgacagtcattgaaaaggtgcaaattgcagcaatcgtgctggggtccttattcctggtcgcttcgatcagctggctgatctggtcctctctgtctccatccgctaagtggcaaagacaagatttgttgtttcagatatgctacgggatgtatggcttcatggatgtggtgtgcataggcctgattatccatgaaggatcatcggtgtaccgaatctttaagcggtggcaagcagtaaaccagcagtggaaagtgctgaactatgataagactaaagatattggaggggacgccggtggtggcaccgccggaaaaagcggccccagaaactctcgtaccggaccgacctccggagcaacttccagaccaccagcagctcaacggatgcgtaccctgttgccacaacggtgtgggtatacgattcttcacctgctgggtcagctccggcccccagatgctcgcagctctagtcattcagggcgggaggtggtgatgagagttaccactgtatag

SEQ ID NO: 194805 - DNA, 702 bp, synthetic construct
  misc_feature 1..702: note = Description of Artificial Sequence: Synthetic coding sequence
  source 1..702: mol_type = other DNA
atggtgagcgacaagtgccacatcctggacctgatcaaggcccagcgccgccaaatgctcattctgcccgagggattccgagagggaagttggagcaccctgctgttcagagcaacacaccacctggcacttcatccctttctgggtctgttcggggccctgagccccactcagtggcaggcgatctcactgacagtcatcgaaaaagtgcagattgcagcgatcgtcttgggcagcctcttcctggtagcttccatctcgtggctcatctggtcatcactgtcaccaagcgcgaagtggcaaagacaggatctgctttttcagatctgctacggtatgtacggattcatggatgttgtttgcattggcttaatcattcacgaaggtagttccgtataccggatcttcaagcggtggcaagcagtaaaccaacagtggaaggtgttgaactatgataaaactaaagatattggaggagatgccgggggcggaacagctggaaagagcggcccacgcaattcccgtacaggtccgacatctggagctacctcccgccctcccgcagctcaacgtatgcggactctgctgccccagcggtgcgggtacaccatcctacacctcttggggcaacttagacctcccgacgctcgatccagttctcatagcggccgggaggtggttatgagagtgacgacagtatag

SEQ ID NO: 194806 - DNA, 3159 bp, synthetic construct
  misc_feature 1..3159: note = Description of Artificial Sequence: Synthetic coding sequence
  source 1..3159: mol_type = other DNA
atgaagctggtgaacatctggctgctgctgctggtggtgctgctgtgcgggaagaagcacctgggcgatcgattagaaaagaagagttttgagaaggcgccctgtcccggatgttctcatcttactctgaaggtcgaattttcgtcaactgtagtggaatacgaatatatagttgccttcaacggttactttaccgcgaaagcccgcaacagctttatctctagcgcgctgaagtcctccgaagtggacaattggcggatcatccctcgaaataacccctcttctgattacccttcagactttgaagtaatacagatcaaagagaagcaaaaagctggcctgttaacattggaagaccacccaaacataaagagggttacccctcaaaggaaagttttcagatccctgaagtacgccgagtctgatcccactgtaccgtgcaatgaaacccggtggtcccagaaatggcagtctagccgtcccctccggagagcctcgttgagtctgggatctgggttctggcacgccacagggagacactcatccaggcgacttcttcgggcaatccctagacaggtggctcagacactgcaggcggacgtgttatggcagatggggtacactggcgctaatgttcgggtggctgtcttcgatacgggcttatccgaaaaacatccccacttcaaaaacgttaaggaaagaaccaattggaccaacgaaagaacgctggacgatgggctgggacacgggacgtttgtggctggggtgatagccagcatgcgggaatgccagggattcgcacctgacgcagagctccatatctttcgggtctttacaaacaatcaggtgagctacacctcatggtttctcgacgcttttaactacgcaatattaaagaagatcgatgtgcttaatctgtcaatcggcggccccgattttatggaccatccctttgtagataaggtctgggaactcactgcgaacaacgtgattatggtgtcggcaattggcaacgatggtcccctgtacgggacgctcaataacccagccgatcagatggatgtgattggggtgggcggtatagacttcgaagacaacattgcccgcttttcttctcgcggaatgaccacctgggagttacctggcggatatggccgaatgaagcctgatatcgttacctatggtgcgggcgtacgcggatcaggagtcaaggggggttgccgcgcgctgtcgggcaccagtgttgcatcccccgttgtggctggtgccgttacattgttggtctctacagtgcagaagcgtgagctggtgaaccccgccagcatgaagcaggccctgattgcgtctgctcgacggctccctggcgttaacatgtttgaacagggacatgggaagctcgacctgctgcgggcctaccagatcttaaactcttataaaccccaggccagtctgtcccccagctacatcgaccttaccgagtgtccatatatgtggccttattgcagtcagccgatctactatggtggcatgcctactgtggtaaatgtgactattcttaatgggatgggcgttactggcaggatcgtggacaagcccgattggcagccttaccttccccagaatggtgataatattgaggtcgcattctcatattcgtcagttttgtggccctggagcggctatttggcgatttccattagtgtaacgaagaaggctgctagctgggagggcatcgcccagggacacgtgatgatcacggtggcttcaccagcggagactgagtccaaaaacggcgccgagcagactagtaccgtgaaactccccatcaaggtgaagatcatacccacacctccacggtcaaagagggtgctgtgggaccagtaccataacctcagatacccgccagggtatttccctcgcgataatctgaggatgaagaatgatccgctggattggaatggagatcatatacacacaaactttagggacatgtatcagcacctccgctccatgggctatttcgtagaagttctcggcgcccccttcacctgctttgatgccagtcaatacggaaccctgctgatggtggattctgaagaagagtactttcccgaagaaatcgctaaacttcgcagagacgtggataatggactcagcctcgtaatattttctgattggtacaatacatccgtaatgagaaaggtgaagttctatgatgagaacactcgccaatggtggatgcctgacaccgggggagccaatataccagcccttaatgagcttctatctgtttggaatatgggatttagcgatggattgtacgaaggagaattcaccctggccaatcatgatatgtattacgccagcggctgctcaatagccaaattccccgaggatggtgtagtgatcactcaaacctttaaggaccagggcctggaggtgctgaagcaagagaccgccgtggtcgagaacgtgccaatcctgggtctgtatcagatccccgccgaaggagggggccgaattgttctctatggggattcaaattgcctggacgactcccacagacagaaggattgtttttggctccttgacgcactgctgcagtacacttcttacggtgtgactcccccctcactttcccactcagggaatcgccagcgacctccaagcggggcaggctcagtaaccccagaaagaatggagggcaaccatctacatagatacagtaaggttctcgaggcccatttaggagaccccaaaccgagacctctgccagcgtgcccgagactctcatgggctaagccccagcccttgaacgagaccgctcccagtaacctttggaagcaccaaaaactactgtccattgatctggacaaagtggttcttccaaatttccgaagtaaccggccccaggtgcgtccactatcccctggtgaaagtggtgcctgggatattcctggtggcatcatgcccggccgttataaccaggaagtcggccagactatcccagtgtttgcttttttgggggccatggttgtgctggccttcttcgtggtgcaaattaataaggcgaaatcacggccaaaacggcgaaagccaagagtaaagaggcctcaactgatgcagcaggtccacccaccgaaaaccccgtcagtgtag

SEQ ID NO: 194807 - DNA, 1494 bp, synthetic construct
  misc_feature 1..1494: note = Description of Artificial Sequence: Synthetic coding sequence
  source 1..1494: mol_type = other DNA
atggccctggtgggcctgcccggccacctgcacttctgcgaccaggaatccggctttcttggaagacactgctccggaccctgccacgatcactgcgggttcccctctcgggaccgggtgaagaagtggtgtcggacagatttcaacagcaagctgcctattaaggtcaagatcattcccacgcccccccgaagcaaacgtgtgttgtgggaccaatatcataatcttcggtacccccccggatactttcccagagataacctgcgtatgaagaatgacccactagactggaacggggaccatatccacacaaacttcagagatatgtatcagcaccttcgttccatgggatattttgtagaagtgctcggcgccccttttacttgcttcgatgcatcccaatacggcaccttgcttatggttgactccgaggaagagtacttccctgaggaaatagctaaacttaggcgtgatgttgataacgggctctctctggtgatcttctctgactggtacaacacttcagtcatgaggaaggtgaagttttatgacgagaacactaggcaatggtggatgcccgacacgggtggcgcgaacatccccgctctgaacgagttgctctcggtatggaacatgggatttagtgacggtctttacgagggtgagttcaccctggctaaccatgacatgtattacgcatccgggtgttccatcgctaaatttcctgaggacggcgtagtgatcactcaaacatttaaagatcagggccttgaggttctgaaacaggagacagctgtggtggagaatgtgcccattcttggactgtatcagatccctgccgagggaggcggtagaatcgttttgtatggggactctaactgcttggatgattcgcacaggcagaaggactgcttttggctcctcgacgctctgctgcaatataccagctacggagtcacgccacccagcctttctcattctggaaaccgtcagcggccccctagtggggccggaagcgtgaccccggagaggatggaagggaaccacctgcaccgatacagcaaagtacttgaggcacacctgggtgatcctaagcccaggcctcttcctgcttgcccccggttgtcttgggccaaaccacagcccctcaatgagacagctccaagtaacctgtggaaacaccagaaacttctgtctattgacttggataaagtggtcctcccaaatttcaggagcaaccgcccccaggtacggccactctctcctggcgagtctggggcctgggatattccaggcgggattatgccagggaggtataatcaggaagtgggccagactatcccagtttttgccttcctgggagccatggttgtcctcgcatttttcgtggtccagatcaacaaagcaaagagccgtcccaagcgcagaaaaccaagagtcaagagaccacagcttatgcagcaggtccacccccctaaaaccccatcagtttag

SEQ ID NO: 194808 - DNA, 993 bp, synthetic construct
  misc_feature 1..993: note = Description of Artificial Sequence: Synthetic coding sequence
  source 1..993: mol_type = other DNA
atgatccccgtgagcctggtggtggtggtggtgggcggctggaccgtcgtgtatctaacagacctcgtgctgaaatcttccgtgtatttcaagcactcttacgaagactggttggaaaacaatggcttgtcaatcagcccatttcacattcggtggcagacagccgtcttcaacagagctttctatagctgggggcgccggaaagccaggatgctgtaccagtggttcaactttggcatggttttcggggtaatcgccatgttctccagttttttcctgttaggcaaaacgctgatgcaaaccctggcccagatgatggcagacagtccctcttcctactcttcatccagtagcagctcctctagcagttcatcctccagttccagcagctcaagctccagttcctcccttcataatgagcaggtgctgcaggtcgtcgtgcccggtattaatctacctgtaaaccagttgacctatttttttacagcagttctgatctctggggtcgttcacgaaataggccacgggatcgcagccatcagggagcaagtaaggtttaacggattcggtatcttcttgttcataatttacccgggggcctttgtggatttgttcacaactcatcttcaattaattagtcccgtgcaacagttgcggattttttgtgctggaatatggcacaatttcgtgttagccctgctcgggattctggctcttgtgctcctgccagtaatcctgctaccattctattatacaggggtgggggtcctgatcacagaggttgcagaggatagcccagccatcggcccacgcggtctgtttgtgggtgacctggtcacccacctccaggattgccctgtcacaaatgtgcaagattggaacgagtgtctggacaccatcgcctacgaaccccagatcggctactgtatcagtgcgtctacattgcagcagttgagcttccctgtgcggggggtatatatttcctctatctag

SEQ ID NO: 194809 - DNA, 1560 bp, synthetic construct
  misc_feature 1..1560: note = Description of Artificial Sequence: Synthetic coding sequence
  source 1..1560: mol_type = other DNA
atgatccccgtgagcctggtggtggtggtggtgggcggctggaccgtggtgtacctcactgatctggtcctcaagagtagcgtctatttcaaacattcatacgaggactggctcgaaaataacgggctgtctattagcccctttcatatccggtggcagacagctgtgtttaatcgtgcgttctattcgtggggcagaaggaaagctcgcatgttgtatcagtggttcaacttcggtatggtctttggagtaatcgctatgttctccagcttctttctgctgggtaagaccctcatgcagaccctggctcagatgatggctgacagcccatcaagctatagcagtagttcctcgtctagcagctccagcagcagctctagctcttcctcttcttccagctccagctctcttcataacgagcaagttctgcaggtggtggtaccaggaatcaacttacctgtgaaccagttaacatattttttcactgcagtgctcatcagcggtgtggtacatgagattgggcatggaattgccgctattagagaacaagtgcggttcaatggttttggcatctttctcttcatcatctaccctggagcctttgtggatctcttcactacccacctgcagcttattagccccgtacagcagctcaggattttctgtgcggggatctggcacaatttcgtgctagctttgctgggcatacttgctctcgtgctgctgccagtgatactgctgcctttctactacaccggcgtaggtgtgctaatcacagaagttgcggaagactctcccgcaataggcccccgcgggttgttcgtaggagacctagtaacccatctccaggattgtcctgtcaccaatgtgcaggactggaatgaatgcctcgacactatagcctatgagccacagatcggatattgcataagtgctagtacactgcaacagttgagctttcctgtccgcgcctacaagcggctagacggtagtactgagtgctgcaataaccactctttaacggacgtgtgcttctcctatagaaataattttaacaagaggctgcatacgtgtctgcctgcccgcaaggctgtagaagccacacaagtgtgtagaaccaacaaagattgcaaaaaaagttcgtctagctctttttgcatcatcccgtccttggaaacccacactaggctgataaaggttaaacatcctccacaaatcgacatgttgtacgtggggcaccccctgcatctgcactacacagtctcaatcacatccttcataccccgctttaacttcctgagtattgacctacccgtggtggttgagacctttgtgaaatatctcatctctctctctggcgccctggcaatcgtgaacgctgtcccgtgtttcgctttggatgggcaatggatactgaattcattcctcgatgccaccttgactagtgtcatcggagataacgacgtgaaggatctgattggattttttatcctcctgggcggtagcgtactgctcgctgctaatgttaccctgggcctctggatggtgacagctcggtag

SEQ ID NO: 194810 - DNA, 207 bp, synthetic construct
  misc_feature 1..207: note = Description of Artificial Sequence: Synthetic coding sequence
  source 1..207: mol_type = other DNA
atgcaccagacctacagccggcactgccggcccgaggagcggtggtcgcaggaggggtggaatatccctgctaacgggttcaacatttgtcgatgtttgaacattgggatgaaactgcgactctggaataatctgaacaaaagcaacatcctgggggccctgaaaatcaagagacgggaaatcagggccccgttcctgttgccgtag

SEQ ID NO: 194811 - DNA, 762 bp, synthetic construct
  misc_feature 1..762: note = Description of Artificial Sequence: Synthetic coding sequence
  source 1..762: mol_type = other DNA
atggtgctgctgaagctgctggaggtgtaccggaagggcagcgccggcactttccataaatccacgattttcggcaacactattatgacttctcagcccgtgccaaatgagaccattatagtgcttccctccaatgtgatcaacttctcgcaggctgagaagcccgagcccacgaaccagggacaggactcccttaagaaacacctgcacgccgaaattaaggttataggcacaattcagattctttgtggcatgatggtgcttagcctcggcatcatcctggcctccgcgtctttttccccgaatttcacgcaagtgacttctacactcttgaattctgcctaccctttcattggtccgttttttttcattatcagtgggagccttagcattgcgactgaaaagcggctaacaaagttgctcgttcacagttcgttggtgggttccatcctctctgccctgagcgccctggttggattcatcatcctgtctgttaaacaggctacactgaaccccgcatctctgcagtgtgagcttgataaaaataacatacccacaaggagttacgtgtcctatttctaccatgattcgctatacacaactgattgctatactgcaaaagcaagtctggcaggcaccctgtcgctgatgttgatttgcacccttttagagttttgcctggctgtgctcaccgctgtgttgcgttggaagcaggcctattctgattttcctggagtgtccgtcctggccggttttacgtag

SEQ ID NO: 194812 - DNA, 804 bp, synthetic construct
  misc_feature 1..804: note = Description of Artificial Sequence: Synthetic coding sequence
  source 1..804: mol_type = other DNA
atgaaggccgaggccaccgtgatccccagccggtgcgcccggggcttgcccagctggcaggtgctctcccctgtacagccatggcaaacaagcgctccacagaatactactcaaccaaagctattagctccccaccaacatgaaaagtctcagaagaagtctagtctgctgaaggaactgggggctttccatatcaccattgcgctgttgcacctggttttcggaggctatttggcaagcatcgtgaagaacctccatttggtagttctgaaatcttggtaccctttctggggggctgcctcgtttctaataagcgggatcctggcaatcacaatgaagactttctcgaagacctatctgaagatgctgtgtctcatgaccaacctgatcagcttattctgcgtgctgagtggactgttcgttataagtaaagatctgttcctggagtccccattcgagtctccgatctggcgcatgtaccctaactctaccgtgcacatccagcgattggaactggccctcctgtgctttacagttctggagttgttcctgcctgtccctaccgccgtgactgcgtggagaggcgactgcccatcagcgaagaacgatgacgcgtgcctggtgcctaacacccccctgcaccttaaaggcctcccagtcgaaccaccccccagctaccagagcgtgatacagggagacgcccagcacaaacagcaccagcgactacgggaggtgaagcaggtggcccctgacacttggattgtgaccgatggtgcagcaatttggactcagacagccaattag

SEQ ID NO: 194813 - DNA, 804 bp, synthetic construct
  misc_feature 1..804: note = Description of Artificial Sequence: Synthetic coding sequence
  source 1..804: mol_type = other DNA
atgatgagcagcaagcccaccagccacgccgaggtgaacgagaccattccaaatccctatccccccagttccttcatggcgcccggctttcagcaaccactcggcagcatcaatctcgagaaccaggcgcagggggctcagcgcgctcagccctatggaattacatcacctggcatctttgcctcaagtcaacccggacagggtaatattcagatgattaacccttcggttggtaccgctgttatgaattttaaggaagaagctaaggccctgggcgtgatccaaatcatggtcggactcatgcatatcgggtttgggattgtcctatgcctgatatctttctcatttcgggaggtccttgggtttgcatccactgcagtgattggtggctaccctttttgggggggcctctcatttatcatttctgggagcctgtccgttagtgctagcaaggaactttccaggtgcctggtcaaaggaagccttggcatgaacattgtgagttccatcctcgcctttataggtgtgatcctcctcctggtcgacatgtgtattaacggggttgccggtcaggattactgggccgtattatccggaaagggaatatctgccacactgatgattttctcgttgctcgaattcttcgtcgcatgtgcaacggcacactttgctaaccaggcaaacaccacgaccaatatgagcgtcctggtgataccgaacatgtacgagtctaatccagttactcccgcctcctcatcagcccctccacgatgcaataattacagcgccaatgcgcctaagtag

SEQ ID NO: 194814 - DNA, 345 bp, synthetic construct
  misc_feature 1..345: note = Description of Artificial Sequence: Synthetic coding sequence
  source 1..345: mol_type = other DNA
atgatgagcagcaagcccaccagccacgccgaggtgaacgagaccatacctaacccatacccccccagctcattcatggctcctgggtttcagcagcctttgggatctatcaacctcgaaaaccaagcccaaggtgcccagagagctcagccttacgggatcacttctcccggtatttttgcttcgtcccaacctggccaaggtaacatccaaatgatcaacccgtcagtaggcacagccgtcatgaacttcaaggaagaggcaaaggctctgggtgttattcagatcatggttggactgatgcatatagggtttgggatcgtgttatgcttgatcagcttttag

SEQ ID NO: 194815 - DNA, 666 bp, synthetic construct
  misc_feature 1..666: note = Description of Artificial Sequence: Synthetic coding sequence
  source 1..666: mol_type = other DNA
atgatgagcagcaagcccaccagccacgccgaggtgaacgagaccatacccaatccctaccccccatcaagcttcatggcccccggctttcagcagccccttggctcaataaatttggagaatcaggcccagggcgcgcagcgcgctcaaccttatggcatcaccagtcctggcatcttcgccagctcacagcctggccagggaaacatccaaatgatcaaccctagcgtgggaactgctgttatgaatttcaaggaagaggctaaagctctcgggttcataattagcggctcccttagcgtctctgcttcaaaagagttgtcccggtgccttgtcaaaggctccctgggcatgaacatagtgagctccattctggcctttattggcgtaatcctcttacttgtggacatgtgtataaacggagtggccggtcaagattattgggctgtactctccggaaaggggatttccgccaccctcatgatcttttccctcctcgagttcttcgtggcttgtgctactgcacatttcgcaaaccaagccaatactactacaaacatgtctgttttggtcatccccaatatgtatgagtcaaatcctgttacccccgcgagttcatccgcaccgccgcgatgcaacaactactctgccaatgcgcctaagtag

SEQ ID NO: 194816 - DNA, 972 bp, synthetic construct
  misc_feature 1..972: note = Description of Artificial Sequence: Synthetic coding sequence
  source 1..972: mol_type = other DNA
atgaccgagcaggtgatcggcgccaacagcgtgcccggcatcatcgccccggacaacgtgcacgttattcagccttcaaatccagttgcatcaggaaatcatctgcagcccagcgaggtgacaacttacccaatctcacccaaagtgatccattgcgatactgggagagccaatctccagaatctcctggtggtaaaccagaactccgccgccggcgtgcagtcccagcccattggctatcagcggcaataccctgtcggcaccgcttcgctccagaccgtgcctggcgtcatccagtatacacaaggtacaacaaacctccaaacctggcctggggacctgcaaaatcccttaaatgccaaccccggcctgacacatacttctaattcaagtcaatggaataccagttttgctagcttcacaagctttaatcctaaaaaattcatcaatgaggaagttcgtacactgggcgccatccaaattcttataggactcactcacatcttctccgcaatcaatcccgttttgtattattaccccttcgtcacttggctcagcggatatcctttatgggggggcctgtcctatatcgtgtctggctccctgagcgtatgggctgctaaggacccttccccatgtgtcgtgaattcgtctattagttttaacattatcagcgcgctgttcgcgtttgcaggaatattcataattattaccgatctgtccctgtattacgtgactacctattcaaaagctgtgagcggaggcctgctcccgtttgcgctgctggaatttattttgacttgcgtggtttcccacttcggctgccaggccacgtgctgccgccaattcgagaacgttgctgtgatccccaccgttttctcttttaatccagcaaatacaaccacttctcctgtaaacgcaaccacgggtcccgtgaatgcggccacgggcccagtctccgccacaaattag

SEQ ID NO: 194817 - DNA, 735 bp, synthetic construct
  misc_feature 1..735: note = Description of Artificial Sequence: Synthetic coding sequence
  source 1..735: mol_type = other DNA
atggacaccgagagcaaccggcgggccaacctggccctgccccaggagccgtccagtgtccctgcctttgaggttctcgaaatcagcccacaagaagtgagtagcggaaggctcttgaagagtgcttcttcacctcctttacacacctggctgacagtgctaaagaaggagcaggagttcttaggggttacacaaatactaaccgccatgatttgtttgtgtttcggaacggtagtgtgctcagtgttagatatcagtcacatcgagggagacatcttcagcagttttaaggccggctacccgttttggggagctatcttcttctctatctctggaatgttaagtattatctcagagagaagaaacgctacatatctggtccgtggctctttgggggccaacaccgcatccagtattgctggaggaacgggcatcactatacttattattaaccttaagaaatccttagcatacattcatatacactcctgtcagaaatttttcgagacaaagtgctttatggcatcttttagcacggagatcgtggtgatgatgttgttccttaccattttagggctgggaagtgctgtctcactcactatctgcggtgccggagaagaactgaaggggaacaaggtgcccgaagacagggtgtacgaggagctcaacatatacagcgccacctacagcgagctggaggaccccggagagatgtcaccccccattgacctgtag

SEQ ID NO: 194818 - DNA, 126 bp, synthetic construct
  misc_feature 1..126: note = Description of Artificial Sequence: Synthetic coding sequence
  source 1..126: mol_type = other DNA
atggacaccgagagcaaccggcgggccaacctggccctgccccaggagccatctagtgttccggccttcgaggttctcgaaattagtccccaggaggtgagctccgggagattgctaaagagctag

SEQ ID NO: 194819 - DNA, 645 bp, synthetic construct
  misc_feature 1..645: note = Description of Artificial Sequence: Synthetic coding sequence
  source 1..645: mol_type = other DNA
atggccagccacgaggtggacaacgccgagctgggcagcgccagcgcacacggaacccccggaagtgaagcgggccccgaggaactgaatactagcgtgtatcagccaattgatggcagtcccgactaccagaaggccaaattgcaggtactaggggcaatccaaattctaaacgccgctatgattctggccctaggcgtcttcctcggttccctgcagtacccataccactttcagaaacacttctttttttttacgttttacactgggtaccccatctggggcgcagtgtttttctgttcctctggaaccttatccgtggtagctggaattaagccaacccgcacatggattcagaacagtttcgggatgaatatcgcttccgcaactatagccctggtggggacagctttcctgagcctgaatatcgcagtgaacatccaatccctgagatcctgtcattcctccagcgaaagccccgatctgtgcaattatatgggcagtatctcaaacggcatggtgtcgctgttactgattctcaccctgctggaactctgcgtcaccattagtaccattgctatgtggtgcaacgcaaactgttgcaactctcgtgaggaaatttcatccccacctaatagtgtctag

SEQ ID NO: 194820 - DNA, 507 bp, synthetic construct
  misc_feature 1..507: note = Description of Artificial Sequence: Synthetic coding sequence
  source 1..507: mol_type = other DNA
atggccagccacgaggtggacaacgccgagctgggcagcgccagcgcccatggcaccccgggcagtgaagccggcccagaagagcttaatacatcagtgtaccagcctatcgatggtagtccagactatcagaaagcaaaactacaggttctgggcttctgttcaagcggcactctctccgttgtagccggaattaagccaacccggacctggatccaaaatagtttcggcatgaacatcgccagtgccacaatcgcactggtgggtaccgcatttctcagcctgaacatagcagtcaatatacagtctctgcgttcttgccacagtagctccgaaagccctgacctgtgcaattatatgggcagtatttctaatgggatggtgagcctgctgcttatcctgacgctcttggagctgtgcgtaaccatctcgaccattgccatgtggtgtaacgctaattgctgcaattcccgggaggagattagctcaccaccgaactcagtctag

SEQ ID NO: 194821 - DNA, 276 bp, synthetic construct
  misc_feature 1..276: note = Description of Artificial Sequence: Synthetic coding sequence
  source 1..276: mol_type = other DNA
atgaacatcgccagcgccaccatcgccctggtgggcaccgccttcttgtcactaaacatcgccgtgaatatacaatcccttcggtcctgccattcaagctcggaatctcctgatctgtgcaactacatgggctcaatctctaacggcatggtcagcctgttattgattctgactctgctcgaactctgtgtgacgatatcaacgattgctatgtggtgtaacgctaattgctgcaatagtagggaagaaatttcctcacccccgaactctgtgtag

SEQ ID NO: 194822 - DNA, 507 bp, synthetic construct
  misc_feature 1..507: note = Description of Artificial Sequence: Synthetic coding sequence
  source 1..507: mol_type = other DNA
atggccagccacgaggtggacaacgccgagctgggcagcgccagcgcccatgggacccccggttccgaggctgggcctgaggagcttaatactagcgtctatcagcccattgacggatcgcctgactaccagaaggccaagttacaggtgcttggcttctgctcctctgggactctgtccgtggttgcaggcattaagcccacccgaacatggattcagaattcctttggaatgaatattgcgtcagctactatcgccctagtgggaaccgccttcctctctctgaatatagcagtgaatatccaatccctgcgatcctgccacagttctagcgagagcccagatctctgtaactacatggggagcattagtaacgggatggtctctcttctcttaatcctaacactgctagaactttgtgttaccattagtacgattgcaatgtggtgtaatgctaattgctgcaattctcgagaggaaataagtagcccacctaattctgtctag

SEQ ID NO: 194823 - DNA, 720 bp, synthetic construct
  misc_feature 1..720: note = Description of Artificial Sequence: Synthetic coding sequence
  source 1..720: mol_type = other DNA
atgcaccagacctacagccggcactgccggcccgaggagagcaccttttcagccgcaatgacaaccatgcaaggcatggagcaggccatgcctggggccggccccggcgtgcctcaactgggaaatatggctgtcattcactcgcatttgtggaagggcttgcaggagaagtttcttaagggtgagccaaaggtgttgggcgtggtgcagatactgacggcactgatgagtctatcaatgggcatcaccatgatgtgtatggcctccaacacatacggatccaatccaatttcagtctacatcgggtacaccatctggggctccgttatgttcatcattagcgggtccctgtctatcgccgccggcataaggaccacgaaagggctggtgaggggctctttggggatgaatattacctcaagcgtcctagctgcctccggcattctcattaacaccttctctctggccttttatagctttcaccatccttattgtaattattacgggaattctaacaattgtcacggtaccatgtccatccttatgggcctggatggtatggtgctgcttctgagcgtgctggaattttgcatcgcagtttccctatccgcatttggttgtaaagtcttgtgctgcacaccaggcggcgttgtactcattctgccctctcactcccacatggctgagaccgcatccccaactccactcaatgaggtgtag

SEQ ID NO: 194824 - DNA, 663 bp, synthetic construct
  misc_feature 1..663: note = Description of Artificial Sequence: Synthetic coding sequence
  source 1..663: mol_type = other DNA
atgaccaccatgcagggcatggagcaggccatgcccggcgccggccctggcgtccctcagcttggcaatatggcagttatccatagccacttgtggaaaggcctccaggagaagtttctgaaaggagaacctaaagtgctaggcgtcgtccagatcctcaccgccttgatgtcccttagtatggggattaccatgatgtgcatggcttctaacacatatggttcgaaccctatttccgtgtacattggatacacaatatggggctctgtgatgtttattatcagtgggtctctgtcaattgccgcaggtattcggacgactaagggcctcgtccgcggctcattggggatgaatataacatcttcagtgctggcagccagcggtatcctgattaacacattttctttggcattttatagcttccaccacccctactgcaactattacggaaatagcaataattgccatggcacaatgtctatcctcatggggctggatgggatggtcctgctgcttagcgtactggaattttgtatcgcggtaagcctgtctgcattcggatgtaaggtgctgtgctgtacgccaggcggcgtggtactgattctcccctcacactcgcatatggctgaaacagcctcacccactccactgaatgaggtatag

SEQ ID NO: 194825 - DNA, 663 bp, synthetic construct
  misc_feature 1..663: note = Description of Artificial Sequence: Synthetic coding sequence
  source 1..663: mol_type = other DNA
atgaccaccatgcagggcatggagcaggccatgcccggcgccggccccggggtgccgcaactaggaaacatggccgtcatccactcacacttgtggaaagggctgcaagagaaatttttgaagggcgagcccaaggtattgggagtagtccagatccttaccgccttaatgtcgctgagcatggggatcacaatgatgtgtatggcttcaaatacatacgggtcgaacccaattagcgtctacattggttataccatatggggcagtgtaatgttcataattagcggttcattgtccattgctgcagggattcgtactaccaagggtctggtgcgtggaagcctgggaatgaacattacaagtagcgtcctcgcggcctctgggatcctcatcaacacgtttagccttgccttttactcctttcaccacccctactgtaattactacggtaattctaacaattgtcacggcacaatgtcgatcctcatgggtctcgatgggatggtgttactgttaagcgtgctcgaattctgtattgcagtgtcactttctgcctttggctgtaaggttctttgctgtaccccaggcggagtggtcctcattctaccctctcacagccatatggcggaaacagcctcccccacacctctgaatgaagtgtag

SEQ ID NO: 194826 - DNA, 561 bp, synthetic construct
  misc_feature 1..561: note = Description of Artificial Sequence: Synthetic coding sequence
  source 1..561: mol_type = other DNA
atgcaccagacctacagccggcactgccggcccgaggagagcaccttctctgccgcaatgacgacgatgcaaggaatggaacaggcaatgccgggggcagggcccggcgtgcctcagctaggcaatatggctgtgattcattcacatttatggaaaggcttgcaagaaaaattcttgaagggagagcccaaagtgctgggcgtggttcaaattctgacagccctgatgtcactgagcatggggatcaccatgatgtgcatggccagcaacacatacggctccaatcctattagcgtgtatatcggatacactatttggggttctgtcatgttcattatttccgggtccctctcgattgccgctggcatccggacaactaagggcctcggacttgatggtatggtcttactgctgagcgtgttagagttctgcatcgcggtctccctatctgcgttcgggtgcaaggtgctgtgctgcactccgggaggggtagtgttaatactgccatcccactctcacatggccgaaactgcctctccaacgcccctaaatgaggtgtag

SEQ ID NO: 194827 - DNA, 399 bp, synthetic construct
  misc_feature 1..399: note = Description of Artificial Sequence: Synthetic coding sequence
  source 1..399: mol_type = other DNA
atgaccaccatgcagggcatggagcagaccacccccggcgccggcccagatgtgccacaactcggaaacatcgatgttatccactcatatctgtgcaaaggactccaggaaaagttctttaaaaggaagccaaaggtgctcggggttgtgcgtatactgatcgccctcatgagcttatctatgggaatcataatgatgtgcgtggcattcagcagctacgaagagcacccaatctttgtttacgtcgcttataccatctggggtagtgtgatgtatccttatcagctgcagcaagaactagaacagcaaaaagtatggaattacctgaagaatttgagctggcgcattatgggttcttatctgtgcttcggggagcgctcggagctcaaacctctctag

SEQ ID NO: 194828 - DNA, 333 bp, synthetic construct
  misc_feature 1..333: note = Description of Artificial Sequence: Synthetic coding sequence
  source 1..333: mol_type = other DNA
atgaccaccatgcagggcatggagcagaccacccccggcgccggcccggatgtgcctcaactcggaaatatagacgtgatccactcctacttatgcaaagggttgcaggagaagttctttaaacggaaaccgaaggtgttaggcgtcctttgcgggcacaaattctctacgcacagcgtcagtctgagcgtggccgcaggaataagaactaccaaggggctcgagctatccgaggagtttaaactagagaacaacggcataatctttgtcttctggcgagagattcgggtggaaaccacaattaggcggcaggtaagacgattgttgaaatag

SEQ ID NO: 194829 - DNA, 615 bp, synthetic construct
  misc_feature 1..615: note = Description of Artificial Sequence: Synthetic coding sequence
  source 1..615: mol_type = other DNA
atgagctacatccacatctgcgtgaaggactgcaagcggagcagctcgcgcggaaatccaaagtctctgggtttttgtgtcgatatttccttccagctcatccgtgtggtccgcatactgattgctcttatgagcctgagcatgggcatcattatgatgtgcgtggccttttcttcttacgaggagcatcccatatttgtgtacgtggcatatacaatctggggctcagttatgtacccctaccagctgcaacaggagttggaacaacagaaagtgtgcatctatcgagtgctgaacggcgcgcaagcaggcgtccagtggagggaccttgggtctttacagccccctcctcccagccggctcccttggcctccaaaagttccgagagttcagccgctaccaggtagacatccagtgtgggaggttagatctgtgtcagcgtggccccccatcgtctgggatgtgcgctccccatctgcatggctgccctcccttgagtccgaagaacgcttatgccccgcagccatccctagcagaaagtggggagctcctttgccgggccatcatccaatctgggaggtgagatcagtctcggccagacccccaattttctag

SEQ ID NO: 194830 - DNA, 399 bp, synthetic construct
  misc_feature 1..399: note = Description of Artificial Sequence: Synthetic coding sequence
  source 1..399: mol_type = other DNA
atgaccaccatgcagggcatggagcagaccacccccggcgccggcccagatgtgccacagctaggcaatatcgacgtgattcattcctacctctgtaaaggcttgcaggaaaaattcttcaagcgaaagccaaaagtcctgggggtggtcaggatactgatcgcccttatgtctctaagcatggggatcattatgatgtgcgtcgccttttccagctatgaagagcacccaatctttgtttacgtggcctacaccatttggggctcggtcatgtatccgtaccagctccagcaggaacttgagcagcagaaggtgtggaattatctgaagaacttgtcttggagaataatgggatcatatctttgctttggcgaacgctctgagttgaagccattgtag

SEQ ID NO: 194831 - DNA, 603 bp, synthetic construct
  misc_feature 1..603: note = Description of Artificial Sequence: Synthetic coding sequence
  source 1..603: mol_type = other DNA
atggacagcagcaccgcccacagccccgtgttcctggtgttcccccctgaaattacggcaagcgagtacgaatcaaccgaactatccgcaacgaccttttctactcagtcgcctttgcagaagctcttcgccaggaagatgaagatcttgggcactattcagatcctctttggcattatgactttttcctttggcgtaatcttccttttcacattgttaaagccttaccctaggttcccatttatcttccttagtggatatccattctggggatccgtccttttcattaatagcggagcatttctgatcgccgttaagcggaagacaactgagacgctcatcatcctgagtcgcataatgaattttctcagcgctttgggcgccatcgccgggatcattctcctaacctttggattcattctggaccagaattacatctgcggctactcccatcagaactctcaatgcaaagctgtcacggtcctcttcctggggattcttataacgctgatgaccttcagtattattgaattgttcatcagtcttcccttctccatcttgggctgccactcagaagattgtgactgtgagcagtgctgttag

SEQ ID NO: 194832 - DNA, 747 bp, synthetic construct
  misc_feature 1..747: note = Description of Artificial Sequence: Synthetic coding sequence
  source 1..747: mol_type = other DNA
atgaccagccagcccgtgcccaacgagaccatcatcgtgctgcccagtaatgtaattaatttcagccaagctgagaaacccgagcctactaaccagggccaggattcacttaagaaacacctccacgccgaaattaaagtgatcggaaccatccagatattatgcggcatgatggtcttgtcactgggaatcatcctggcctcagcttcattcagcccaaattttactcaggtcactagcactctcctgaactctgcttacccctttatcggccctttcttcttcatcatcagcggaagcctgagcattgcaaccgaaaagaggctgacaaaactcctggttcactcgtccctggtgggtagcatcctatccgctctctcagccctggttgggtttatcattttaagcgtcaagcaggccacgcttaatcccgcctctcttcagtgcgaacttgacaagaataatattcctacacgtagctacgtcagctatttctaccacgactccttatataccactgactgttatacggctaaagccagtcttgctggcacccttagtctgatgcttatctgtactctgctggaattctgtctcgccgtgctgacagctgtgctacggtggaaacaagcatattctgattttccggggagcgtcttgtttctcccccactcatatatcggcaatagcgggatgtcttcaaagatgacccacgactgtggttatgaagagcttctcacttcgtag

SEQ ID NO: 194833 - DNA, 537 bp, synthetic construct
  misc_feature 1..537: note = Description of Artificial Sequence: Synthetic coding sequence
  source 1..537: mol_type = other DNA
atgaccagccagcccgtgcccaacgagaccatcatcgtgctgcccagcaacgtgatcaatttcagccaggccgaaaaacccgaacctactaaccaagggcaggactcactgaaaaaacacctgcatgccgaaatcaaagtgatcggtactatccaaattttgtgtggcatgatggtgctctccctgggtatcatcttagcttcagcctctttcagtccaaacttcactcaggtgacgagcactctgctcaactctgcgtatccatttattggccctttcttctttattatcagcggctcgctcagcattgctactgagaagcgattaaccaagctgttagtgcattcctcgctggtcggttctattctctcggctcttagtgctttggtaggatttattattcttagcgtgaagcaggctaccttaaaccctgcatccctgcagtggaattcgttatcggatgccgacctccactcagcagggattctgccgtcttgtgcacactgttgcgctgcggttgagaccggcttgctttag

SEQ ID NO: 194834 - DNA, 543 bp, synthetic construct
  misc_feature 1..543: note = Description of Artificial Sequence: Synthetic coding sequence
  source 1..543: mol_type = other DNA
atgaccagccagcccgtgcccaacgagaccatcatcgtgctgccctccaatgttattaatttcagccaggcggaaaaacctgagcccaccaaccagggacaggacagcctaaagaagcatcttcacgctgagataaaagtcatcgggttcataatttccggaagccttagcatcgccacggagaagagacttaccaaattacttgtgcacagcagcctggtgggttccattctatcagcgttgagtgctctcgtgggatttataatcctcagtgtcaagcaggcaacgctcaatcctgcttccctgcagtgcgagctcgataagaataacatacctacaaggagctacgtttcatatttctatcacgacagcctgtatacaacagactgttataccgctaaggcatctctagcaggtaccctctctttaatgcttatctgtacccttctcgagttttgtctggcagttctgacagccgttctgcgttggaagcaagcttactccgactttcccggcgtgagtgtcctggccggattcacttag

SEQ ID NO: 194835 - DNA, 678 bp, synthetic construct
  misc_feature 1..678: note = Description of Artificial Sequence: Synthetic coding sequence
  source 1..678: mol_type = other DNA
atgaccagccagcccgtgcccaacgagaccatcatcgtgctgcccagcaacgtgattaacttcagccaagctgagaaacccgaacctactaaccaagggcaggacagcctgaaaaagcatttgcacgccgaaatcaaagtgattggaacaattcagatcctgtgcggcatgatggtgctgagcttggggatcatcttggcgagcgcttcattctcacccaatttcacccaggttacaagcaccctactcaatagcgcttacccttttataggcccattctttttcattataagcggttctctgtccattgcaacagagaagcgcttgacgaagctgcttgtgcacagctccctcgttggaagtatactcagtgccctgtccgcccttgtgggctttatcatactgagtgtcaagcaggccaccttgaatcctgcctcgctgcagtgcgaattggataagaacaatatcccgacgcgctcctatgtcagttatttttatcacgactccctttataccaccgactgctacaccgctaaggcttccctggctgggacgctatctctgatgttgatctgtactctgctggaattttgcctcgccgtgctgacagccgtgttacgttggaaacaagcgtatagtgattttcccggtgtaagtgtgctggccgggttcacatag

SEQ ID NO: 194836 - DNA, 831 bp, synthetic construct
  misc_feature 1..831: note = Description of Artificial Sequence: Synthetic coding sequence
  source 1..831: mol_type = other DNA
atggtgctgctgaagctgctggaggtgtaccggaagggcagcgccggcacctttcacaagtcaaccattttcggaaataccatcatgacctcacagcccgttcctaatgagaccataatcgtcttgccaagcaatgtaatcaacttctctcaggctgaaaagcctgaaccaactaatcagggtcaggacagtctgaagaaacacctccatgctgaaatcaaagtgattggcactatccagatcctctgcgggatgatggtgctcagcttaggaatcatactggcgagcgcgagcttcagccctaacttcacccaggtgacctccactcttctcaactccgcgtacccattcatcggcccatttttcttcattatctccggttccctcagcatcgctacagagaaaaggctcacaaagctgctggtgcactcttcacttgtcggatcgattttatccgccctttcagccctggtgggtttcattatcctgagtgtaaaacaggcaaccttgaacccggccagtctccagtgtgaattagacaagaataatattccaacccgttcttacgtgagctatttttaccatgacagcttgtataccacagactgctatactgcaaaagcatcactggcaggcaccctgagccttatgctcatctgcaccctcctcgaattctgcctggcagtattgaccgcagtactgagatggaagcaggcttactctgacttccccggttctgtgctgttcctaccgcattcttacatcggcaatagcgggatgagcagtaaaatgactcacgattgcggatacgaagagctcttgactagctag

SEQ ID NO: 194837 - DNA, 747 bp, synthetic construct
  misc_feature 1..747: note = Description of Artificial Sequence: Synthetic coding sequence
  source 1..747: mol_type = other DNA
atgaccagccagcccgtgcccaacgagaccatcatcgtgctgccctccaatgtgattaattttagtcaggccgagaagccagagccgacgaatcagggccaggactccctgaaaaaacaccttcacgccgaaatcaaggttataggcactattcaaattctctgcggtatgatggtgctctctctcgggataattcttgcctccgcaagcttttcccccaactttacccaggtgacttctaccctactaaacagcgcctatccttttatagggccattcttctttattatctccggatctctatcaattgcaaccgagaaacggctgaccaaactcctggtccattcaagcttagtcggctccattctttccgccctgagcgccttagtcggcttcatcattctcagtgttaagcaggccactttgaatcccgcatcacttcaatgtgaactggacaagaacaacattccgaccaggagctatgtatcttacttctatcatgatagtctgtacacgaccgattgttacacagctaaagcatctcttgccggtaccctctctttgatgttgatatgtacattactagagttctgcctcgcggtgctgacagctgttctccgctggaaacaggcatacagcgatttccccgggagtgtcctcttcctgccacattcgtatatcggcaattcgggcatgtcaagtaaaatgactcacgactgcggttacgaggaactcctcaccagctag

SEQ ID NO: 194838 - DNA, 72 bp, synthetic construct
  misc_feature 1..72: note = Description of Artificial Sequence: Synthetic coding sequence
  source 1..72: mol_type = other DNA
atgaccagccagcccgtgcccaacgagaccatcatcgtgctgccctccaacgtaatcaacttcagccaatag

SEQ ID NO: 194839 - DNA, 444 bp, synthetic construct
  misc_feature 1..444: note = Description of Artificial Sequence: Synthetic coding sequence
  source 1..444: mol_type = other DNA
atgaccagccagcccatcagcaacgagaccatcatcatgctgccctccaacgtgatcaactttagtcaagcagagaaaccagaaccgaccaatcagggccaggactcactaaagaaacggcttcaagcaaaagttaaggtgattggcgtgcatagctccctcgcaggctccatcctgtccgctctgtcggccctcgtggggtttattctgttatcagtcaatcccgccgcgttaaatcccgcgtctctgcagtgtaagctggatgagaaggatatccccaccagattgctcctatcttacgattaccactccccttatactatggactgccacagggcaaaggcatccttagctgggaccctctcactcatgctggtgagtaccgtgctggagttctgcctcgccgtgttaactgcagtcctgcagtggaagcagactgtgtag

SEQ ID NO: 194840 - DNA, 723 bp, synthetic construct
  misc_feature 1..723: note = Description of Artificial Sequence: Synthetic coding sequence
  source 1..723: mol_type = other DNA
atgctgctgcagagccagaccatgggcgtgagccacagcttcacccccaaagggatcaccatcccacagcgggaaaagccaggacatatgtatcagaatgaagattatctgcaaaacggactgcctaccgaaacaacggtcctggggaccgttcagatcctttgctgcctcctaatctcttctctcggcgccatcctggtgttcgctccctacccttcccacttcaatccggctattagcaccacgctgatgtctggctatccttttctgggagctttatgctttgggattactggtagcctctctatcatatctggcaagcagtcgaccaagccttttgacctatcctccttgacttctaatgctgtgtcctctgttacagcaggtgccggcctgtttctgctggctgattctatggttgccctgcgaacagcttcacagcactgcggatccgaaatggactaccttagcagccttccgtacagtgagtactattatcctatctacgagatcaaggattgcctccttacatcggtctctctcactggcgttttggtcgttatgcttatttttaccgtcttggagctgctccttgctgcttactcttccgtgttctggtggaagcagctctattctaataacccagggagcagctttagctccactcagtcacaggatcacatccagcaggtgaagaagtccagctctaggtcctggatttag

SEQ ID NO: 194841 - DNA, 588 bp, synthetic construct
  misc_feature 1..588: note = Description of Artificial Sequence: Synthetic coding sequence
  source 1..588: mol_type = other DNA
atgctgctgcagagccagaccatgggcgtgagccacagcttcaccccaaagggcatcaccattcctcagagggaaaagcctggccacatgtaccaaaacgaagattatcttcagaacggcttaccgacagaaacaaccgtcctcgggtttgggatcacgggaagtctgagcatcatatccggaaagcaaagcaccaaacccttcgacctgagcagcctgacaagcaatgcggtgtcttctgtaacggcaggggctggcctgtttttgctagcggatagcatggtggcattgcgcacagcttcacaacactgcggtagcgagatggactatctgagctccttaccgtactccgagtattattatccaatttacgaaataaaagactgtcttctgaccagcgtgtcactaacaggagtgctcgtggtcatgctgatcttcaccgttctcgagctgcttctggccgcctactctagtgtgttctggtggaaacagctgtactcaaataaccctggctcttctttctcaagcactcagtcccaagaccacatccaacaggtgaaaaaatcatcctctagatcttggatctag

SEQ ID NO: 194842 - DNA, 510 bp, synthetic construct
  misc_feature 1..510: note = Description of Artificial Sequence: Synthetic coding sequence
  source 1..510: mol_type = other DNA
atgctgctgcagagccagaccatgggcgtgagccacagcttcacccccaaaggcattacaattccccagcgggaaaaacctgggcacatgtaccagaatgaagactacctgcagaatggcttgccaactgagactacagttctaggattcggcatcaccggatcgttgagcattatttccggcaaacaatctactaagccattcgatctctcatcccttacgagtaatgctgtcagttcagtgacagccggggccggactgtttctgttggcggattcaatggtggctctcaggacagcatcccaacactgcggatcagagatggattatctgtcttcattgccatattccgagtactattatccaatatatgaaatcaaggactgtctgctgacctccgtgtctctgaccggtgtgttagtcgttatgctgatcttcaccgtccttgagcttctcctcgccgcttacagttcagttttctggtggaagcaattgtattccaataactag

SEQ ID NO: 194843 - DNA, 588 bp, synthetic construct
  misc_feature 1..588: note = Description of Artificial Sequence: Synthetic coding sequence
  source 1..588: mol_type = other DNA
atgctgctgcagagccagaccatgggcgtgagccacagcttcaccccgaagggaattaccatcccccagagggaaaagcctgggcacatgtaccagaacgaggactaccttcagaacggccttcctacagagaccacagtactgggttttggcataacaggcagtctctctatcatatctggtaagcagagtaccaagccttttgatctgtccagcctcactagtaacgctgtcagctcagtgactgcaggagccggccttttcctgctcgctgactctatggtagcattgcggaccgccagccagcactgtggctctgaaatggactatttgagctctctaccgtacagtgagtactactacccgatttacgagataaaggactgtctgctgacaagcgtgtcactgaccggtgtcctggtagtgatgctgatctttactgtgctggagctactgctcgctgcttactcttctgtgttttggtggaaacagctttactccaataacccgggttcctccttttccagcacacagtcacaggaccacattcaacaggtaaagaaatctagcagtagatcctggatctag

SEQ ID NO: 194844 - DNA, 753 bp, synthetic construct
  misc_feature 1..753: note = Description of Artificial Sequence: Synthetic coding sequence
  source 1..753: mol_type = other DNA
atgaacagcatgaccagcgccgtgcccgtggccaacagcgtgctggttgttgcaccccataacggctatcccgtgacaccaggaataatgtcccatgtgcccctctatcccaatagtcaaccccaggttcacctggtgcccggtaacccacccagccttgtcagcaacgtgaatgggcagccagtccagaaagcacttaaggagggcaagacgctgggtgccattcagattatcataggtctggcgcacatcggcctcgggagcataatggccaccgttttggtgggggagtacctctccataagtttttacggcggcttccctttctggggtgggctgtggtttatcatctctggtagcctgtcggtcgcagctgagaaccaaccctacagctactgtcttttaagtggtagcctcggtttaaacatcgtgtcagcgatctgtagcgctgtcggagtgattttattcataacagacctgtcaattccccatccttacgcgtacccagactattacccatacgcatggggggtcaatcccggcatggctatctcaggagttttgctggtattctgtctactagaattcggcatagcatgtgccagtagccatttcggttgccaacttgtctgctgccagtcctctaatgtgagtgtcatctaccctaatatctacgccgcaaacccggtcatcaccccagagccggttacatccccaccctcctatagctctgagatccaagcaaataaatag

SEQ ID NO: 194845 - DNA, 2550 bp, synthetic construct
  misc_feature 1..2550: note = Description of Artificial Sequence: Synthetic coding sequence
  source 1..2550: mol_type = other DNA
atggtgcagaaggagagccaggccaccctggaggagcgggagagcgaactgtcctctaatcctgccgcctcagccggggcctcactggagccacccgccgcgcccgcgcccggcgaggataatcccgctggtgctggaggggccgccgtggcaggggcggccggaggcgcacgccgcttcctgtgcggcgtggtcgagggcttttatggaaggccctgggtcatggagcagcgaaaagaactcttccgtcggctgcagaaatgggaactcaacacttatctctatgcgccaaaggatgactataagcaccgaatgttttggagggagatgtacagcgtggaggaggccgagcagctcatgacgttgatatctgctgcgcgggagtacgagatagagtttatttacgcgatctctccgggcctggatattacctttagcaatccaaaggaggttagtacactgaaacggaaactggatcaggtatcccagtttggttgccggtcatttgccctgttatttgatgatatcgatcataacatgtgcgccgcggataaagaggtttttagtagctttgctcacgctcaagtgtcaatcacaaacgaaatttatcagtatctcggggaacccgaaacgttcctgttctgccctaccgaatactgcggcacattctgctaccccaatgttagccagagcccatacctgcgcacagtgggggagaagttgctgcctgggatagaagtgttgtggaccggccccaaagtggtgtccaaagaaatccccgtcgagtctattgaagaggtcagtaagattatcaaacgagcccccgttatttgggacaatattcacgccaacgactacgaccaaaagcggcttttccttggtccctacaaagggaggtcaaccgagcttatccctcgcctgaagggagttctcaccaatccaaactgtgagttcgaggctaattatgtcgctatccacactctggctacatggtacaaaagcaacatgaacggagtccgcaaggacgtggtgatgtcgcgtcaggtagcacactcaggcgccaaagcttcagtggtcgacggcacgcctctggtggccgccccctctctgaacgccactactgtggtgacgaccgtttaccaagagccaattatgtcccagggggccgctctgagcggagaacctaccactctgaccaaggaggaggaaaaaaagcaacccgatgaggaaccaatggacatggtcgttgagaagcaggaagaaacagatcataagaacgacaatcagatcctgagcgaaatcgtggaggccaaaatggcggaggagcttaagcctatggacaccgacaaagagtcgatcgctgagtccaaaagtcctgagatgtcgatgcaggaggactgcatctctgatatcgctcctatgcaaactgacgagcagactaacaaggagcaattcgtacccggtcctaatgaaaagccactgtacacagcggagcccgtaacattagaggacctgcagcttctcgccgacctgttttatcttccttacgagcacggtcccaagggcgctcaaatgctcagagagtttcagtggctgcgagcaaactcctccgtagtctctgtgaactgtaagggaaaagattctgagaagatagaggagtggaggagccgggccgccaaattcgaagagatgtgtggattggtcatgggtatgttcacaaggctatctaattgcgccaatcgtaccatcttgtatgatatgtactcgtatgtgtgggatattaagtctattatgtccatggtcaaatccttcgtacaatggctgggatgtagatcccacagctctgcccagttcctgatcggcgatcaggaaccatgggccttcagaggcggcctggcaggtgagttccagccaccccctcttacgccaactagcaaagtgtatacgatcaggccatatttccccaaggacgaagcatccgtttataagatctgccgagagatgtacgacgatggggtgggcctgccttttcagagtcagcctgatcttatcggagataaactggttggaggtctgttgagccttagcctcgattactgctttgtccttgaggatgaggacggtatctgtgggtatgccctgggcactgtggatgtgactccatttattaagaagtgcaagatctcctggatcccatttatgcaagaaaagtatacgaaacctaacggggataaggagttatctgaggccgagaaaataatgctcagttttcacgaggaacaggaggtgctccccgagacttttttggccaatttcccctccctgatcaagatggacatacacaagaaagtgaccgatccctctgttgccaaatcgatgatggcctgtctgctgagcagtttaaaggcaaatgggtccagaggtgctttctgcgaggtgcgcccagatgataagcggatactcgagttctacagtaagttgggctgctttgagatcgcaaagatggagggctttccaaaggacgtggtgatcctcggaagatccctgtag

SEQ ID NO: 194846 - DNA, 2751 bp, synthetic construct
  misc_feature 1..2751: note = Description of Artificial Sequence: Synthetic coding sequence
  source 1..2751: mol_type = other DNA
atggtgcagaaggagagccaggccaccctggaggagcgggagagcgagttgtctagcaatccagctgcctccgcgggggcaagcctcgaacctcccgcagcgcctgccccaggagaagacaaccctgccggagctggcggtgcagccgttgccggcgctgccgggggggcccgccgcttcctctgcggggtggtggaaggcttctacgggcggccttgggtaatggaacagcggaaggagttattcagaaggcttcagaaatgggaactaaatacctacctctacgctccaaaggacgactacaaacacagaatgttctggagggaaatgtattctgttgaagaggcagagcagttaatgacactgataagtgcagcgagagaatatgaaatcgagttcatttacgctatatccccaggactcgatattactttctcaaatccaaaagaggtcagtacattaaaacgcaaactcgaccaggtcagccagtttggatgtcgtagttttgccctgctgttcgatgatattgatcataacatgtgcgctgctgacaaggaggtcttttcaagtttcgcccacgcgcaggtttcaatcacaaacgaaatttaccaatatctgggggaaccagagacattccttttttgcccgacagagtattgtggtaccttctgctatcccaatgtctcgcagagtccttatcttaggacagtcggagagaagctcttgcctggcatcgaagtcttgtggaccggacctaaagtggtgagtaaggagatccccgtcgaaagcatagaggaggtcagcaagattattaaaagggccccagttatttgggacaacatccacgctaatgactatgaccagaaaagactttttctgggtccttataagggccgaagcactgagttaattcctcggctgaaaggggttctcaccaatcccaactgtgaattcgaagccaactacgtcgccatccacactctggccacatggtacaaatccaacatgaatggggtgcgcaaggacgtagtgatgaccgacagcgaagattcaactgtctctatccaaatcaaactggagaatgagggtagcgacgaggatatcgagacagacgtgctatattccccccagatggctctgaagttggcgcttaccgagtggctccaggagtttggcgtcccccaccaatatagctcccgccaggtggcgcactctggcgctaaagcaagcgttgtggatgggacccccctagtcgcagccccctctctgaatgctacaactgtcgtaacaacagtttatcaagagcccattatgagtcagggtgctgccttaagcggggagcccactacactcacaaaggaagaagagaaaaaacagcccgacgaggaacccatggacatggtggtggagaagcaggaggagaccgaccacaagaatgacaaccagatcctgtccgagattgttgaggctaagatggcagaggaattgaagcccatggatactgataaagagtccattgcggagagtaagagtcccgaaatgagcatgcaagaggattgcatttcagatatcgccccgatgcagacagatgagcagaccaacaaggaacaatttgtgcccgggcccaacgagaagccactgtacactgcagagcccgtgacactcgaagatcttcagcttttggctgaccttttttatttgccatacgaacacggacctaagggggctcagatgctacgggagttccagtggcttcgagctaatagcagtgttgtaagcgtcaattgcaaggggaaagacagcgagaaaattgaggagtggagaagccgagcggccaagttcgaagaaatgtgtgggctggtgatggggatgttcacccgcctttccaactgtgcgaatcggaccatcctttacgatatgtactcatacgtctgggatattaagagcatcatgtccatggtaaaatcttttgtgcagtggctgggatgtcggtctcatagctccgcccagtttctgattggcgaccaggagccctgggcatttaggggcgggttggcgggcgagttccagaggctgctaccaattgacggtgcgaacgacctgttcttccagcctccccccctgaccccaaccagcaaggtttataccattcggccatatttcccaaaagacgaggccagtgtgtacaagatttgtcgggagatgtatgacgacggggtagggctgccgttccagagccaaccggacttaattggcgataaattggtcggtggtttgctatccctgtccctggactattgtttcgtgttggaggacgaggatggcatctgtggttacgccctcggcactgtggacgtgaccccctttatcaagaagtgtaagatatcttggatccctttcatgcaggagaaatacacgaaacccaatggcgataaggaactgtctgaggccgagaagatcatgttaagtttccatgaagaacaggaggtacttcccgagacctttctggccaacttccccagtctaattaaaatggacattcataagaaagtaactgacccatcggttgctaagtctatgatggcgtgtctactgtcctcattaaaagcaaacggctcaagaggcgcgttctgtgaagtcaggcctgacgataagcggattctagagttttactccaaactgggctgcttcgagattgccaagatggaaggcttccccaaagacgtagtgatcctcggacgatcattgtag

SEQ ID NO: 194847 - DNA, 2034 bp, synthetic construct
  misc_feature 1..2034: note = Description of Artificial Sequence: Synthetic coding sequence
  source 1..2034: mol_type = other DNA
atggtgcagaaggagagccaggccaccctggaggagcgggagagcgaactcagctctaatccagccgcatcagccggcgcgtcactggagccccccgctgcaccagcccctggcgaggacaatcctgccggtgcgggtggagccgcagttgctggagctgcgggaggtgccagaagatttctgtgtggggttgtggagggattctacggaaggccttgggtgatggaacaacgcaaagagttgtttcggcgcctgcagaaatgggagttaaacacctacctgtatgctccaaaggacgactataagcacaggatgttctggagagagatgtacagtgtggaagaggccgaacagctgatgaccttgatctctgcagcgcgggaatatgagatcgagtttatctatgcaatcagtcccggtctggatatcacattttcgaacccaaaggaagttagtactttaaagaggaagctggaccaggtcagtcaatttggctgccggtcttttgcccttctgttcgatgacattgaccataatatgtgcgcggcagacaaagaagtattctcatccttcgcccatgcacaggtgtccattaccaatgaaatctatcagtacctgggcgagcccgagacctttctgttctgcccaaccgaatattgtggcaccttctgctatcctaacgtctcacagagcccgtatctccgcacagtgggcgaaaaactgctgccaggtatcgaggtcctgtggacagggcctaaggtcgtaagcaaggagatcccagtggaatctatcgaggaggtgagtaagatcattaagcgcgcacctgtgatttgggataacattcacgcgaatgactacgatcagaaaagactcttcctgggcccatataaaggccggtccaccgagctgatcccccgacttaaaggagtgctcacgaacccaaattgcgagttcgaggctaattacgtcgctatacacaccctggcaacctggtacaagagcaatatgaatggagtgagaaaggacgtagtgatgactgactctgaggactcaactgtgagcattcagattaaactggagaatgaaggaagcgatgaggacattgagacagatgtgctttatagcccacagatggctctgaaactcgcacttaccgagtggctgcaggagttcggggtgcctcaccagtactcctccagacaggttgcccactccggagcaaaggcgtcagtggtcgatggcacaccacttgtggctgcaccaagtctcaatgcaacaactgtagtgacaacggtttatcaggagccaataatgagtcagggagccgccctgtcaggagagccaaccaccttgacaaaggaggaggaaaagaaacagcccgacgaagagccaatggatatggtcgtggaaaaacaggaggaaacagaccataagaacgataaccagattctttccgagattgtggaggcgaaaatggcggaggagcttaaaccaatggataccgataaggagtctatcgctgagtctaagagcccagagatgagtatgcaggaggactgtatcagcgacatcgcaccgatgcaaactgatgaacagactaataaagagcagtttgtgcctgggccgaatgaaaagcccctctacactgctgaacccgttacactggaagacctacagctgcttgccgacctgttttatcttccctatgaacacgggccgaagggtgctcaaatgctgcgggaatttcagtggctgcgcgcaaacagcagcgttgtaagcgtgaactgcaaagggaaagatagcgaaaagattgaagagtggcgcagccgcgccgccaagtttgaagagatgtgcggcctggtgatggggatgtttactagactgtctaactgtgctaacagaacaatcctgtatgacatgtattcttacgtgtgggatatcaagtctataatgtctatggtgaagagcttcgtccagtggctgggtcgctgtacccgtaacaatcttttctcatcaaacattctgtctttgtag

SEQ ID NO: 194848 - DNA, 456 bp, synthetic construct
  misc_feature 1..456: note = Description of Artificial Sequence: Synthetic coding sequence
  source 1..456: mol_type = other DNA
atggtgcagaaggagagccaggccaccctggaggagcgggagagcgagctctcttccaatcccgccgcgtctgccggtgcttccctggaaccccccgcggcacccgctcctggtgaagacaaccccgcgggagcaggtggcgctgcggttgctggcgctgccgggggggcgcggaggtttctctgtggagtggtggagggattctatggtagaccttgggtgatggagcagcgcaaagaactttttaggagactgcagaaatgggagctcaacacctacttatatgctccaaaggacgactacaagcataggatgttttggcgggagatgtactcagtggaggaggccgggagcttcttgtttttctacttggtaacaatacagctggctgaaattgagcgtgtactttgcgccagcaaggtgatgactatttgtgtgatttcctgggcatgttag

SEQ ID NO: 194849 - DNA, 771 bp, synthetic construct
  misc_feature 1..771: note = Description of Artificial Sequence: Synthetic coding sequence
  source 1..771: mol_type = other DNA
gccgccggcggcgcccggcggttcctgtgcggcgtggtggagggcttctacgggaggccttgggtgatggagcagcggaaggaattgtttcggcggctccagaagtgggaattgaatacatatttgtacgcgcctaaagatgattataagcataggatgttctggcgggagatgtattcagtcgaagaggctgaacaactgatgaccctgatttctgcagcccgcgagtacgaaattgagtttatctatgccattagccctggcttggacataaccttctctaatccgaaggaggtgtctactctgaagaggaaactggaccaggtcagccagttcggctgccgaagcttcgccctgctgttcgacgacatcgaccacaatatgtgtgcagctgacaaggaagtgtttagttcctttgctcacgctcaggtaagtataaccaacgagatatatcaatatcttggagagcccgagacattccttttttgtcccacaggacccaaggtggtgagcaaagaaattcccgtggagagcattgaagaagtttccaagattataaaacgcgcccctgttatttgggataatatccacgccaacgactatgaccagaagaggctgttcttagggccctacaagggacggtctacggaactgattccacggttaaaaggagtcctgacaaatccgaactgtgaatttgaagctaactacgtggccattcacacattggccacttggtacaagtcaaacatgaatggggtacggaagtag

SEQ ID NO: 194850 - DNA, 2592 bp, synthetic construct
  misc_feature 1..2592: note = Description of Artificial Sequence: Synthetic coding sequence
  source 1..2592: mol_type = other DNA
atggtgcagaaggagagccaggccaccctggaggagcgggagagcgaactgtcctccaatcctgccgccagtgcaggcgctagtctcgagccgcctgccgcgcctgcacctggcgaagacaaccctgccggagccggtggggcagcggtcgcaggagccgccggcggagctaggcgatttctgtgcggtgtggtcgagggcttttacgggagaccctgggttatggagcagcggaaagagctgtttcgaagattgcagaaatgggaactgaatacatacctttacgcacccaaagacgactacaaacacaggatgttctggagagagatgtattctgtagaggaggcagagcagctcatgactttgataagtgctgcaagagagtatgagattgaatttatatatgcgattagtccaggtctcgacattacgttttcaaacccgaaagaggtcagtactctcaaaagaaagctggatcaggtctctcaattcgggtgccggtcgtttgctttgctgtttgacgatattgatcacaatatgtgcgctgcagacaaggaggtcttctcgtccttcgcccacgcccaggtgagtattacaaacgagatctatcagtatctgggggagcccgagacctttctgttttgccccactgaatactgtgggacattctgttatccaaatgtgagtcaatcaccatatctccggaccgtgggcgagaagctcctgccgggcatcgaagttctgtggactgggcccaaggttgtgtcgaaagagattcccgtcgagagtatagaggaagtttctaagattattaagcgagcaccagtgatctgggataatatccatgccaacgattacgatcagaaacgcctgttcctgggcccttacaagggcagatccactgagttaatccctcgtctgaaaggtgtgctgacaaaccccaattgtgaattcgaagctaattatgtcgcaattcatacactggctacttggtataagtctaacatgaatggcgtgagaaaggatgttgttatgtcgcggcaagtggcacactcaggggcgaaggcttctgtggtggacggtacgccactggtggctgccccgtctctaaacgctacaacagtcgtcaccaccgtgtatcaggaaccgatcatgtctcagggagcggccttaagcggggaacccaccaccctgaccaaggaagaagagaaaaagcagccggacgaggagcctatggatatggtcgtggaaaaacaagaagagactgatcataagaacgacaatcagatcttgtccgagattgttgaagccaagatggcggaggagctgaagccaatggacacagataaggagtctattgccgagagcaagtcacctgaaatgagcatgcaggaggattgtatcagcgacatcgcccccatgcagaccgacgaacagaccaataaggagcagttcgtgcccggacccaacgagaagcctttatataccgcagagcctgtcaccctggaggacttgcagcttttggcggacctgttttacttaccttatgagcacggccccaagggcgctcaaatgctgcgtgagttccagtggctccgggccaatagttccgtggtgagtgtaaactgtaagggtaaggattccgagaagatagaggaatggcggtcaagagcagccaagttcgaggagatgtgcggacttgtgatgggcatgttcacaagactgtccaactgtgccaatcgtacgattctgtacgatatgtatagttatgtctgggacattaagagtataatgagcatggtgaagtctttcgttcagtggctaggctgtcggtctcatagcagcgcccagttcctcatcggtgaccaggagccttgggccttccggggtggtcttgcaggcgaatttcagcgcttattgccaattgacggcgccaatgaccttttttttcagcccccaccgttaacgccgaccagcaaagtgtatacgatacgtccctactttcccaaggacgaggcttccgtttataagatatgtcgggagatgtacgatgacggggtaggactgccttttcagtcgcagcccgatctgattggcgacaaactcgtaggaggtctgctcagtctgagtcttgactattgtttcgtcctggaggacgaagacggcatttgcggttatgccctcggtacagtcgacgtgacaccattcattaaaaaatgtaaaatatcgtggattcccttcatgcaagaaaagtatactaagccgaacggagataaagagctttcagaggccgagaagatcatgctgagttttcacgaggagcaggaggtgctccccgagactttcctagctaatttccctagtctgatcaaaatggacatacacaaaaaggttacagacccatccgtggctaagagcatgatggcgtgcctcctaagcagtctgaaggccaacggttcgagaggggccttttgcgaagtccggcctgatgacaaacggattctggagttttactcaaagctgggctgctttgagatcgccaaaatggaggggttccccaaggacgtggtgattctcggacgatcactgtag

SEQ ID NO: 194851 - DNA, 1545 bp, synthetic construct
  misc_feature 1..1545: note = Description of Artificial Sequence: Synthetic coding sequence
  source 1..1545: mol_type = other DNA
atggccgtgtggctggcccagtggctgggccccctgctgctggtgagtttatggggccttttggcgcctgcctccctgttgcggaggttgggcgagcacattcagcagttccaggagtcgagtgcccaggggctgggtctcagcctggggcccggtgccgctgcactccccaaagtcggatggctggagcagttgctggatccatttaacgtgagcgaccggcgctcttttctgcagcgctactgggtcaacgatcagcactgggtaggacaggatggcccgatttttttacaccttggaggcgagggatccctaggacccggttccgtgatgaggggacacccggcagcactggcccctgcctggggcgctttggtaataagcctcgaacatcgattttatggcttatccatacctgccggaggcctggagatggcacagttgaggtttttgagcagtcggctggcattggcagacgtggtgtccgcgcgattggccctgtcaagactttttaatatcagcagctcctctccttggatctgctttggcggctcttatgccgggagcctggccgcatgggctagactaaagtttcctcacctgatctttgcctcagtggcgtcctccgccccagttagagccgtactcgacttttctgaatacaatgatgtggtgtcaaggtccctcatgtctacggcaattggcgggagtctggagtgtcgtgccgcagtgtccgtggccttcgctgaggtggagcgacgattacgttcagggggtgccgctcaagccgcactgagaacagagctgagcgcctgtggcccactggggcgggctgagaaccaggccgaattgctgggtgctctccaggctctggtcgggggcgtggtgcagtacgacgggcaaacgggcgctccactctccgtccggcaactgtgcggccttctgctgggaggaggcggcaacaggtcgcacagcaccccttattgtgggctgcggcgggcagtgcagatcgttttgcatagcctcggccagaagtgcctgtcgttctcccgcgctgaaacagttgcccagctccgaagtacagagccgcagctctctggagtgggtgatcggcagtggctctaccagacctgtacggaattcggcttttacgtcacttgtgagaacccgcgttgtcccttctctcagttgcctgctctgccatcacagctcgatctttgtgagcaggtttttgggctgagtgcactgtccgtcgcacaggccgtcgcccagactaactcctattatgggggacagactcctggcgccaataaggtgctgtttgtgaatggtgacaccgacccatggcatgtcttgtcggtgacacaggctctaggttctagtgagagcaccctgctaattcgcaccgggagccactgcctggacatggcccctgagaggccatccgatagccccagcttacggctaggacgacagaatattttccagcagctgcagacctggctcaaattggccaaagagagccaaatcaaaggcgaggtatag

SEQ ID NO: 194852 - DNA, 2106 bp, synthetic construct
  misc_feature 1..2106: note = Description of Artificial Sequence: Synthetic coding sequence
  source 1..2106: mol_type = other DNA
atggacctgtggaacctgagctggttcctgttcctggacgccctgctggtaatcagcgggctggctacccccgagaattttgacgtggacggcggaatggaccaggacatcttcgatatcaacgaaggcttaggactcgatctttttgaaggcgatattcggctggacagggcgcagattagaaacagcattattggggagaagtatcgctggccccataccatcccgtatgtgttagaagactccctagagatgaatgccaagggggtgatactgaacgcatttgagcgctacagactaaaaacttgcatcgacttcaagccctgggctggggagactaactacatttctgtgttcaaaggaagtggctgctggagtagtgtgggaaacagacgggtgggaaaacaggagttatctataggtgcaaactgcgaccggattgccaccgtccagcacgagttccttcacgcgctgggcttctggcatgagcaaagtagaagcgaccgcgatgactacgtgcggatcatgtgggatcgaattctcagcgggcgggaacataattttaatacctactccgacgatatctccgacagtctgaacgtcccatatgattacacttccgtcatgcactatagtaagactgcctttcagaatggtacagagccaaccatcgtgacgcgaatttccgacttcgaggacgtcatagggcagagaatggacttttccgacagtgatttgctcaagctcaaccagctgtataactgctcgagcagtctgtcatttatggattcatgctcctttgaactggaaaatgtgtgcggtatgattcagtcttcaggtgacaatgccgactggcaacgggtgtctcaggtgccccggggccccgagtccgatcattccaacatgggtcagtgtcagggcagcggttttttcatgcattttgattcctccagcgtcaatgtgggcgccaccgccgttctggagagccgcaccctgtacccaaagaggggcttccagtgcttgcaattctacttgtacaattccgggagtgagagcgatcagctgaatatctacataagggagtactccgccgataacgtagatggtaacctgacgttggttgaggagatcaaggagatcccaacgggttcttggcagctgtatcatgtaactcttaaggttactaaaaaatttcgcgtagtcttcgaagggagaaagggatcaggggcttccctcgggggactcagcatagacgatattaatttgagcgagactaggtgcccacaccacatatggcacatccgcaactttacccagtttattgggtctcctaacggaactctttactcccctccattttactccagcaaaggatatgctttccagatttaccttaatctggcccatgtgactaacgccggtatctattttcatctgatttccggggccaacgatgatcagctacagtggccttgtccttggcagcaagcaacaatgactctgctcgatcagaatccggacattcgtcagcgcatgtctaatcaaaggtccattacaacagacccatttatgacaactgataacggcaactacttttgggacagaccaagtaaggtggggacagttgcactgttctctaacggcacccagttccgcagaggtggaggctacgggacttctgcgttcataacccatgaaaggctgaaatcacgtgactttatcaaaggtgacgacgtgtacattctgcttactgtggaagatatttcacaccttaatagtacccagatacaactgactcctgcccccagtgtccaggatctctgctctaagaccacatgtaaaaatgatggtgtatgcaccgtgagggacggcaaagccgaatgcaggtgccagtccggagaagattggtggtacatgggagagcgctgtgaaaagcgagggagcacaagagacactattgtcatcgctgtaagtagcaccgttgcggtcttcgccctgatgctcataattacactggtctccgtctactgcacccgtaagaaatatcgggagcgtatgtcatccaacagaccgaatctgacaccccagaaccaacacgccttttag

SEQ ID NO: 194853 - DNA, 894 bp, synthetic construct
  misc_feature 1..894: note = Description of Artificial Sequence: Synthetic coding sequence
  source 1..894: mol_type = other DNA
atggccagcccccagctgtgccgggccctggtgagcgcccagtgggttgctgaagctctgcgagcgccacgggccggccagcccctacagctgctggacgccagctggtatctcccgaaactgggccgcgacgctcggagagaatttgaggaaaggcatatccccggggctgccttcttcgacatagaccaatgcagtgatcgaaccagcccatacgatcacatgctcccaggggcagagcattttgcggaatatgccggtcgcctgggagtaggagctgctactcatgtggtgatatatgatgcctcagatcagggcctctatagcgccccacgggtgtggtggatgtttcgtgcctttggtcatcacgccgtatccctactggacggtgggctgaggcattggctgcggcaaaatctccccctctcctctgggaagtcacagcccgctccagctgagttcagggcccaactagatccggccttcatcaagacctatgaagatataaaagaaaatctcgagtcacggagatttcaggtagtcgattctagggcaaccgggcgtttccgaggaactgaacctgagccccgcgacgggattgagccaggccacatcccggggaccgtgaatatacctttcacggactttctctcacaggaagggctggagaaatccccagaggaaataagacacctcttccaggagaagaaagtcgacctgtccaaacctctcgtggcaacctgtggctccggggttaccgcttgtcatgtagccctcggggcttacttgtgtggcaagcccgacgtgccaatctatgacggaagctgggtagaatggtacatgcgggcccgacccgaggatgtgatttccgagggcaggggcaaaacccactag

SEQ ID NO: 194854 - DNA, 954 bp, synthetic construct
  misc_feature 1..954: note = Description of Artificial Sequence: Synthetic coding sequence
  source 1..954: mol_type = other DNA
atggccgagcccggcagccgggagagcgagacccgggcccggagccccagcgtggcagcgatggcctcccctcagctctgtcgggccctggtcagcgctcaatgggtggcagaagcactacgagcccctagggcaggccagcctctccagcttctggacgccagctggtacctgccaaaactcgggcgcgatgctcgccgtgagttcgaagagagacacatccccggcgcagcatttttcgacatagaccagtgctccgataggacatccccgtacgaccatatgctgcctggggcagaacacttcgctgagtacgcggggcggctcggcgtaggtgcggctacccacgtagtgatatacgacgcatcggaccagggactgtattcggcccccagagtgtggtggatgttcagagcgttcggtcaccacgctgtgagccttctggatgggggccttagacactggctgaggcagaatctgccgctgtcctctgggaagtcgcagcctgcccccgccgaattccgggcgcagctcgatccggcatttattaaaacctacgaggacatcaaagagaatctcgagtcccgccgctttcaagttgtcgatagccgggccaccggcaggttccgggggacggaacctgagcctcgtgatggcatagaaccagggcacatcccaggaactgtgaatatccctttcaccgatttccttagccaggaaggcctggagaagtcgccggaggagatcaggcatctgttccaggagaagaaagttgacctttccaagcctctggtggccacgtgtggttcgggcgtcacggcttgccacgtggccctgggagcgtacctgtgcggcaagccggacgttcctatttacgatggctcatgggttgagtggtacatgagagcaaggcccgaggacgtgatcagtgagggaagaggcaaaacacattag

SEQ ID NO: 194855 - DNA, 894 bp, synthetic construct
  misc_feature 1..894: note = Description of Artificial Sequence: Synthetic coding sequence
  source 1..894: mol_type = other DNA
atggccagcccccagctgtgccgggccctggtgagcgcccagtgggtggcagaggctctgagggcaccgcgggccggtcagcctttacagctgttggatgcctcttggtacctcccaaaactggggagagatgctcgacgggagttcgaggagcggcatattccaggggccgctttcttcgacattgaccagtgttcagatcgaacctctccctatgatcacatgcttccaggcgctgagcacttcgcggagtatgctggccgtctgggggttggtgccgccacccatgttgtgatttatgatgcctctgaccagggcttgtattcagctccacgcgtctggtggatgtttcgcgcttttggccaccacgccgtgagcctattggatggcggcttgcgccactggctgagacagaatctgccactgtcgtcaggtaaatcacaaccagccccggctgaatttcgcgctcagctggatcccgccttcatcaaaacctacgaggacatcaaagagaatcttgagagccgccgattccaggtggtggactctcgagccacaggccgcttccggggtacggaaccagaacccagggacgggattgaacctggtcacatccctggaacagtgaatatcccatttacggacttcctctcccaggagggcctcgaaaagagcccagaagagataaggcatttgttccaggaaaagaaggtcgacttgagcaaacctcttgtggctacttgtggctccggcgttacagcttgccatgtggcacttggcgcatacctgtgcggaaaaccagatgtccccatctacgacgggtcctgggtggagtggtacatgcgcgcccgccccgaggacgtgattagcgagggccgaggtaagacacactag

SEQ ID NO: 194856 - DNA, 894 bp, synthetic construct
  misc_feature 1..894: note = Description of Artificial Sequence: Synthetic coding sequence
  source 1..894: mol_type = other DNA
atggccagcccccagctgtgccgggccctggtgagcgcccagtgggttgcagaagccttgagggccccccgagccggccagcctctgcaattactggatgcttcctggtatctgcctaagctgggccgcgacgcgagacgtgagtttgaagagcgccatatcccaggcgccgctttctttgacatcgaccagtgctctgacaggacctccccatatgaccacatgctgcccggagccgaacacttcgctgaatacgctggacggcttggcgtgggcgctgccacacatgtcgtcatctatgacgccagtgaccaggggctatattctgcaccccgcgtatggtggatgtttcgcgcatttggccaccatgcagtctcccttcttgatggaggtctgagacactggttgcggcagaatctgccgctgtctagtggcaagtcccaacccgccccggccgaattccgggcccaattggatccagcttttattaagacctatgaagatatcaaggagaatctcgagagccggcgatttcaggtcgtggacagccgggctacgggaagatttcggggcactgaacccgaaccccgggacggaatcgaaccaggccacatacccggcacggtaaatattccttttactgacttcctgtcccaggaaggcctcgagaagtcgcctgaggagatcagacatctctttcaggaaaagaaggtggatttgagtaagccgttagtcgccacctgtggatccggcgtcactgcgtgccatgtggcacttggcgcctatctgtgcggtaaacccgatgtccctatttatgacggctcctgggtggaatggtatatgagagcacgacctgaagatgtcatctccgagggccgcgggaaaacccattag

SEQ ID NO: 194857 - DNA, 894 bp, synthetic construct
  misc_feature 1..894: note = Description of Artificial Sequence: Synthetic coding sequence
  source 1..894: mol_type = other DNA
atggccagcccccagctgtgccgggccctggtgagcgcccagtgggtggctgaagcactgcgggctccaagagctggacagccactgcagcttttagacgcttcttggtacctgccaaagctgggacgggatgccagacgggagttcgaggagagacacatcccaggcgcagccttctttgacattgaccaatgctcagacaggacctccccatacgatcacatgctacccggggcagagcattttgctgagtatgccggcaggttgggagtcggcgccgcgacacacgtggtaatatacgatgcaagcgatcagggcctttacagtgccccccgagtgtggtggatgtttcgcgcgttcggacatcacgccgtgagtttgctcgacgggggcctgaggcactggctacgccagaatctcccactttcctctgggaaatcccaaccggcccccgctgagtttcgcgcccagttggaccccgctttcatcaagacatatgaggatataaaagaaaatctggagtccagacgattccaggtcgtcgactcccgagcgactgggcgatttcgcggaaccgaacccgaacctcgggatggtattgagccgggtcacatccctggaaccgtgaacatccccttcacagattttttgagccaggaagggctcgaaaagtcccccgaagagatcagacatttgtttcaggagaagaaagtagacctcagcaagccccttgtcgcaacctgtgggagcggggtgactgcctgccacgtggccttaggcgcctatttgtgtggcaaacccgatgtgcccatatacgatggtagttgggtcgaatggtacatgagggcccggcctgaggacgtaatcagtgaaggacggggcaagacccattag

SEQ ID NO: 194858 - DNA, 894 bp, synthetic construct
  misc_feature 1..894: note = Description of Artificial Sequence: Synthetic coding sequence
  source 1..894: mol_type = other DNA
atggccagcccccagctgtgccgggccctggtgagcgcccagtgggtggcagaggccctgcgcgctccccgtgccggacagccattacagctcttggatgcaagctggtatctcccaaagctgggccgtgatgcccgtcgggaatttgaagagaggcacattcctggggccgctttttttgacatagaccagtgctcggataggactagcccctacgatcatatgttaccaggcgctgagcacttcgctgagtatgccggcaggttgggggtaggggctgccactcatgtcgttatctatgatgcctccgaccaggggctgtatagtgcccctcgggtgtggtggatgtttcgggccttcggtcaccatgctgtttccctgttggatgggggcttgaggcattggcttaggcagaatctccccctgagtagcggcaagtcccagccagcccctgcagaattccgggctcaactggaccccgcctttatcaagacatacgaggatataaaggagaatctagaatcacggcgtttccaggtcgtggattcaagagctacaggcagatttagaggcacggaacctgaaccaagggacgggattgaaccaggacacattccaggtactgtgaacatccccttcactgattttctgtcccaggagggtctggaaaagtcccccgaggagattcgacacctatttcaggagaaaaaagtggatctatccaagcccttagtggcaacatgcggcagtggagtaacagcttgccatgttgccctaggcgcatatttatgcggcaagcccgatgtgccaatttatgatggaagctgggttgagtggtatatgagagcccggccagaggacgtgatctccgaggggcgcggaaagactcattag

SEQ ID NO: 194859 - DNA, 738 bp, synthetic construct
  misc_feature 1..738: note = Description of Artificial Sequence: Synthetic coding sequence
  source 1..738: mol_type = other DNA
atggccagcccccagctgtgccgggccctggtgagcgcccagtgggtcgctgaagccctaagagcacctagggctggacagccgctgcagctgttggacgccagctggtatcttccaaagctagggcgggacgctagacgagagttcgaggaacgccacatcccgggcgcggccttcttcgacatcgaccagtgcagcgatcgaaccagcccttacgatcatatgctgccgggcgcggagcactttgctgagtacgcaggacgcctgggcgtgggggccgcgacgcacgtcgttatctatgatgcgagtgatcaaggcctgtattcagcacctcgagtctggtggatgttcagagcgtttggccatcatgccgtgagtctgctcgacgggggactcaggcattggctgagacagaacctgcccctttctagtggcaagtcgcagcctgcccctgccgagtttagagcccaattagatcccgcttttattaaaacctacgaagatatcaaggagaacctggagtcgcgcaggtttcaggtggtggacagccgagcaacaggcagatttaggggtaccgagccagaacctcccgctgtcgggatcgagcccgggcacattcccggcacagtgaacatccccttcactgacttcttgtctcaagatggaagctgggtggaatggtacatgcgcgctcgacctgaggacgtgataagtgagggcagaggaaaaactcactag

SEQ ID NO: 194860 - DNA, 765 bp, synthetic construct
  misc_feature 1..765: note = Description of Artificial Sequence: Synthetic coding sequence
  source 1..765: mol_type = other DNA
atggaccccgccgccagcagctgcatgcggagcctgcagccccccgcaccagtttgggggtgtctgcggaacccacattcggagggaaatggggcatctgggctaccgcactatcctcctactccattctcatttcaccagaagcccgactttcttgctacggccaccgctgcctatcccgattttagcgccagttgcctggcggctactccccactccctgccacaggaagagcatatttttactgaacaacatccagcctttcctcagtcacctaactggcacttccctgtttccgatgcccgcagaaggccgaattctggccccgctggcggatctaaggaaatgggaacaagctcactcggcctggtcgatacgaccgggggacccggcgacgactacggagttctgggcagtacggccaacgagacagaaaaaaagtcttcaaggcggcgcaaggagtctagtgataatcaagaaaatagggggaagcctgaagggtctagcaaagcaaggaaggagaggactgcctttacaaaggaacagttgagggagttggaggcagagttcgcccatcataattatctcactcgcctgcgacggtacgagatcgctgtaaatctggaccttagcgaacgccaagttaaggtgtggtttcagaaccgccgaatgaagtggaagcgcgtgaagggcggacaacccatttccccaaacggtcaggaccctgaggacggggacagtacagctagcccttcctccgagtag

SEQ ID NO: 194861 - DNA, 555 bp, synthetic construct
  misc_feature 1..555: note = Description of Artificial Sequence: Synthetic coding sequence
  source 1..555: mol_type = other DNA
atggaccccgccgccagcagctgcatgcggagcctgcagccccccgcccctgtttgggggtgccttcggaaccctcactcagaaggcaacggggccagcggcctgccccactaccctcccactccatttagctttcaccagaaaccggactttcttgcaacggctactgcggcataccccgacttcagcgcctcatgcctggctgcaacccctcatagcctgccacaggaggaacatatctttactgagcagcatccggctttccctcagtctcccaactggcactttcctgtctctgacgccagacgacggcctaactccggacccgcaggcggaagcaaagagatgggcacaagttcgttggggcttgttgacaccacaggtgggccaggggatgattatggggtgctaggctcgacggccaacgaaactgagaaaaaaagctccagacgtaggaaagagtcctcaggtcaatccgttgtgcccgaaccaaaggacgaggtagaagcatgtgaaggcagatctgcgcacctccctcagtgggctggaccctag

SEQ ID NO: 194862 - DNA, 420 bp, synthetic construct
  misc_feature 1..420: note = Description of Artificial Sequence: Synthetic coding sequence
  source 1..420: mol_type = other DNA
atgggcaccagcagcctgggcctggtggacaccaccggcggccccggagacgactatggcgttctcggtagtaccgcaaatgagactgagaagaaatcctcacgacgccgcaaggagagttccgacaaccaggagaatagggggaaacctgaaggatcttccaaagcacgcaaagagcgcaccgccttcaccaaagagcaacttagagagctggaggcagaatttgcacaccataattatttgacccgcttgcgacggtacgaaatcgccgtcaatttggatttatctgaacgccaggtaaaagtgtggttccaaaatcgtaggatgaagtggaagcgggtgaaagggggacagcctatcagtcccaatggccaggatcccgaggacggcgacagcaccgcgagcccttctagcgagtag

SEQ ID NO: 194863 - DNA, 915 bp, synthetic construct
  misc_feature 1..915: note = Description of Artificial Sequence: Synthetic coding sequence
  source 1..915: mol_type = other DNA
atggagcaccccctgttcggctgcctgcggagcccccacgccaccgcacagggtctccacccgttcagtcagtccagcctggcgctccatggaaggtcagaccacatgtcttaccccgagctcagcacatcctcatcatcttgcatcatcgctgggtatccgaatgaagaaggcatgtttgctagccagcaccacaggggccatcatcaccatcaccatcatcaccaccatcaccaccaccagcagcaacagcatcaggctctgcagacgaactggcatcttccccagatgagcagcccaccctctgccgctcggcattctctttgcctgcagcccgacagcggtggacccccggagctggggtcaagtccaccagtgctttgttccaactcctccagcttagggtcaagcacacccactggtgccgcgtgcgcccccggggactatgggcgtcaggccctgtctccagccgaagctgaaaaacgaagtggaggcaaacgcaaaagtgattccagcgattctcaagaaggcaactataagtctgaggtgaacagtaagccccggaaggaacgaactgcatttaccaaggaacaaattcgtgaactggaggcagaatttgcccaccataattacttgaccaggctcagacggtacgagatcgccgttaatctggatctgaccgaaagacaagtgaaggtatggtttcagaaccgaaggatgaagtggaagagggtgaagggtggacagcaaggagctgccgcgcgcgaaaaagaactagtgaatgtgaaaaagggtacgctcctcccctccgagctgagcggcattggcgctgctacgcttcaacagaccggagattctatcgctaacgaggatagtcacgatagtgatcactcctccgagcacgcgcacctgtag

SEQ ID NO: 194864 - DNA, 705 bp, synthetic construct
  misc_feature 1..705: note = Description of Artificial Sequence: Synthetic coding sequence
  source 1..705: mol_type = other DNA
atggccgccagccggtgggcccggaaggccgtggtgctgctgtgcgcctcggacctcctcctactgttactgttgctccctcctcccggatcttgcgccgccgaaggatctcctggtactcctgacgagagtacaccccccccaaggaagaaaaagaaagatatccgcgactataatgacgccgacatggcgaggctcctggaacagtgggagaaggatgatgatatcgaagagggagacttaccagagcataagaggccctctgctccggtggatttttcaaaaatcgatcccagtaagcccgaatccattcttaaaatgactaagaagggcaaaactctgatgatgttcgtaacagtgagcggctcccccacagagaaggagacagaggagatcaccagtctctggcagggttcattgtttaatgccaattacgatgtgcagagatttatagtgggatcagatagagctattttcatgctacgagacggcagctacgcctgggagattaaggatttcctggtaggccaggataggtgtgcggacgtcaccctggagggccaggtttaccccgggaaggggggtggcagtaaggagaaaaataagaccaaacaggataaagggaagaaaaagaaggagggagacctgaagtccaggagctctaaggaagagaatagagctgggaataagcgcgaagatctgtag

SEQ ID NO: 194865 - DNA, 705 bp, synthetic construct
  misc_feature 1..705: note = Description of Artificial Sequence: Synthetic coding sequence
  source 1..705: mol_type = other DNA
atggccgccagccggtgggcccggaaggccgtggtgctgctgtgcgcttccgacctgctgctgctcctgctgctgcttcccccacccggtagctgtgcagcagagggatcaccaggaactccggacgaaagcaccccgcctccccgtaaaaagaaaaaagacatccgcgattataacgatgccgacatggccagactgctagaacagtgggagaaagacgacgatatcgaagagggagacctgcccgagcacaagagacctagcgcacccgtggatttcagcaaaattgatccctccaaaccagaaagcatcctgaaaatgactaagaaggggaagactctcatgatgttcgtgactgtttcaggctcccctacggaaaaagagaccgaggaaataacgtctctgtggcaggggagcctattcaatgcgaattatgacgtccaacggttcatcgtgggcagcgaccgggccatcttcatgctccgggacgggtcctacgcctgggagataaaagattttctagtggggcaggatagatgtgcagacgtaacgctggaggggcaggtgtatccgggcaagggcggcggcagcaaagaaaaaaataaaacaaagcaggacaagggcaaaaagaaaaaggaaggcgaccttaagagtcggtcctccaaagaggagaaccgagctgggaataagagggaggacctctag

SEQ ID NO: 194866 - DNA, 1194 bp, synthetic construct
  misc_feature 1..1194: note = Description of Artificial Sequence: Synthetic coding sequence
  source 1..1194: mol_type = other DNA
atggcccagagcccccccccccagagcctgctgggccacgaccactggatctttgcacaggggtggggttgggccgggcactgggacagcacatctccagcaagcagtagtgactcgtcaggtagctgcccctgcgacggagcacggggactaccacagccgcagccccccagctgtagtagtcgagctgctgaggcagccgcgactacacctcggcgagctaggaccggcccagctggcggacagcggcagagcgcttccgaacgtgaaaaactgcggatgagaactcttgctagagccctgcatgagctcagaaggttcctccctccatcactggcaccggctggtcaatctctgacgaagatcgagacccttagacttgccatccgatacatcggccatctcagcgctgtgctgggcctctcagaagagtccctccaatgcaggaggcgacagaggggtgacgccggcagtccctggggttgccccctttgccctgaccgcggaccggcggaggctcaaacgcaggctgagggccagggacagggtcagggccaaggtcagggtcagggtcagggtcaggggcagggacaaggccaaggccagggccagggacgacggccggggctcgttagtgccgtcctggccgaggcctcctgggggtctccttctgcctgccccggcgcccaggcagcccccgaacgactgggcagaggcgtgcacgatacagatccgtgggccacacccccgtactgtcccaaaattcagagccccccatatagctctcaggggaccactagcgatgcctcgctctggactccaccccagggttgtccttggacccagtcttcgcctgagcctcggaatcctcccgtaccttggactgctgccccagccacactcgagctggctgcggtgtaccagggtctgagcgtgtcacccgaaccatgtctctcactaggggccccatccctgttacctcatccaagttgccagcgactacagccccaaacccccggcaggtgttggtcacattccgcagaggtggtgcccaatagcgaagatcaagggcctggcgcggcttttcagttaagcgaagcctctccaccccagagctcggggcttagattttccggctgtccggagctttggcaagaggatcttgagggtgctagactgggtattttttactag

SEQ ID NO: 194867 - DNA, 3510 bp, synthetic construct
  misc_feature 1..3510: note = Description of Artificial Sequence: Synthetic coding sequence
  source 1..3510: mol_type = other DNA
atggagccccgggagagcggcaaggcccccgtgaccttcgacgacattacggtgtatctcctccaagaggaatgggttctgcttagtcagcagcagaaagagctctgcggctctaacaaactcgtggcccctttaggacctaccgttgctaacccggagcttttccggaaattcgggagaggccccgaaccgtggctggggtcagtacaagggcagcgaagcctgctggagcaccacccaggcaaaaaacagatggggtacatgggtgagatggaggtgcaaggtcctaccagagagtcaggtcaaagtctgccgccacagaagaaggcctatctatcacacctgtccactggatcaggacacatcgaaggggactgggcaggtagaaatcgcaagttgcttaagccaagatccattcaaaagagctggttcgtgcagtttccctggcttattatgaatgaggaacaaactgccctattctgcagcgcatgcagggaatatccctctatccgggacaagagatccaggttaatagagggatacacaggacccttcaaagtggagaccctcaagtatcacgctaagagtaaagcccatatgttttgtgttaatgcactcgcggctcgcgatccaatctgggccgccagattccggtccatccgtgaccctcccggggacgttctcgccagccctgaacccctgttcaccgccgattgtcccatcttctacccacctgggcccctgggcggtttcgactccatggctgaactgctgccttcaagccgggccgagttagaagatcccggtggggatggtgccattcccgccatgtatctcgactgcatcagcgacttacggcagaaggaaattaccgatgggatccacagttcatcagacatcaacatcctgtataatgatgcagtcgagagctgcatccaggatcccagcgccgaaggactgtccgaggaagtgcctgtcgtgttcgaggaacttcctgttgttttcgaggatgttgccgtttactttactcgagaggagtgggggatgctcgataagaggcagaaagagctgtatcgtgatgttatgagaatgaactatgagcttctggcatccctgggccccgctgccgccaagccagatctcatcagcaaactggagcggcgagccgctccctggattaaagacccaaacggcccaaaatggggcaaggggcgtccacctggcaataagaaaatggtcgccgtaagagaggccgatacacaggcctcagctgccgatagtgccctcctgcccggatccccagttgaggcccgagcctcatgctgctcatccagtatttgtgaggaaggggatgggccacggagaatcaagaggacgtataggcctaggtctatacagcgatcttggttcggacagtttccctggctggtcattgatcctaaagagaccaaattgttctgttcggcgtgcatagagcgaccaaatctacatgacaaaagctccaggctggtccgtggctataccgggcccttcaaggttgagactttgaagtatcacgaggtgagcaaggcccaccggttatgtgtcaacacagtggagatcaaagaggacactcctcacactgctctcgtcccagaaatttctagcgaccttatggccaatatggaacacttctttaatgctgcctatagcattgcataccacagccgaccactcaatgattttgagaaaattcttcagctgctccaaagtactgggactgtaatcttggggaagtacaggaataggacagcatgtacccagtttatcaagtacatcagtgagaccctaaagcgcgagattcttgaggacgtgcgaaactctccatgtgtgtccgttttgctggattcctctaccgatgcctctgagcaggcctgtgtggggatttacatcaggtattttaagcagatggaagtgaaggaaagctacatcaccctcgctccgctgtacagcgaaacggctgacggttacttcgaaaccatcgtcagcgccctggatgagcttgatattcctttcaggaaacccggctgggttgtaggcttgggcactgatggatccgccatgttgtcttgcaggggcggtcttgtagagaagttccaagaggtgatcccacagttgctgcctgtgcactgtgtggcccacagactacacttagctgtggtggacgcttgtggttcgatcgaccttgtgaagaagtgtgaccgacacatccgaactgtatttaagttttaccagtcatctaataaacggctgaacgagctgcaggaaggagctgccccattggagcaagagatcattagactcaaggacctaaatgcggtgcgctgggtagctagtcgaaggcgcaccctccatgcattactcgtgtcgtggcctgccctggctcggcacttgcagagggtggccgaggcaggcggccagatcgggcaccgcgccaagggcatgttgaagctgatgcggggctttcatttcgtcaaattttgtcattttctattggattttctctcgatctaccggcccctgtctgaagtctgccagaaggaaattgtgctgatcaccgaagtcaatgctaccctagggagggcttatgtcgccctggagagccttaggcaccaggcggggccgaaggaagaagagttcaacgcatcttttaaggatggaagattacatgggatctgcctggacaaactcgaggtcgccgaacagagattccaggcggatagagaacggaccgttcttaccgggatcgagtatctccagcagcgcttcgacgcagatcggcccccacagctgaagaatatggaggtgttcgatactatggcgtggccttctgggattgaactggctagttttggaaacgatgatatcctcaatctggccagatattttgagtgttctcttcctactgggtactcagaggaagccctgttagaagagtggctgggcttaaaaacgatcgcgcagcacctgcccttttctatgctctgtaaaaacgcgctcgcgcagcattgtcgattcccattactttctaagttaatggccgtggtggtgtgcgtgccaatctcgacttcctgctgcgaacgcggctttaaggcaatgaaccgtatccgtacagacgaaaggaccaaactgtctaatgaagtgttaaacatgctgatgatgacagccgttaacggcgtggccgtaacggagtacgatccccagcccgcaatacagcactggtacctgacctctagcggtcggcgattctctcacgtttacacttgcgcgcaagtgccggcacgaagcccggcatcagcaagattgcggaaggaagagatgggagctctatatgtagaggaacccagaacccaaaaaccacccattctgccttcccgcgaggccgctgaggtactgaaggattgcattatggagcctcctgagaggctattgtaccctcacacttctcaagaggcacccggcatgtcctag

SEQ ID NO: 194868 - DNA, 981 bp, synthetic construct
  misc_feature 1..981: note = Description of Artificial Sequence: Synthetic coding sequence
  source 1..981: mol_type = other DNA
atgcgggagtggtgggtgcaggtgggcctgctggccgtgcccctgctcgctgcttatttgcatatcccgcccccacagctctctcctgcactgcattcctggaaatcctcagggaaattctttacctacaagggcctcagaatcttttaccaggatagcgtaggggttgtggggagccccgaaattgtggttttgcttcatggctttcccacttccagctatgactggtacaaaatttgggagggactgactctcagatttcatagggtcattgctctcgactttttaggattcggcttttcggataaaccacgtccccaccactattccatcttcgaacaggcctcaatcgtggaggccttactgcgacatttgggtcttcagaataggcggattaacctgctgtcccatgactacggcgacatcgttgcccaggagctcctctatcgctacaaacaaaatcgtagtggtcggctgactattaagtccttatgtctctccaacggtggaatcttccccgaaacacaccgtccactactcctgcaaaagttgctcaaagacgggggggttctgtctccgattctgactaggctgatgaatttttttgtattctcaagaggcctgacccctgtgttcggaccgtacacaaggccctcagaatctgaattgtgggacatgtgggcaggaattcggaacaatgatgggaacctggtcatagattctctgctccaatatattaatcagcggaagaaatttaggcgacgttgggtcggggcactggcaagcgtcacaatcccaattcatttcatctacggtcctctggatcctgtgaatccttatcccgaattccttgagctgtataggaaaaccttaccccgcagcacagtcagtatactggacgaccacatttcacattaccctcaacttgaagacccgatgggttttcttaacgcgtatatgggcttcatcaattcattttag

SEQ ID NO: 194869 - DNA, 981 bp, synthetic construct
  misc_feature 1..981: note = Description of Artificial Sequence: Synthetic coding sequence
  source 1..981: mol_type = other DNA
atgcgggagtggtgggtgcaggtgggcctgctggccgtgcccctgctggccgcatatctgcatattcccccgcctcagctcagtccggcattgcattcttggaagtcaagcggcaagttctttacttacaaaggtctgaggattttttatcaggactcggtgggcgttgtggggagcccagaaatagttgtcctgctgcacggcttccccacaagcagctatgactggtataaaatctgggagggattgacactcagattccatcgggtgatcgcgctcgactttctcggctttggattttccgacaagccaagacctcaccattattccatctttgagcaagctagtatagtggaggccctactgagacacctgggtctgcagaaccgccggataaatctgctgagccacgactacggcgacatcgtagcgcaggagctgttgtaccgatataaacagaaccgcagcggcaggctaacaatcaagagcctgtgcctgagtaatggcggaattttccctgagactcatcgtcccctcctcctgcagaaactcctgaaagatggcggtgtgctgtcccccatactgacgcggctgatgaacttcttcgtgttctcaagagggctgacacccgtatttggcccatatacacggcctagtgaaagcgaactttgggatatgtgggcaggaattcgcaataacgacggtaacctcgttattgattccttgttgcagtatatcaatcagagaaagaaatttaggcgcagatgggtgggcgcacttgccagcgtgaccatcccaatacacttcatttatgggcctttggatcccgtgaatccataccctgagtttctggaactctacaggaagaccttgcctagatctacggtaagcatcctggatgatcatattagtcattatccccagttggaagatcctatgggattcttaaacgcttatatggggtttattaactccttctag

SEQ ID NO: 194870 - DNA, 357 bp, synthetic construct
  misc_feature 1..357: note = Description of Artificial Sequence: Synthetic coding sequence
  source 1..357: mol_type = other DNA
atgcgggagtggtgggtgcaggtgggcctgctggccgtgcccctgctagccgcatatctccatatccctccaccccaactctccccggccttacacagttggaagtcttcaggaaagttcttcacctacaagggattaaggatcttctatcaagacagcgttggagtagttgggtctcccgagatcgtggtcctgctccacggatttcccacatctagctatgactggtacaagatttgggagggcctcacactgcgttttcaccgcgtcatcgctcttgattttctgggatttggcttcagcgacaaaccacgtccacatcactactcaatattcgagcaggcatccattgtatag

SEQ ID NO: 194871 - DNA, 624 bp, synthetic construct
  misc_feature 1..624: note = Description of Artificial Sequence: Synthetic coding sequence
  source 1..624: mol_type = other DNA
atgcgggagtggtgggtgcaggtgggcctgctggccgtgcccctgctggccgcttatctacatattccccccccacagctatctccagcactccactcctggaaatcatccggaaaattttttacatacaaagggctccgcattttttaccaggactctgtgggggtggtgggaagccctgaaatagttgtgctgctccatggatttcctacatcctcttacgactggtataaaatctgggagggcttgaccctgaggtttcaccgggttatcgctctcgacttcctgggatttggattttcggacaagccaagaccacatcattactcaatcttcgagcaggcatccattgtggaggccctgctccgccacttgggactacagaaccggagaattaatctgttatcacacgactacggagatatagttgctcaggaactgctttatcgatataagcagaataggtccggtagactcactatcaagagtttgtgtctcagcaatggtggcatattcccggaaacgcatcggcctctgttgctgcagaaactgctcaaggatgggggcgtgttgagcccaatcctgaccaggttgatgaacttttttgtgtttagccgtggctag

SEQ ID NO: 194872 - DNA, 483 bp, synthetic construct
  misc_feature 1..483: note = Description of Artificial Sequence: Synthetic coding sequence
  source 1..483: mol_type = other DNA
atgcgggagtggtgggtgcaggtgggcctgctggccgtgcccctgctggctgcgtacctccacatccccccaccccaactaagcccagcgttacactcttggaaatcatctggcaaattcttcacatacaaggggttacgtatcttctatcaagatagcgttggagtggtggggagcccagagatagttgtgttgctccatgggtttcccacttccagttacgattggtacaaaatctgggaaggccttactctgcggtttcaccgagtcatcgcactggacttcctgggcttcggattctcagacaaaccaagaccccaccactacagtatcttcgaacaggctagtattgttgaggctctactgcgccatctgggactgcagaatagaagaattaatttattgtcccacgattatggggacattgtggcccaggaactgttgtaccgatacaaacagaaccgcagcggcagactgacctag

SEQ ID NO: 194873 - DNA, 384 bp, synthetic construct
  misc_feature 1..384: note = Description of Artificial Sequence: Synthetic coding sequence
  source 1..384: mol_type = other DNA
atgcgggagtggtgggtgcaggtgggcctgctggccgtgcccctgctggcggcctacctgcatatcccaccgccacaactttcccctgccctgcatagctggaaatctagcggaaagtttttcacctacaaaggcctccgcattttttatcaggattctgttggcgtagtgggctccccagaaattgtggtactcctgcacggatttcccaccagctcttacgattggtataagatttgggagggcctgacactaagatttcatagagttatcgctctggatttcttaggcttcggattcagcgacaagccacgaccacaccactatagcatattcgagcaagcctccattgtggaggcattgctgcgccatctgggcctgtag

SEQ ID NO: 194874 - DNA, 522 bp, synthetic construct
  misc_feature 1..522: note = Description of Artificial Sequence: Synthetic coding sequence
  source 1..522: mol_type = other DNA
atgcgggagtggtgggtgcaggtgggcctgctggccgtgcccctgctggccgcctacctacacatcccacccccacagctgagcccggcactccacagttggaaaagctcaggcaagttcttcacgtataagggcctcaggattttctaccaggactcagtgggagtggtaggaagccctgagatcgttgttcttctccatggctttccaacttcttcctatgattggtacaaaatttgggaaggtctcacactgcgatttcaccgcgtgatcgcccttgacttcctcggcttcgggttttcagataagcctaggcctcatcactactcaatcttcgaacaggccagtatcgtggaagcgctgcttcgccatctggggttgcagaatagacggattaacctgcttagtcatgactatggcgacatcgttgcccaggagttgttgtaccgatacaagcagaacaggagcgggcgtctcaccatcaaaagcctctgcctcagcaacggcggtaattgcctttag

SEQ ID NO: 194875 - DNA, 879 bp, synthetic construct
  misc_feature 1..879: note = Description of Artificial Sequence: Synthetic coding sequence
  source 1..879: mol_type = other DNA
atgcgggagtggtgggtgcaggtgggcctgctggccgtgcccctgctggcggcatacctacacatccctccaccccagttgagtccagcgttgcattcttggaagtcttctgggaagtttttcacctacaaaggcctgagaatcttttatcaggactctgtcggtgtggttgggagtccagaaattgttgtgctgctccatgggttccctaccagctcttacgattggtacaaaatctgggagggcttgacattgcgattccatagggtgatcgcactagacttcctgggcttcggtttcagcgacaagccccggccgcatcattactccatcttcgagcaggcgtccatagtcgaggcacttctgaggcatcttggcctccagaacaggcgaatcaacctgttgagtcacgattacggtgacatcgtggctcaagagctgctgtacagatacaagcagaatagaagtggcaggctaacaattaagtcgctatgcctgtctaacggtggtatttttcccgagacccatcgcccattgctcttacaaaagctcctcaaagatggaggcgttttgtctccaatcctgaccaggctgatgaacttctttgtgtttagcaggggactgttgcaatatattaatcaacggaaaaagtttagacgtcgttgggtcggagctttagccagcgttaccattccaattcactttatatacggccccttggacccggttaacccttatccggaattcctcgagctctacaggaagactttaccgcgctctacagtctctatcctggatgatcacattagtcactacccccagctggaagacccaatggggttcctgaacgcgtatatggggttcataaattctttttag

SEQ ID NO: 194876 - DNA, 879 bp, synthetic construct
  misc_feature 1..879: note = Description of Artificial Sequence: Synthetic coding sequence
  source 1..879: mol_type = other DNA
atgcgggagtggtgggtgcaggtgggcctgctggccgtgcccctgttagctgcttatttgcatatcccaccaccgcagctctctccagctcttcactcctggaagagtagtggtaagttttttacttacaaggggcttaggatattttaccaagacagtgtgggagtcgtcggtagcccggaaatagtcgttttgcttcacggctttcctacgtctagttacgactggtataagatctgggaggggctgactctgaggtttcatcgggtcatcgctctggattttctggggttcggattctccgataagccccgcccacaccactacagcattttcgagcaagccagtattgtagaggcactgctgcggcatctgggcctgcagaataggagaattaatctgctctctcacgactatggagacatcgtggcccaagagttgctgtatcggtataaacagaacaggagtggtcggttgacaatcaaatccctgtgtctcagcaacggtggaatctttccagagactcatcggccactcctcctccagaaactactgaaggacggaggtgttctttctcctatcctcacccgcctgatgaatttctttgtattttcgcggggcttgctgcagtatattaatcaaagaaaaaagttccggaggcggtgggtgggagctctcgcaagcgtgacaatcccaatccattttatctatggcccgctagaccctgtgaatccataccccgaatttctggagctgtaccggaagaccctgcccagaagcaccgtctctatcctggacgaccatatctcccattatcctcaactggaggacccaatgggattcctgaacgcctatatggggtttatcaacagtttctag

SEQ ID NO: 194877 - DNA, 582 bp, synthetic construct
  misc_feature 1..582: note = Description of Artificial Sequence: Synthetic coding sequence
  source 1..582: mol_type = other DNA
atggacaacctgcgggagaccttcctgagcctggaggacggcctgggatcctctgactcacccggcctgctgagcagctgggattggaaggaccgcgctggcccattcgaactgaatcaggcaagccccagccaatcactgtccccggctccgagtttggagagctattcctcttcaccatgtcccgctgtggcagggttgccttgtgagcacgggggggctagctccggcgggtctgaaggatgctctgtcggtggtgcatccggcctggtggaagtggactacaacatgcttgccttccaacccacgcatcttcaggggggcggaggcccgaaagcgcagaaaggaactaaggtgcggatgtctgttcagcggcgccggaaagcctccgaaagggagaaactgcgaatgaggactctggccgacgccttgcacacgctgaggaactatcttccccccgtttatagccaaagagggcaaccactaaccaaaatccaaacattgaaatatactatcaaatatattggcgagctgactgacctgttgaaccggggaagagagccccgcgctcagagtgcctag

SEQ ID NO: 194878 - DNA, 1893 bp, synthetic construct
  misc_feature 1..1893: note = Description of Artificial Sequence: Synthetic coding sequence
  source 1..1893: mol_type = other DNA
atggccctgcccaccgcccggcccctgctgggcagctgcggcacccccgctttgggctcattgctcttcctgctgttctctctgggatgggtccagccctccaggacactcgctggggagacaggccaggaagccgcccccctggatggagtgctggcaaatcctccaaacatctcaagcctgtcaccccgtcagctgcttggatttccttgtgcagaggtgtccggcctcagtacagagagagtgagagagctggccgtggctctagcccagaaaaacgtgaagctgagcaccgagcagctccgctgtttagctcacagactgagtgagccacccgaagacctggatgccctgccgctcgatttattgttatttctgaaccccgacgctttttctggacctcaagcttgcactaggtttttcagccgaattactaaggccaatgtggacctgctgccccgcggtgcacccgagcgccaaagattgctcccggccgcactggcctgctggggcgttcgagggtccctgttaagcgaggctgatgtgcgggcattgggcgggttagcatgcgacctgcccggtcgattcgttgctgagagtgccgaggtactcttacctagattagtaagctgccccggtcccctggaccaggaccaacaggaagcagctagagctgcattgcaggggggtggccccccttacggtccgccaagcacatggtccgtgagcaccatggacgccctcaggggcctgctgcccgttctgggccaacctattattaggtcaataccccagggcatcgtcgccgcctggcggcagagaagttcacgtgatccatcttggcgacagccggaaagaacaatcttaagaccccgcttccgtcgtgaggtagagaagaccgcttgcccttctggaaaaaaggctcgcgagatagacgaaagtctgatcttctacaagaagtgggagctggaggcctgtgtggatgccgccttgctagcaacacagatggaccgcgtcaatgcaattccattcacatatgaacagctggatgtgctgaaacataagttggacgaactgtatcctcagggctacccggagtcagtgatccagcacctaggctacctgttcttgaaaatgtctccagaggatattagaaaatggaacgttacatccctggaaaccctcaaagcgctcctcgaggtgaataagggtcacgaaatgtctccccaagctcctagacggccgttacctcaggtagcgactctcatagaccgatttgtgaaaggacgcgggcagctggacaaagacacactagacacgctgacagcattttatccagggtatctgtgtagtctgtccccagaagagctatcttccgtccccccctcttctatatgggctgtgagaccccaggatcttgatacgtgtgacccccggcagctggatgtcttgtatccaaaggccagactcgccttccagaacatgaatggttccgaatacttcgtaaaaattcaatctttcctcggcggagctccaactgaggatttaaaggccctcagtcaacaaaatgtgagtatggatctcgctacatttatgaaactcagaacagacgccgtgctcccactgacagtggccgaagtgcagaaactgctgggccctcatgttgagggcttaaaagccgaggagagacaccgtcccgtgcgtgactggatcttacgccaacgccaggacgatttagatacacttggcctcggcctccagggggggattcctaatgggtacctggtcctggacctgagtatgcaagaggctctgtccgggactccctgtttgctcgggcccgggccggtgctgactgtgctggccctgttgctcgcgtcaaccttggcctag

SEQ ID NO: 194879 - DNA, 1869 bp, synthetic construct
  misc_feature 1..1869: note = Description of Artificial Sequence: Synthetic coding sequence
  source 1..1869: mol_type = other DNA
atggccctgcccaccgcccggcccctgctgggcagctgcggcacccctgcactgggaagcctcctgttcttgctcttcagtctcggctgggtgcagccaagcagaaccctcgccggagaaacaggccaggaggctgccccactggatggcgtgctggccaatcccccaaacattagcagcctctctcctaggcagctgttgggtttcccttgcgcagaggtgtccggactttctaccgagcgggtgagggagctggccgtagccctggcccagaaaaacgttaaattgagtaccgagcagctgagatgcttggcacaccgactcagcgaaccacccgaagatttggacgcgcttcccctcgaccttctcctattcctcaatccggacgccttctcgggaccccaggcctgtactcgcttcttcagcaggattacaaaagccaatgtcgatctactccctcggggagctccggaacgccaacgcctgctacctgcagcactggcttgctggggggtgcgtggctctctcctgagtgaagccgatgtacgggcactagggggtttggcctgtgatctgcccggcaggtttgtcgctgagagcgccgaggttttactaccccgactagtgagctgcccaggccccctggaccaggatcagcaggaagccgctcgggctgcattacagggcggcggcccaccatacggaccaccctctacatggtcagttagcaccatggatgctcttcgtgggttactgcccgtgttgggacagcccatcattaggagcatccctcagggtattgtggctgcatggcggcagagatcatctagggacccttcttggagacagcccgaaagaacaatactaagacccaggtttcgcagggaagtggagaaaacagcctgcccaagcggtaagaaggccagagagattgatgaatctctgatattttataagaagtgggaactcgaagcctgcgtagacgcagccctcctggccactcaaatggacagggttaacgctatcccctttacgtacgaacaactcgatgtcctcaagcataaactagatgagctgtaccctcagggctatccggaaagtgtgattcagcacctggggtacctatttctgaagatgagtcctgaggatatcagaaagtggaatgtcacatccctggaaaccctgaaagcgctactggaagtgaacaaaggtcacgagatgtctccgcaagtggctactcttattgatcgcttcgtgaagggcagagggcagctcgataaagacactctggatacactgaccgccttctaccccggatatctgtgctcattaagccctgaagaactgagcagcgtccccccctcgagcatctgggccgtgcggccacaagacctggatacctgtgatccgcggcaactggacgttctctatcccaaagctcgcctggccttccaaaacatgaacggatcagagtattttgtgaaaattcaatcgttcctcggaggggctccgacagaggaccttaaagccttgtctcaacaaaatgtgtctatggacctggccactttcatgaaactgcgtaccgacgcggtgcttcctttgaccgtggccgaagtccaaaagttactcggaccacacgtggaagggctgaaagccgaggaacgccaccgccccgtgcgggactggatactgcgacagcgccaagatgatcttgatactcttgggctgggtctgcagggggggattcccaacggttacctggtcctggacttgagtatgcaggaagcactgagtgggactccttgcctactcgggcctggaccggtgctgaccgtgctcgctttgttactggcgtcgactctcgcatag

SEQ ID NO: 194880 - DNA, 1893 bp, synthetic construct
  misc_feature 1..1893: note = Description of Artificial Sequence: Synthetic coding sequence
  source 1..1893: mol_type = other DNA
atggccctgcccaccgcccggcccctgctgggcagctgcggcacccctgccctgggcagcctgctatttctgctgttttcactgggctgggtgcagccaagccgcactttagctggggagactgggcaggaggcagctcccctggacggagtgctggcaaacccgcctaacattagctccctgtctccccgacagctcctaggatttccttgcgcggaggtgtccggtctcagtacggagagggtgagagagctagccgtagccctggctcagaagaacgtgaagctgagcaccgaacagctaagatgcctggcgcacaggctcagcgaaccaccagaagacctggatgccttgccgttggatttattactgtttctgaaccctgacgccttctcaggtccccaggcctgtaccagatttttttcacggatcactaaggccaatgtcgatctgctgccccgcggtgccccagaacggcagagacttttgcctgcagccctagcttgttggggtgtaagaggcagcctcttgtctgaagccgacgtcagagccctgggggggctggcctgtgatctaccaggtcgattcgtagcagaatcagcagaagtcctgctgccccgcctggtctcttgtcccgggccattggaccaggatcaacaagaagccgcgcgagcagcgctgcagggcggcggacccccctatggcccaccttctacctggagtgtgtccaccatggacgccttaagaggtctgttacccgttttggggcagcctatcattcggtcaattccccaaggaatcgtcgctgcatggcgccaacgatcgtctcgtgatccgtcttggaggcagccagagcgcaccatactgcgtcctcgcttccggagggaggtagagaagactgcttgcccctctggcaaaaaggcgagggagatcgacgaatctttgattttttataaaaaatgggaactcgaggcttgcgtcgacgctgctctcctcgccacgcagatggacagagttaatgcaataccatttacctatgagcagctagacgtcctcaagcacaagctggatgaactgtacccccagggatacccagaatccgtgattcaacatctgggatacttgttcctgaaaatgagcccagaagatattcgcaaatggaatgtgaccagtctcgagactctaaaggcactccttgaggtgaataaaggccatgagatgtcaccacaggccccgagacgacccctgccacaagtagccactctcatagaccgattcgtgaagggcagaggtcagctggacaaggacacactcgataccctgacagccttctatcctggctacctctgttctctcagtcccgaggagctcagcagcgttcccccctcttccatatgggcggtgcgaccacaggaccttgatacttgtgacccccggcagttggacgttttgtacccaaaggcccgactggcgttccagaacatgaatggctccgaatatttcgtgaagatacagagcttcctcggtggcgcccccaccgaggacttaaaggctctcagtcagcaaaacgtgtcaatggatctcgccacatttatgaaattaaggaccgacgcggtgctcccccttacagtggccgaagttcagaaactgctcggaccgcatgttgagggcctgaaagccgaggaacgacacaggcccgttcgggactggattctccggcagcggcaagatgacctcgataccctcgggctcggcctccagggcggtattcctaacgggtacctggtgttggatcttagcatgcaggaagcattaagcggaactccctgcctgctgggccccggtcccgtcctcacagtccttgctctgcttttggcctccactctggcatag

SEQ ID NO: 194881 - DNA, 1869 bp, synthetic construct
  misc_feature 1..1869: note = Description of Artificial Sequence: Synthetic coding sequence
  source 1..1869: mol_type = other DNA
atggccctgcccaccgcccggcccctgctgggcagctgcggcacccctgctctgggatccctcctgttcctgctgttctccttgggttgggtgcagccttcacgcaccttggcaggcgagaccggacaggaagctgctcctctagacggggtgcttgctaaccctccaaacattagcagcctgagcccgagacagctgctgggtttcccttgcgctgaagtgagcggcctcagcacggaaagagtgagggagctcgccgttgcccttgctcagaaaaacgtgaagcttagcaccgagcagcttagatgtctggcccatcgactcagtgaaccccctgaagatctggatgccctccctctggacctgctcctgtttctgaatcctgacgctttttctggcccccaggcctgtacacgcttttttagccggatcaccaaggccaatgtggacctgctgccccggggcgcccccgagcggcaacgattgctgccagcggctctggcgtgctggggagtgcgcggatcccttttgagcgaagccgacgtgcgagctctgggcggcctggcgtgtgatctgccaggacgctttgtggcggaatctgccgaagttctcctccccaggctcgttagctgtccaggaccactcgaccaggatcagcaggaggccgcccgggcggcgcttcaggggggaggccctccttatggtcccccctctacctggtctgtgtccaccatggatgcattacggggactgctcccagtgctcggacagccaattatccgatccattccgcaggggatcgtggcagcttggcgccagaggtcgtctcgcgatccctcctggcggcagcctgagcgcaccattttgagacccagatttagaagagaggtggagaagacagcctgccctagtggaaagaaggccagggaaatcgatgagtcccttatcttttataaaaaatgggagttggaagcctgtgtcgatgcagcactgctggccactcagatggaccgggtcaatgctattccgtttacctatgagcagctggacgtgctaaagcacaaacttgatgaactgtacccccagggatacccagagagcgtcattcagcacctgggctatttgttcctgaagatgtctcccgaggacatcagaaagtggaatgttaccagcctggaaacattaaaggctttgctcgaggtcaataagggccacgagatgtcaccccaggttgccacgctgatcgacagatttgttaaaggccgaggccagcttgacaaagacactctggacacactgactgccttctatcctggatatctgtgctctttgtctcctgaggagctgtcttccgtgcctcccagttccatctgggcagtgcgcccccaggatctggacacttgtgaccctcgccagcttgacgtgttgtacccgaaagctcggttagctttccagaacatgaatggatccgagtacttcgtgaagatacagtcatttctgggtggcgctccaaccgaggacctgaaggctcttagccaacagaacgtgtctatggacctggccacttttatgaaactaagaacagacgccgtgcttcctctcactgtcgcggaagtacaaaagctgctgggacctcacgtcgaaggcctgaaggccgaggagaggcatcgacccgtccgcgactggatcttacgccagcggcaggatgacttggacacactgggccttggactgcagggcggcattccaaatggctacttagtacttgatctgtctatgcaagaggcactttccggcactccttgcctgttagggccagggcccgtattgaccgttttagcactgctgctggcgagcacactcgcctag

SEQ ID NO: 194882 - DNA, 1869 bp, synthetic construct
  misc_feature 1..1869: note = Description of Artificial Sequence: Synthetic coding sequence
  source 1..1869: mol_type = other DNA
atggccctgcccaccgcccggcccctgctgggcagctgcggcacccctgccctgggttctctcctcttcttgttgtttagccttgggtgggttcaaccgtccaggaccttggcgggcgaaacagggcaagaagctgccccccttgatggggttctggcgaaccctcccaatatctcgagcctgagccctcgccagctgcttggctttccttgcgccgaggtgtcagggttgtccacagaacgggtacgggagttagccgtcgctctcgctcagaagaacgtgaaactgtctacggagcagcttcgctgcttagcccaccgcctgagtgagcccccagaggatttggacgcgctcccgctcgatctgctgcttttcttgaaccccgacgctttctctggccctcaggcgtgcacaaggttcttttcaaggatcacaaaggccaacgtggacttgttgcctagaggggcccccgagagacagagactgctgccagccgccttggcatgttggggggtacgggggtccctgctatcagaagcagacgtgagagcgctcggggggttggcgtgcgaccttcctggcagatttgtagctgagtcagctgaggtgctgttgccccgcctagtgtcgtgcccagggcctctggatcaggatcaacaggaagccgccagagcggctctacagggcgggggcccgccctacggcccccccagtacttggtctgtcagtaccatggatgcactgcgcggacttctaccagtcttagggcagcctataatcagatctatcccacaaggcattgttgccgcatggcgtcagcgttcaagcagggatccttcatggcgccagcccgaaaggacaatactgcgtcctcggttccgacgggaggtagagaagaccgcctgtccctcaggaaagaaggccagagaaatagatgagtcccttattttctataagaaatgggaattagaagcctgcgttgacgccgccttgctcgcgacgcagatggaccgtgtgaatgccattccatttacctacgagcagctagatgttctgaaacacaagctcgacgagctttaccctcagggctaccccgagtctgttattcagcacctggggtacctgtttctcaagatgagccccgaagatataaggaaatggaacgttactagcttagagacccttaaggcattgctggaggtgaataaaggtcatgagatgtcccctcaggtggctacgttgatcgatcgcttcgtgaagggtagggggcagctcgataaagatactttggatactctcacggctttttatcccgggtatttgtgtagcctcagtcctgaggagctaagtagtgtccctccaagttcgatctgggcagtgaggcctcaggacttggatacatgtgatccccggcagctggacgtgctgtaccccaaggcccgactcgcctttcaaaatatgaatgggtccgaatatttcgtaaagattcaatctttcttaggcggcgctccaaccgaggacctcaaagccctcagccagcaaaatgtatccatggacctagcaactttcatgaagctaaggacggacgcagtcctcccactcaccgtcgctgaggtccagaagctgcttgggccccacgttgaggggttgaaggctgaagaacgccaccgcccagtcagagattggatcctccgccagagacaggatgatctcgatacacttggtctggggcttcaaggcggaatccccaatggctacctggtactcgacttaagtatgcaggaggctctgagcggtactccttgtcttctggggccagggcccgtcctcacagtgctggctctgctgctagccagcaccttagcctag

SEQ ID NO: 194883 - DNA, 1782 bp, synthetic construct
  misc_feature 1..1782: note = Description of Artificial Sequence: Synthetic coding sequence
  source 1..1782: mol_type = other DNA
atgcgggacagcaccggcgccggcaacagcctggtgcacaagcggagtccactcagaaggaatcagaaaactcccacgtcgctgaccaagctgtccctgcaggacggacacaaggcaaagaaacctgcttgcaaattcgaggagggtcaagacgtcctggcccggtggagtgacggactgttctacttgggaacaattaaaaagatcaacattctgaagcagtcatgctttattatcttcgaggattcttccaagtcatgggttctatggaaggacatccagacaggcgccactggaagcggggaaatggtgtgtaccatctgtcaagaagagtattctgaggcgccaaatgaaatggtcatttgtgacaagtgcggacagggctatcaccagctctgccacactccacatattgattgttcagttatagatagtgatgaaaaatggctgtgcaggcaatgcgttttcgccactaccacaaagagggggggcgcattaaagaaaggccccaacgctaaggccctccaagtgatgaaacagacactgccatattcggtggcggacctcgagtgggatgccggtcacaaaaccaacgtccagcagtgttattgttactgcggcggccctggtgattggtacttgaagatgctccaatgttgtaaatgtaaacagtggttccatgaggcctgtgtccaatgtcttcagaaacccatgctgttcggggatcggttttacacctttatttgttccgtgtgtagctccggcccggagtacctgaaaagattacctctgcagtgggtagatatcgcccacctgtgtctgtacaacctttctgtgatccacaagaagaagtacttcgactcagagctcgaactcatgacatatatcaatgaaaactgggaccggctccacccaggggagctagctgacacccccaaatctgagaggtatgaacatgtgctggaggcacttaatgattataagacgatgttcatgtccggaaaagaaattaagaagaaaaagcatctctttggactcagaatccgtgtaccccctgtgcctcctaacgtggcctttaaggcagagaaggagcccgagggaacttcgcacgaatttaagatcaagggacgcaaggcttctaagccaatcagcgattctcgggaggtgtccaatggtatcgagaaaaagggcaagaagaagagcgtgggcaggccaccgggcccttacacgcgaaagatgatccaaaagaccgccgaaccactcttagataaggagtctatttccgaaaaccccacattagaccttccctgtagcatagggagaactgagggaacagcccattcaagcaacactagtgatgtcgattttacgggagcctcgtcagcaaaggagaccaccagttcatccatatccagacactacggactcagcgacagtcgcaaacgaactaggactggccgctcttggcctgctgcgattccacatctgcgccggaggcgcggtagactccctagacgcgccctgcagacccagaactctgagattgtaaaggacgatgagggcaaggaagattaccaattcgacgaattaaatacagagatcctgaacaacttagccgaccaggagctgcaactgaatcacctcaagaattccataacatcttatttcggggcggctggaaggattgcttgcggagagaagtaccgcgtgttggcgcggcgggtgactctggacggaaaggtgcagtacctggtggagtgggaaggcgcaaccgccagttag

SEQ ID NO: 194884 - DNA, 1611 bp, synthetic construct
  misc_feature 1..1611: note = Description of Artificial Sequence: Synthetic coding sequence
  source 1..1611: mol_type = other DNA
atgcgggacagcaccggcgccggcaacagcctggtgcacaagcggagtccactgcgccggaaccagaagacacctacgagtctcactaaactcagcctccaggatggacacaaggctaagaaaccagcttgcaaatttgaagaaggtcaggatgttctggcccggtggagcgacggcctgttttatttaggcaccatcaagaagatcaatatcctcaaacagtcttgtttcatcatcttcgaagactcctctaagtcctgggtgctttggaaggatatccaaactggtgctacaggcagcggagagatggtgtgcacaatttgccaagaagagtacagcgaggccccaaacgaaatggtgatttgtgacaagtgtggacagggctaccaccagctatgccatacaccgcatatagactgttccgttattgactccgatgaaaaatggctgtgccgccagtgcgtgtttgccaccacaactaagcgcggaggcgcacttaaaaaaggtcccaatgccaaagccttgcaggtcatgaaacaaactttgccatacagtgtggctgacttagaatgggatgcaggacacaagacaaacgttcagcaatgctattgctattgcgggggccctggcgactggtatctgaaaatgcttcagtgttgtaaatgtaagcagtggtttcacgaggcctgtgtccagtgtctccaaaaaccaatgctgttcggggatcgcttctatacttttatatgcagcgtgtgctcttctggtcctgagtatctcaagcggctgcccctgcagtgggtggacatagctcacctctgcctgtacaacttatcagtgatccataagaagaaatactttgatagcgagctggagctcatgacctatattaacgagaactgggatcgtctgcatcctggcgaactggcagacacgccaaagagcgagcgctacgagcatgtcctagaggcattgaacgactataagacaatggaagtgagcaacggtatagaaaaaaagggaaagaaaaaaagcgtgggtcggccccctggaccttacactcgcaaaatgatccagaaaacagctgagcctctcctggataaagagtctatctctgagaacccgactctggatctaccctgtagcataggtcgaacggagggcaccgctcattcttctaataccagtgacgtggattttactggggcttcatccgcaaaggagacgacaagttcttccatctctcgccactatggactgtctgacagtcgcaagcgaaccagaacgggccggagctggcctgctgctattcctcatttgaggagaaggaggggccggcttcctcggagggccctccagactcaaaatagtgagatcgtgaaggacgatgaaggcaaagaggattatcaattcgatgagttaaacaccgaaatcctgaacaatcttgctgaccaggagctgcaacttaatcatctcaaaaattctattacatcgtacttcggtgcagcaggacggattgcctgtggagaaaaatatcgcgtcctcgcccgcagagtgaccctcgatggtaaagtgcagtatctggtggaatgggaaggggccaccgcctcatag

SEQ ID NO: 194885 - DNA, 861 bp, synthetic construct
  misc_feature 1..861: note = Description of Artificial Sequence: Synthetic coding sequence
  source 1..861: mol_type = other DNA
atggtgtgcaccatctgccaggaggagtacagcgaggcccccaacgagatggtgatttgtgataagtgtggacaggggtatcaccaattgtgtcacaccccacatatcgattgcagcgtaattgactccgatgaaaagtggctttgtcgccaatgcgtctttgctactaccacgaagcgtggcggagccctcaaaaagggcccaaacgctaaagcgctgcaagttatgaaacagactctgccctacagtgttgccgacctggagtgggacgctgggcataaaacaaatgtgcagcagtgctactgctactgtggggggccaggcgactggtatctgaagatgttgcagtgctgcaaatgtaaacagtggtttcacgaggcttgcgtacagtgtctgcagaaaccaatgttgttcggagaccggttttacaccttcatttgcagtgtctgttcgagcgggcctgagtacttgaaacgcctcccgctccagtgggtcgatattgcccacttgtgcctctataacctcagcgttatacacaagaaaaaatacttcgattccgagcttgagcttatgacgtacattaatgaaaactgggacaggctgcatccaggcgagttggctgacactccgaaatctgagcgatacgaacacgtcctggaggcattaaacgactataagaccatgttcatgtccggtaaggagattaagaaaaagaagcatctgttcggactgagaatcagggttcctcccgtcccccccaacgtggccttcaaagccgagaaggagcccgaggggacatcacacgagttcaaattgaaggccgagcggcatccaaacctttacctgatccagggtaaatag

SEQ ID NO: 194886 - DNA, 1476 bp, synthetic construct
  misc_feature 1..1476: note = Description of Artificial Sequence: Synthetic coding sequence
  source 1..1476: mol_type = other DNA
atggtgtgcaccatctgccaggaggagtacagcgaggcccccaacgagatggtaatctgcgacaagtgcggtcagggctatcatcagctgtgccacactcctcacatagattgtagtgtgatagattcagacgagaaatggctgtgcagacagtgtgtgtttgccacaacgacaaagagaggaggcgccctcaagaaagggcccaacgccaaggccctgcaggtgatgaagcagaccctgccatattcagtggctgacctggaatgggatgcaggccataagacaaacgtccagcagtgctactgctactgcggtggtccaggggactggtacctcaaaatgctccagtgctgtaaatgcaaacaatggtttcacgaagcttgtgtgcagtgcctccagaagcccatgttgttcggggatagattctatactttcatttgtagcgtgtgttcatccgggcctgaatatctcaagcgtcttcccttacagtgggtagacattgcccatctgtgcctgtataatctcagcgtcatccacaaaaagaagtactttgattctgagcttgagcttatgacctatatcaacgaaaactgggaccggcttcaccccggcgaactcgcagacaccccaaaatccgaaagatatgagcacgtcctcgaggcccttaacgactacaagaccatgttcatgagtgggaaagagatcaagaagaaaaagcatctatttgggctgagaatacgcgtgcccccagttcctcctaacgtcgcctttaaggcagagaaagaacccgaagggacaagccatgaattcaagatcaaaggacgcaaggcttccaagcctatctcagactctagagaggtgtcaaacgggatcgaaaagaaagggaagaagaaaagcgtcgggcggcctcccggcccttacaccagaaaaatgatacagaagactgccgaaccgctcctggataaggaaagcatttctgagaatccaacactggatctgccttgctctattggacgcactgagggcaccgcccactcaagtaacacaagtgatgttgactttaccggcgccagttccgccaaagagaccactagttcaagcatctctcggcattacggcctgagtgatagtcggaagagaacacgcacggggagaagctggccagccgcaatacctcacctccgccggaggagaggcaggttgccgcgtcgcgccctccagacccagaactctgagatcgtgaaggacgacgaagggaaggaggattaccagttcgatgaactgaacaccgagattctgaacaacctggcggatcaggagctgcagctaaatcatctgaagaactccatcacaagctatttcggcgccgcaggtcgcatcgcgtgcggcgagaagtaccgggtgctggccagaagggtgactctggacgggaaggtacaatacctcgtggaatgggaaggagccaccgcttcttag

SEQ ID NO: 194887 - DNA, 1476 bp, synthetic construct
  misc_feature 1..1476: note = Description of Artificial Sequence: Synthetic coding sequence
  source 1..1476: mol_type = other DNA
atggtgtgcaccatctgccaggaggagtacagcgaggcccccaacgagatggtgatctgtgataaatgtggacagggttatcaccagctatgtcacactcctcatattgattgttctgttattgattcagatgaaaaatggttgtgtagacagtgtgtcttcgccactacgaccaagcgcggtggggctcttaagaaaggaccaaacgccaaggctttacaggtcatgaaacagactttaccgtattccgtagctgatctggaatgggacgccggccataagaccaatgttcagcagtgttattgctactgtggcggaccaggcgattggtatctgaaaatgctacagtgctgcaaatgtaagcagtggttccatgaggcttgtgtgcaatgtctgcagaaacctatgttgttcggagacagattctacactttcatctgctctgtgtgcagctcaggccccgaataccttaagcggctacccctacaatgggtggatatcgcacatctgtgcctgtataatctttcagtgatccacaagaaaaaatatttcgactccgagttggagcttatgacctacattaatgaaaactgggataggctgcatcccggtgagcttgcggatactccaaagagtgagaggtacgagcatgtcctggaggcactaaatgactataagacaatgttcatgtccgggaaagaaattaagaagaagaaacacctgtttgggctgaggatacgagtccctccagtcccgcctaacgtggcttttaaggccgaaaaggaaccagaaggcacatcacatgagttcaaaataaaaggtagaaaagccagtaagccaattagcgattccagagaagttagcaatggcatcgaaaagaaaggaaaaaaaaagagcgtcggtcggccccccgggccctacacccggaagatgattcagaagaccgcagagcctctactagacaaggagagcatcagcgagaaccctacactggatttgccttgtagcattggtaggaccgaaggcactgctcattccagcaatacgtcagacgtggattttacaggtgccagctccgctaaagaaacgactagctcaagtatctcgcgacattatggattgtcagacagtaggaagcgcacaaggactggcaggtcctggcctgcggcaatccctcacctgagacgacgacggggaaggttgcccaggcgggctctgcagacccagaattcggaaatcgtgaaggacgacgagggcaaggaggattaccaattcgacgagctgaacaccgagatcctgaacaacctggctgaccaggagctccagttaaaccacctgaaaaactccataaccagctacttcggagccgccggacgtatcgcctgtggagagaagtacagggtgctggccaggagggttacgctagatggaaaggtacagtacctggtagaatgggaaggcgccactgcatcttag

SEQ ID NO: 194888 - DNA, 1191 bp, synthetic construct
  misc_feature 1..1191: note = Description of Artificial Sequence: Synthetic coding sequence
  source 1..1191: mol_type = other DNA
atggccatgatcgagctgggcttcggccggcagaacttccaccccttaaaaaggaaaagttcactcctcctgaagctgatcgccgtagtttttgctgtgctgctgttctgcgaatttctcatctactacttggccatttttcagtgcaattggcctgaagtgaagactacagctagcgacggcgaacagactacccgggagccagtacttaaggccatgtttctggctgatacccacctgcttggagagtttctaggccattggctggacaagctgaggcgggagtggcagatggagagagctttccagacggccctctggcttttacagcccgaagtagtttttatcttaggggacatttttgatgaagggaagtggtcaacacctgaagcttgggcagatgacgtagagaggtttcagaagatgttccgccaccccagtcacgtgcagctcaaagttgtggccggtaatcacgatattggattccattacgagatgaacacctacaaagtggagcgcttcgagaaggtgttttcatccgagcgcctgttttcctggaagggcatcaacttcgtcatggtgaacagcgtggccttgaatggcgacggttgcggcatttgctccgagaccgaggccgagttgatagaagtttcacatcgactgaactgttcccgggaggctcggggctccagtaggtgcgggccagggcccctgctccccaccagcgcccctgtcctactccagcactatcccctttatcgtcgcagcgacgctaactgcagcggcgaagacgctgcccccgccgaagagcgagatatcccgttcaaagaaaactatgatgtgttatcccgggaggccagccagaagttgctgtggtggctccagcctcgtctagtattaagcggtcacacacatagcgcttgtgaggtgcatcacggagggagagtaccagaactttctgtcccatcattttcttggagaaaccggaataaccctagtttcattatgggctcaattacccctacggattacaccttgagtaagtgttatctcccgcgcgaagatgtcgtgctgatcatttattgcggggtggtcggctttcttgtggtgctgactctcacccattttggtctcctagctagcccctttctctccgggctgaatctgctgggaaagaggaaaacgagatag

SEQ ID NO: 194889 - DNA, 1002 bp, synthetic construct
  misc_feature 1..1002: note = Description of Artificial Sequence: Synthetic coding sequence
  source 1..1002: mol_type = other DNA
atggccatgatcgagctgggcttcggccggcagaacttccaccccctgaagaggaaatcaagcctcctgctgaaactgattgccgtagtttttgcagttcttctcttctgtgaattcctaatttactatctcgcgatttttcaatgcaattggccagaagttaagaccacggcttcagatggggagcaaaccacaagggagcccgtactcaaagctatgtttctagcagacacacacctgcttggggaattcctggggcattggttggataaactgcggagggagtggcagatggaacgagcattccagactgcgctgtggttactgcagcccgaagtggtgtttatcctaggcgacatcttcgatgagggcaagtggtcaactcccgaagcgtgggcagacgacgtcgaacggtttcaaaagatgtttcgacatccttcgcacgtgcaactgaaggttgtcgctggcaatcatgatatcgggttccactatgagatgaatacatataaggtggagcgctttgagaaagtctttagctccgagaggctgttttcatggaagggaattaatttcgtcatggtgaactctgttgcattaaacggggacggatgcggtatctgttccgagaccgaagctgaattgattgaggtttctcatcgtttaaactgctctagagaactcttgtggtggttgcagcccagattggtgctgtccggtcatacgcactccgcctgtgaagttcaccatgggggccgggtgcctgaactgagtgtgccatccttttcctggagaaacagaaataatccgagttttatcatgggcagtatcactcccacagactataccctgagcaagtgctatctgcctagggaggatgtggtgttgatcatttattgcggggtggtgggatttcttgttgtgcttaccttgactcacttcgggttgctggcaagcccctttttgtctgggctgaatcttctagggaagagaaagactcggtag

SEQ ID NO: 194890 - DNA, 732 bp, synthetic construct
  misc_feature 1..732: note = Description of Artificial Sequence: Synthetic coding sequence
  source 1..732: mol_type = other DNA
atggagcgggccttccagaccgccctgtggctgctgcagcccgaggtggtgttcatactgggcgacattttcgacgaaggtaagtggagtacacctgaggcctgggcagatgacgttgagcgcttccagaagatgttccgacatcctagccatgtgcaactcaaagtcgtcgctggcaatcacgacattggattccactacgaaatgaacacgtacaaggttgaacgatttgagaaagtctttagttctgagagactgtttagctggaagggcattaattttgtcatggtgaacagtgtcgccctgaacggagacggctgtggtatctgttcagaaaccgaagctgagctgatcgaggtctcccatcggctcaactgctcaagggaagcacgcgggtcctcccgctgtggccccggtccccttttgcccacaagcgccccagtcctccttcagcactaccctctgtaccgccggagcgatgccaattgctccggcgaggacgccgctccagcggaggaacgggacattccattcaaagaaaattacgatgtgctgtcgagagaggctagccagaaactactctggtggttgcaacctaggctggtgctgagtgggcacacacacagcgcctgtgaggtccaccacggcgggcgtgtcccggaactctctgtcccttcattcagctggagaaaccgaaacaaccccagtttcataatgggtaccgatgcatag

SEQ ID NO: 194891 - DNA, 1194 bp, synthetic construct
  misc_feature 1..1194: note = Description of Artificial Sequence: Synthetic coding sequence
  source 1..1194: mol_type = other DNA
atggccatgatcgagctgggcttcggccggcagaacttccaccccctgaagagaaagtcatctctcttactgaagctgatcgcggttgtcttcgcggtgctgctgttttgtgagttcttgatttactacctcgccattttccagtgcaattggccggaggtcaagaccacagcctccgacggtgagcagaccacgcgcgaacccgttctgaaggccatgtttctggctgatacacacctccttggcgagttcctgggtcactggcttgataaacttcgcagggagtggcagatggagcgagctttccagacagcactgtggctgttgcagccggaagtggtcttcattctaggggatatctttgacgaggggaaatggtccaccccggaagcctgggccgacgacgtggaaaggtttcagaaaatgtttagacatccatcacatgtgcaactgaaagtagtggcaggaaatcacgatattggcttccactatgagatgaatacttataaagtagagagatttgaaaaagttttctcctctgaaaggctgttctcatggaaaggaatcaacttcgtaatggtgaattctgtggcattaaatggcgacgggtgtgggatctgctccgagacagaggcagaacttatagaggtctcccacaggctcaactgctcccgtgagcaagcccggggcagttctagatgcgggcccgggccactgctccctacttccgcaccagtcctgctgcaacactatcctctgtaccgacggtccgacgccaattgctctggcgaggatgccgccccagccgaagaaagagacatcccttttaaggagaattatgacgtgctgtcacgcgaagcatctcagaagttactttggtggcttcaacccaggctggtgctgtccggacacacccacagtgcttgcgaagtccatcatggaggacgggtgccagagcttagtgtaccttcattctcttggcggaacaggaataatccttcattcatcatgggttctatcacgccaaccgactacactctgtccaagtgctatctgccaagggaagatgtagtccttatcatctactgcggagtggtggggtttttggtggtgctgacgctcacccattttgggctgctggcaagtccatttctaagcggcctgaatttattgggcaaaagaaagacacgttag

SEQ ID NO: 194892 - DNA, 1026 bp, synthetic construct
  misc_feature 1..1026: note = Description of Artificial Sequence: Synthetic coding sequence
  source 1..1026: mol_type = other DNA
atggccatgatcgagctgggcttcggccggcagaacttccaccccctaaaacgcaagtcatcattgctgctgaaacttatcgccgttgtgtttgcggtactccttttttgtgaatttcttatatactacctagctatatttcagtgtaactggcctgaagttaaaacaacggcctctgacggcgaacagacaaccagagagccagttcttaaggctatgttcctggctgatactcacctcttaggcgaatttctgggacactggctcgacaagctgcgacgggagtggcagatggagcgcgccttccagacagctctgtggcttctgcagccggaagtggtgtttatcttgggagacatctttgatgaaggaaagtggtcaacacctgaagcgtgggccgatgacgtggaacggttccagaaaatgtttcgccacccaagtcacgttcaactcaaagtggtggctggaaaccacgacattggatttcactatgagatgaatacttacaaggtggagaggttcgaaaaggtgttctcttcagaacggttgttttcatggaaagggatcaactttgtaatggtaaattccgtggccttgaatggggacggctgtgggatttgcagtgagacggaagccgagctaattgaggtttctcatagactgaactgtagtcgtgagcaggcccgcgggtctagccgctgcggccctggccccctgctccctacatccgcccctgtcctattacagcactacccgctgtaccgaaggtctgatgccaattgctctggggaagatgcagctcctgccgaggagcgcgatattcctttcaaggaaaattacgacgtgctcagccgcgaggcttcccagaagctcctatggtggcttcagccaagattggtcttgagtggtcatacacacagcgcgtgcgaagtgcatcatggaggtagagtccccgagttatcagtcccatctttctcttggcgcaaccggaacaacccgagctttattatgggcacagatgcctag

SEQ ID NO: 194893 - DNA, 1191 bp, synthetic construct
  misc_feature 1..1191: note = Description of Artificial Sequence: Synthetic coding sequence
  source 1..1191: mol_type = other DNA
atggccatgatcgagctgggcttcggccggcagaacttccaccccctcaaacggaagtccagtctgctcctgaaactgatagctgtggtgttcgctgtgctgctgttctgcgaattcctgatttactacctcgctatttttcagtgcaattggccagaggtaaaaacgactgccagtgacggagaacagacaactcgcgagccagtcctgaaggccatgtttctggcggatacccatctgttgggcgagttcctgggccattggctggacaaattgcgtagagagtggcagatggagcgcgcttttcagactgccctttggttgctacagccggaggtggttttcattcttggcgatatctttgatgaaggtaaatggtccaccccagaagcctgggccgacgatgttgaaagattccagaaaatgttccgccacccatcgcacgtgcagctcaaggtggtggccggcaatcacgacatcggatttcactacgaaatgaacacgtacaaggtggagcgttttgagaaagtgttttcttccgaaaggctgttctcatggaaaggaattaatttcgtaatggtgaattctgtcgccctcaatggagatggatgtggtatttgcagcgagaccgaagccgagcttattgaggtttcccacaggttgaattgttctagggaagcacgaggatcatccaggtgcggacctggccccctcttgccaacatcagcgccagtccttctccagcactaccctctctaccgccgaagtgacgcaaactgttccggggaagatgcagctcccgctgaagaacgggacatacccttcaaagaaaactatgatgtgctaagtcgcgaggcatcacaaaaactcctttggtggctacagcctcgcctcgttctgagcggtcacacccattccgcgtgcgaggtgcaccacggtgggcgcgtcccggagttgagcgttcctagtttctcatggaggaacagaaacaacccatcatttatcatgggcagtataacacccacagattatactctcagcaagtgctatctccctcgggaggacgtcgtgctgattatctactgcggcgtggttggctttttagtcgtcctgacacttacccatttcgggttgctggcctctccttttctctccggcttgaacctgctgggcaagcgcaagacacgttag

SEQ ID NO: 194894 - DNA, 360 bp, synthetic construct
  misc_feature 1..360: note = Description of Artificial Sequence: Synthetic coding sequence
  source 1..360: mol_type = other DNA
atgtggcggagccggtgggacgccagcgtgctgaaggccgaggccctcgccctgcttccttgcggcttagggatggcatttagccagtctcatgtgatggccgctaggcgtcatcaacactcacggcttattattgaagtagacgaatacagcagtaatcctacccaggccttcacgttttataatattaaccagggaagatttcagccaccccacgttcagatggtggatccggtcccacatgatgctcctaagccccctggctatacgcgcttcgtatgtgtctccgacacacattcccgcaccgacccaatccaaatgccctacggcgatgtgcttatccacgccggagacttctag

SEQ ID NO: 194895 - DNA, 663 bp, synthetic construct
  misc_feature 1..663: note = Description of Artificial Sequence: Synthetic coding sequence
  source 1..663: mol_type = other DNA
atgccctacggcgacgtgctgatccacgccggcgacttcaccgagctcggcttgcccagtgaagtgaagaagtttaacgaatggcttgggtctctcccatatgagtacaagatcgttatcgctgggaaccatgagttaaccttcgatcaggaattcatggccgatctgataaagcaggatttctattattttcccagtgtaagcaagctcaagccggaaaattacgagaatgtgcagtcactgttgaccaactgtatttacttacaggacagtgaggtcaccgtccggggcttccgtatctatggaagtccctggcagccctggttctacgggtgggggttcaacctcccgcgtggccaggcactgctggagaagtggaacctgattccagagggcgtggatatcttgattactcacggccctccactgggcttcctggactgggtgccgaagaaaatgcagcgcgtgggctgcgtggaactgctgaataccgtacagagaagggtccagcccagactgcacgtgttcggccacatacatgagggctacggggtgatggcggacggcaccacaacatatgtgaacgcctctgtctgcaccgttaactaccaacctgtgaaccccccaattgtaatcgatctgcctacaccaaggaacagttag

SEQ ID NO: 194896 - DNA, 981 bp, synthetic construct
  misc_feature 1..981: note = Description of Artificial Sequence: Synthetic coding sequence
  source 1..981: mol_type = other DNA
atgtggcggagccggtgggacgccagcgtgctgaaggccgaggccctcgcactcttgccttgcggactgggcatggcgttttcccaatcccacgtaatggcggctcggagacatcaacattcccgcttgatcatcgaagtggacgaatactcctccaacccaacccaggccttcaccttctacaacatcaaccagggccggtttcagccccctcacgtgcagatggtggaccctgtcccacatgatgctccaaaaccacctggatatactagattcgtttgcgtgagtgacacccactctcgaaccgatccaattcaaatgccctatggggatgtcctcattcatgcgggcgacttcactgagcttggcctgccctctgaggttaaaaagttcaatgaatggctcggctccctgccttacgagtacaaaatcgtcatcgccgggaaccacgagctgacctttgaccaagaattcatggcagacttgatcaagcaagacttctattactttccctctgtgagcaagctgaaaccagaaaactatgaaaacgttcagtcccttttgaccaactgcatctaccttcaggactctgaagttacagttcggggcttcaggatttacggcagtccatggcagccgtggttctatgggtggggattcaacctgccccgcggacaggcccttctggagaagtggaatctgattcccgaaggggttgatatcctaataacacacggaccaccactgggctttctggattgggtaccaaagaaaatgcagcgggtgggatgcgtcgaactcttgaataccgtgcaacggagggttcaaccccgattgcacgtctttgggcatatccatgaaggctacggtgtcatggctgatggtaccaccacctacgtgaacgcgtccgtttgtactgtaaactaccagccagttaaccccccgattgtgatcgaccttccaacccctcgcaattcatag

SEQ ID NO: 194897 - DNA, 507 bp, synthetic construct
  misc_feature 1..507: note = Description of Artificial Sequence: Synthetic coding sequence
  source 1..507: mol_type = other DNA
atggccgacctgatcaagcaggacttctactacttccccagcgtgagcaaactgaaacctgagaattatgagaacgtgcagagtctgctcaccaattgcatctacctccaggattcagaggtgaccgtccggggcttccggatctatgggtccccttggcagccgtggttctatgggtgggggtttaacctgccccgcggacaggctttgctggaaaagtggaacctgatccccgaaggcgtcgatattttaatcacacacgggcctcccctcgggtttcttgattgggtgcctaagaagatgcaacgagtgggatgcgtggagctccttaacactgttcagcgtcgagtccagccaaggctccacgtattcggccacatacacgagggctatggcgtgatggccgacggaacgacaacatatgtcaacgcctcggtgtgcaccgtgaactaccagccggtaaacccacccatcgttatcgatctcccaaccccaaggaattcctag

SEQ ID NO: 194898 - DNA, 981 bp, synthetic construct
  misc_feature 1..981: note = Description of Artificial Sequence: Synthetic coding sequence
  source 1..981: mol_type = other DNA
atgtggcggagccggtgggacgccagcgtgctgaaggccgaggccctagccctcctgccctgtggcctggggatggccttctctcagtcacacgtgatggctgcgaggcgtcaccagcactcccggttgatcattgaggtagacgagtattcgagtaaccccacccaagcattcacattttacaacatcaatcaaggacggtttcagcctccccatgtccagatggtcgacccagtgccgcacgacgctccgaagcccccggggtatacccgcttcgtttgtgtgtccgacacccacagtcggactgacccaatccaaatgccctacggcgatgtactaatccacgccggagatttcaccgagctgggcctgccatcagaggttaaaaagtttaatgagtggcttgggagcctgccctacgaatacaagatagtcattgccggaaaccacgagctgacattcgatcaggagtttatggccgaccttattaagcaggacttttattactttccatctgtaagcaaattgaaacctgaaaattacgagaatgttcagtctctgttgacgaattgtatttacctccaggactcggaagtcaccgtgcgggggttccgcatctacggcagcccttggcagccgtggttctacggctgggggtttaacttgccccggggccaggcgcttctcgaaaagtggaacctgatccctgagggggtcgacatcctcattacccatggccccccacttggatttctcgattgggtccccaagaaaatgcaacgagtcggttgcgtggaattgttgaacactgttcagagacgggtgcagcctcgcctccacgtattcggccacatccatgaaggttacggtgtcatggccgacggcactacgacatatgtgaacgccagtgtttgtactgtcaattatcagcctgtgaacccccctatcgttatagacttgccaaccccgagaaatagctag

SEQ ID NO: 194899 - DNA, 225 bp, synthetic construct
  misc_feature 1..225: note = Description of Artificial Sequence: Synthetic coding sequence
  source 1..225: mol_type = other DNA
atgtggcggagccggtgggacgccagcgtgctgaaggccgaggccctggccctgctgccatgcggactggggatggctttttcccaatcccacgtaatggcagcccggcggcaccagcatagccgcctaattatcgaggttgatgaatattccagcaaccccacacaggcatttactttctacaacatcaaccaaggacgattccagcctcctcacgttcagtag

SEQ ID NO: 194900 - DNA, 1080 bp, synthetic construct
  misc_feature 1..1080: note = Description of Artificial Sequence: Synthetic coding sequence
  source 1..1080: mol_type = other DNA
atgaacggccgggagacccagagcgtgagccggagcggcggcggccccgggtgtggtggaggcagcggcggtcgttgcaggggaggcagacgccgctccatgtggcggtctcgttgggacgcgagcgtgctgaaggctgaagctctggcactgctgccatgcggcctagggatggccttcagccaatctcacgtcatggccgcaaggcgtcaccagcatagccggttaattattgaggttgacgagtactcttcaaatcctacacaggctttcactttctataatattaaccagggtagattccagcccccacacgtacagatggtggatcccgtgccacatgatgcacctaagccgccggggtacacccgtttcgtatgtgtgtctgacactcatagccgaacagatccaatccagatgccgtacggcgacgtcttgattcacgccggtgacttcaccgagctgggattgccctcagaggttaagaagtttaatgaatggttgggctccctaccttatgagtacaagatcgtcatcgctggcaaccacgagttgacctttgaccaagaatttatggctgatttgattaaacaagacttttactacttcccctccgtgtccaagctcaaaccggagaactacgagaacgtgcaatccttactcactaattgtatctacctgcaggactcggaagtcacagtaagaggattcaggatctacggctccccctggcaaccatggttctacgggtgggggttcaatctgccaagggggcaggccctgctcgagaagtggaacctgatccccgagggggtggatatcctaattacccatggaccgccgttgggattccttgactgggtgcccaaaaagatgcagcgagttggatgcgttgagctccttaatactgtgcagcggagagtccagcccaggctgcacgtgttcggacacatacacgagggctacggggtgatggctgacggaaccacaacttatgtgaatgcctcagtgtgcaccgtgaactaccaacctgtgaacccccccatcgtcattgatcttcctaccccaaggaattcatag

SEQ ID NO: 194901 - DNA, 981 bp, synthetic construct
  misc_feature 1..981: note = Description of Artificial Sequence: Synthetic coding sequence
  source 1..981: mol_type = other DNA
atgtggcggagccggtgggacgccagcgtgctgaaggccgaggccctggctctcctaccctgcggtctgggtatggcattttcgcaatcacacgtaatggcggccaggagacatcagcattcccgccttatcatagaggtggatgagtactctagtaaccccacccaggccttcacattctataacattaatcagggtagatttcagcctccccatgtgcagatggtcgaccccgtgcctcatgacgccccgaagcctcccggctacacaagattcgtctgtgtctcagatacacatagccgcaccgatccaatccagatgccatacggggatgtgctgattcacgctggggattttactgaactcggcttgccctccgaggtcaagaagtttaacgaatggctgggcagcctcccgtacgagtataagatcgttatagccggtaatcatgaactaacctttgaccaagagttcatggcggatttaataaagcaggacttctactatttcccttccgtgtcaaaactgaaacctgaaaactacgaaaacgtgcagtcactgctgacgaattgtatttacctgcaggattcggaagttaccgttagaggcttccgcatttatgggagtccgtggcagccatggttctacggctggggctttaatcttcccagaggccaggcgcttttagagaaatggaatttgatacccgagggggttgatatacttataacccacgggcccccgcttggctttctcgactgggtacctaaaaagatgcagcgagtgggatgtgttgagctgctcaacaccgtgcagcgaagggttcagcccagactccacgtcttcggacacatccacgagggatatggcgttatggccgatggcacaactacatacgttaacgcatccgtgtgtactgtgaattaccagccggtcaatcccccgattgtcattgacctcccaacgcctaggaactcctag

SEQ ID NO: 194902 - DNA, 915 bp, synthetic construct
  misc_feature 1..915: note = Description of Artificial Sequence: Synthetic coding sequence
  source 1..915: mol_type = other DNA
atgtggcggagcttcagccagagccacgtgatggccgcccggcggcaccagcacagtagattgatcatagaggttgacgaatacagtagcaacccaacccaggcgtttactttctataatatcaaccagggtcgttttcaaccacctcacgtgcagatggttgatcctgtgccacatgatgcccctaagccgcctgggtatacacggttcgtttgcgtgagcgacacccattccagaactgatcccattcagatgccctacggcgatgtgctgatacatgccggggatttcaccgagctgggtttgccaagtgaagtaaaaaagttcaatgagtggttagggagcttgccttatgagtataagatcgtcattgcagggaatcacgaattgacctttgatcaggaattcatggcagatctgatcaaacaagacttttattatttcccgtccgtcagtaagctgaagccagagaattatgagaacgtgcagagcctgttgaccaactgcatctacttgcaagactcagaagtgacagtcagaggcttcaggatttatggctctccctggcagccctggttctatggatggggattcaacttgccacgggggcaggctctcctcgagaaatggaaccttattcccgagggagtggacatactgatcacccacgggcctcccctggggtttctggattgggtgcccaagaaaatgcagcgtgtcggctgcgtcgaactgcttaatacagtgcagcgcagagtccagccccgcttgcatgtatttggacatatacatgaaggatatggcgtaatggcggatggaactaccacctacgtaaacgccagtgtctgcaccgtcaattatcagcccgtcaatcccccaattgtaatcgacttacccaccccaagaaatagctag

SEQ ID NO: 194903 - DNA, 885 bp, synthetic construct
  misc_feature 1..885: note = Description of Artificial Sequence: Synthetic coding sequence
  source 1..885: mol_type = other DNA
atggcccacggcatccccagccagggcaaggtgaccatcaccgtggatgaatacagctccaacccgacacaggcattcacccattacaatattaaccagagccggtttcaacccccccacgtgcacatggtggacccgattccatacgacactcctaaacccgcagggcataccagatttgtttgcatatcagatacccattcccgaaccgacgggatccaaatgccgtacggtgatatccttctgcatactggagatttcaccgagctgggtctgccgagcgaggtcaaaaagtttaatgattggttaggaaatctcccttatgagtataagattgtcatcgccggaaatcacgaactgacttttgacaaggagttcatggcggacttggtcaaacaggattactatcggttcccctctgtcagtaaactaaagcctgaggatttcgataacgtgcagagcctactaactaactccatctatctccaagacagcgaggtcacagtaaagggtttccggatctacggagctccatggacaccttggttcaatggctggggcttcaatctccctcgcggccaatccttactcgacaaatggaatcttatacctgaggggattgacattctgatgacacacgggcctccactgggttttagagactgggttcccaaggagctgcaacgcgtcggttgcgtggagttgctgaacacagtgcaaaggcgggtgcgccccaagctccatgtattcggaggaattcacgaggggtatggcataatgactgatggctacaccacctatattaacgccagtacatgtacagtatcattccagccgactaaccctcccattatttttgaccttcctaacccacaaggaagctag

SEQ ID NO: 194904 - DNA, 834 bp, synthetic construct
  misc_feature 1..834: note = Description of Artificial Sequence: Synthetic coding sequence
  source 1..834: mol_type = other DNA
atggcccacggcatccccagccagggcaaggtgaccatcaccgtggatgagtatagttcaaacccaacccaggcctttactcactacaacataaaccagagccggttccagcctccccatgtgcatatggtagaccccattccttacgatacaccaaagcctgctggtcataccaggtttgtgtgcatcagcgacacccactctcgaacggacggaatacagatgccttatggcgacattttgctgcatacaggtgatttcacagagcttggcctgcctagtgaagttaaaaagttcaacgattggctcggaaatttgccctatgagtacaaaatagtgatcgccggaaatcatgagcttacctttgataaagagtttatggcagatctagtgaagcaggattactataggttcccttctgtatcgaaacttaaacctgaggacttcgacaatgtgcagtctctcctgaccaattccatctatcttcaggattccgaagtgacagtgaaaggttttcgcatttacggagctccatggacgccctggtttaacggctggggttttaatttacctcgtggacaatctctgttagacaagtggaacctcatccctgagggaatcgatatcctgatgactcacggcccccccttaggctttcgggattgggttcctaaggagctacaacgcgtgggctgtgttgagttactgaacaccgtacagcgcagggtgagacccaagctacacgtctttggggggatccatgaggttaatcctgtgagcatttcaaaagcgttgcggacaaagatctgctcactaccatccaaaacatcatag

SEQ ID NO: 194905 - DNA, 132 bp, synthetic construct
  misc_feature 1..132: note = Description of Artificial Sequence: Synthetic coding sequence
  source 1..132: mol_type = other DNA
atggcccacggcatccccagccagggcaaggtgaccatcaccgtggacgaatacagtagcaatccgacacaggcctttacccactacaacatcaatcagagtagattccagccaccccatgtacacatgtag

SEQ ID NO: 194906 - DNA, 186 bp, synthetic construct
  misc_feature 1..186: note = Description of Artificial Sequence: Synthetic coding sequence
  source 1..186: mol_type = other DNA
atggaccccaactgcagctgcgccaccggcggcagctgcacctgcaccgggtcctgtaaatgtaaggagtgtaaatgtacgtcatgcaagaaaagctgctgttcctgctgcccaatgtcttgcgctaagtgcgcccagggctgcatctgcaagggcgcaagtgaaaaatgttcctgttgtgcctag

SEQ ID NO: 194907 - DNA, 186 bp, synthetic construct
  misc_feature 1..186: note = Description of Artificial Sequence: Synthetic coding sequence
  source 1..186: mol_type = other DNA
atggaccccaactgcagctgcaccaccggcggcagctgcgcctgcgctgggtcttgtaagtgcaaagaatgcaaatgtactagctgcaaaaaatgttgctgctcatgttgccctgtgggctgtgcaaagtgcgcccaggggtgtgtgtgtaagggctcttcagaaaagtgccgatgctgtgcatag

SEQ ID NO: 194908 - DNA, 186 bp, synthetic construct
  misc_feature 1..186: note = Description of Artificial Sequence: Synthetic coding sequence
  source 1..186: mol_type = other DNA
atggaccccaactgcagctgcgccaccggcggcagctgcacctgcgctggctcctgtaagtgtaaggagtgcaagtgcaccagctgtaagaagtcctgttgcagttgttgcccagtaggctgcgcgaagtgtgcgcagggatgtgtgtgtaaaggcgcatccgaaaagtgttcttgttgcgcctag

SEQ ID NO: 194909 - DNA, 384 bp, synthetic construct
  misc_feature 1..384: note = Description of Artificial Sequence: Synthetic coding sequence
  source 1..384: mol_type = other DNA
atggaccccaactgcagctgcgccaccggcggcagctgcacctgcgcagggagctgcaagtgtaaagaatgcaagtgtacatcctgtaaaaagtctgagtgtggagcgatttcccggaacctgggactatggctccgactcggcggcaattctcgactggccctctccgcctctttctggggcactggcctcagcctgccgtcactgccggtgtcttttcctctgcaggccttctgtccaaaatttcgatggggtagaaccgcattcttcagttgggacaccaacccgaactgtactccctacggttttcggacagaactttgtcagacgaagaaaagtattctgtgggtctgggtgctttcctccagtcaggcttgctactag

SEQ ID NO: 194910 - DNA, 186 bp, synthetic construct
  misc_feature 1..186: note = Description of Artificial Sequence: Synthetic coding sequence
  source 1..186: mol_type = other DNA
atggaccccaactgcagctgcgccgccggcgtgagctgcacctgcgcaggttcctgtaagtgtaaggagtgcaagtgtacctcttgcaagaaatcctgttgttcctgctgccctgtcggctgcagcaagtgcgctcaaggatgtgtttgcaaaggggccagcgagaagtgtagttgttgtgattag

SEQ ID NO: 194911 - DNA, 189 bp, synthetic construct
  misc_feature 1..189: note = Description of Artificial Sequence: Synthetic coding sequence
  source 1..189: mol_type = other DNA
atggaccccaactgcagctgcgccgccgccggcgtgagctgcacctgcgccgggtcctgcaagtgcaaggaatgtaaatgcactagttgtaagaaatcatgttgcagttgctgtcctgtggggtgtagtaagtgtgcccaggggtgcgtctgtaagggtgccagtgagaagtgttcctgttgcgactag

SEQ ID NO: 194912 - DNA, 189 bp, synthetic construct
  misc_feature 1..189: note = Description of Artificial Sequence: Synthetic coding sequence
  source 1..189: mol_type = other DNA
atggaccccaactgcagctgcgccgccgccggcgtgagctgcacctgcgcgtcctcatgcaagtgcaaggagtgcaagtgcaccagttgcaagaaatcttgctgctcttgttgcccggtcggctgtgccaagtgtgcccagggctgcatttgcaagggtgcgtccgaaaaatgtagctgttgtgcatag

SEQ ID NO: 194913 - DNA, 186 bp, synthetic construct
  misc_feature 1..186: note = Description of Artificial Sequence: Synthetic coding sequence
  source 1..186: mol_type = other DNA
atggaccccaactgcagctgcgccgccggcgtgagctgcacctgcgccagcagctgcaagtgcaaggaatgcaagtgcacatcctgcaagaagagctgttgctcctgctgtccagtagggtgtgctaagtgcgctcagggctgcatctgcaaaggagcaagcgaaaagtgtagttgttgtgcatag

SEQ ID NO: 194914 - DNA, 186 bp, synthetic construct
  misc_feature 1..186: note = Description of Artificial Sequence: Synthetic coding sequence
  source 1..186: mol_type = other DNA
atggaccccaactgcagctgcgaggccggcggcagctgcgcctgcgccggcagctgcaagtgcaagaaatgtaagtgcacgtcttgtaaaaaatcatgttgcagctgctgtcccttaggatgtgcaaagtgtgcccagggatgtatttgtaaaggggcgagcgagaagtgttcatgctgtgcgtag

SEQ ID NO: 194915 - DNA, 186 bp, synthetic construct
  misc_feature 1..186: note = Description of Artificial Sequence: Synthetic coding sequence
  source 1..186: mol_type = other DNA
atggaccccaactgcagctgcagccccgtgggcagctgcgcctgcgcaggaagctgtaaatgcaaagaatgcaaatgtacgagctgtaaaaaaagttgctgctcttgctgtcccgtaggatgcgccaaatgtgcccaggggtgtatatgcaaggggactagtgacaagtgttcctgttgtgcttag

SEQ ID NO: 194916 - DNA, 186 bp, synthetic construct
  misc_feature 1..186: note = Description of Artificial Sequence: Synthetic coding sequence
  source 1..186: mol_type = other DNA
atggaccccaactgcagctgcgccgccggcgacagctgcacctgcgccggttcatgtaaatgcaaggagtgtaaatgcacaagttgcaaaaaatcctgctgctcatgctgcccagtggggtgtgccaagtgcgcacagggatgcatctgtaagggtgctagcgataagtgcagctgctgcgcatag

SEQ ID NO: 194917 - DNA, 207 bp, synthetic construct
  misc_feature 1..207: note = Description of Artificial Sequence: Synthetic coding sequence
  source 1..207: mol_type = other DNA
atggaccccgagacctgcccctgccccagcggcggcagctgcacctgtgcggatagttgtaagtgtgagggttgtaagtgcacaagttgcaagaaaagttgctgcagttgttgccctgccgaatgcgaaaaatgcgctaaggactgtgtatgtaaagggggagaggctgcagaagccgaggccgagaaatgcagctgctgccagtag

SEQ ID NO: 194918 - DNA, 687 bp, synthetic construct
  misc_feature 1..687: note = Description of Artificial Sequence: Synthetic coding sequence
  source 1..687: mol_type = other DNA
atgaagatcaagcccggcttcatgggcaaggccacccccccctacgacgtacagttccatatggaggccagtgtggagaactgcatcattgtgtcgatgaatacagcagatcctggctcgcaggggatcacccactcattgcttctccaggtgatcgatgataagggctccatcctgccaccgaacactgaagggaacattggtatcaggatcaagcccgtgagaccggtctccctgtttatgtgctacgagggggatcccgagaaaacggccaaagtagagtgcggcgatttttataatactggagaccggggcaagatggatgaggagggctacatctgcttcctgggtcggtccgatgacatcatcaatgcttcaggttaccggattggcccagctgaagtcgaatctgcactggtagaacatcccgccgtggctgagtctgccgtggtgggttctccagaccccattaggggcgaagtagtgaaagctttcatcgtcctaaccccacagtttctctcccatgacaaagaccagctcacaaaggagttacagcaacacgtcaagagtgtcaccgccccatataaatacccccgtaaggtagagtttgtctcggagcttcccaagactatcactgggaaaatagaacggaaggagttgaggaagaaggagactggccagatgtag

SEQ ID NO: 194919 - DNA, 1527 bp, synthetic construct
  misc_feature 1..1527: note = Description of Artificial Sequence: Synthetic coding sequence
  source 1..1527: mol_type = other DNA
atggaggagggccccctgcccggcggcctgcccagccccgaggacgcaatggtgacagaactgctgtcacccgagggcccttttgcatccgagaatatcggcttgaaggcgcccgttaagtacgaagaagacgaatttcacgtatttaaagaagcttaccttggccctgcagaccctaaggagcctgtgctccacgctttcaaccctgcactgggcgccgactgtaaagggcaggttaaggccaagctcgccgggggtgactccgacggcggcgaactgctgggcgaataccccgggattccagaactttctgcactggaagacgttgcactcctgcaggccccccagcctccggcatgtaatgtgcactttctgagcagcctattaccggcccatagatcccctgccgtgttgccactcggggcatgggtactggaaggtgcgagccatcctggcgttcggatgatacctgtggaaattaaggaggctggcggaaccactacaagcaataaccctgaggaagccactttgcagaacctgttggcccaggagagctgttgtaagtttccaagctctcaagaactggaagacgcctcatgttgttcactcaagaaggactcgaaccctatggtcatctgccagcttaagggaggaacacagatgctctgtatcgataacagcaggactcgggaactcaaggctcttcatttagtgccacaataccaggaccaaaacaattacctacagagtgatgtgcctaagcccatgactgccctggtgggccgctttctccccgcttctaccaaactgaatttgatcacgcagcaacttgagggagccttaccttctgtcgtgaacggaagtgcatttccctcaggcagcaccctgcctggaccccccaaaattacactggccggatactgtgattgtttcgcctcaggtgatttttgtaataactgtaattgcaacaactgctgcaataacctgcaccacgacatcgagcgcttcaaagccatcaaagcgtgcttaggaaggaacccagaagctttccagccaaagataggcaaaggtcagctgggcaatgtcaaacctcagcataataaaggatgtaactgtaggagatctggctgcctgaagaactattgcgaatgttatgaggctcagatcatgtgtagcagcatttgtaaatgtatcggttgcaaaaattatgaggagagccccgagcggaagacactgatgagcatgcccaattacatgcagacaggggggctagaaggaagccactacctcccccccaccaagttctccggactgccaaggttttctcatgatcggaggccctcctcgtgtatttcctgggaagtggtggaagctacttgcgcctgcctcctggcacagggcgaagaagccgagaaggaacattgtagcaagtgtttggctgagcagatgatcctggaggaattcgggaggtgtctttcgcagatactccatactgaattcaagagtaagggtttgaaaatggagtag

SEQ ID NO: 194920 - DNA, 756 bp, synthetic construct
  misc_feature 1..756: note = Description of Artificial Sequence: Synthetic coding sequence
  source 1..756: mol_type = other DNA
atggaggagggccccctgcccggcggcctgcccagccccgaggacgccatggttaccgaactccttagccccgaagggccttttgcgtcagaaaatatcggcttgaaagccccagtaaagtatgaggaagacgagtttcacgttttcaaggaggcatacttgggtccagccgaccctaaggaaccagtgcttcatgcattcaaccccgccctgggcgcagactgcaaaggccaggtcaaggccaaactggcgggtggcgacagcgacgggggggagctgctgggtgagtacccgggaatccccgagttgagcgccctggaggatgtcgctctccttcaggccccccagccacccgcatgtaatgtacattttctcagcagtctgctgccggcacatcgatcccctgcagtgctgcccctaggagcctgggtactcgagggtgccagtcacccaggcgtgagaatgatccccgttgagattaaggaagccggcggaacaacaacatcaaacaacccggaggaggcgaccctgcagaatctattagcgcaggaaagctgttgcaagttccccagcagtcaagagttagaggatgccagctgctgttccctgaagaaggacagcaacccaatggtcatttgccagctaaaaggaggcacccagatgctctgcatcgacaattcccgcacgagagagttgaaggcactgcatttggtgccacaatatcaggatcagaataactacctgcagagcgcatag

SEQ ID NO: 194921 - DNA, 921 bp, synthetic construct
  misc_feature 1..921: note = Description of Artificial Sequence: Synthetic coding sequence
  source 1..921: mol_type = other DNA
atggaggagggccccctgcccggcggcctgcccagccccgaggacgccatggttacagagctgctgtctcctgaggggccgttcgcgtcagagaacattgggctcaaggccccagttaaatacgaagaagacgagttccatgtctttaaagaggcctacctaggccccgctgacccaaaggagcctgtcctgcacgcatttaatcctgcccttggtgctgactgtaaaggacaggtgaaagcaaagctagctggaggtgatagtgacggaggagagctcttgggagaataccccgggatccccgagctgagcgctctagaagacgttgccctgcttcaggccccacagccacccgcatgtaacgtgcatttcctctcatccctactcccagcacatcgaagccctgccgtgctgccccttggagcttgggtgttggagggggcaagccaccctggggttcgaatgattcccgtcgaaattaaagaggcggggggaacaacaacatccaacaatcctgaagaagctactctgcagaacttacttgcccaggaaagctgctgtaagtttcctagttcccaggaactagaggacgcatcctgctgcagtctgaaaaaggactctaatcccatggtcatctgccagctgaaagggggtacccagatgctatgcatcgataactcccgcacaagagagctaaaagccctccacctggtccctcagtaccaggatcaaaacaattacctacaatccgacgtgcctaaacccatgactgccttagtcggccgcttcctgcctgcttctacaaaactgaaccttattactcagcaactggaaggagccctgcctagcgtcgtaaatgggtcagcctttccctctgggtcaaccctgcctgggccccccaagatcactctggcggggtag

SEQ ID NO: 194922 - DNA, 2262 bp, synthetic construct
  misc_feature 1..2262: note = Description of Artificial Sequence: Synthetic coding sequence
  source 1..2262: mol_type = other DNA
atgggcgagcacagccccgacaacaacatcatctacttcgaggccgaagaagacgagctgaccccagacgacaagatgctgcggttcgtggacaagaacggcctggtgccatcttcgtccggaaccgtttacgatcggaccacagtcttaatagagcaggaccccggaactttagaagacgaggatgacgatgggcagtgtggcgagcacctccccttcctggtgggcggggaggagggctttcatcttatcgatcacgaagccatgtctcagggttatgtccagcacataataagccccgaccagattcatttgactatcaatccgggttcaaccccaatgccaaggaatatcgagggtgcaaccctgacactgcagagcgagtgcccggaaaccaagagaaaagaggtcaagcggtatcagtgcaccttcgaaggatgtcccagaacatattccaccgccgggaacctccggacacatcagaagacgcacaggggggaatataccttcgtgtgcaatcaggagggctgcggcaaggccttcttgacaagctattccctgcgcatccatgttagggtgcataccaaggaaaaacccttcgagtgcgacgtgcagggatgtgagaaggcgtttaacacactgtacagattgaaagcacatcagaggctgcataccggcaagacctttaactgcgagagtgagggctgttctaaatactttaccaccctgtccgatttacgaaaacatattcgcactcatactggagagaagccttttcgatgcgatcacgacggatgcggaaaggccttcgctgcctcacatcatttaaaaactcacgtgcgcacacacacgggcgaacgtcctttcttctgccccagtaacgggtgcgagaagacatttagcacccagtattcactgaaaagtcacatgaaagggcatgataataagggccactcatataacgcccttccgcaacataacggatcagaggatactaatcatagtttatgcctgtctgatctaagtctgctttccaccgacagtgaactgagagagaacagttccaccacccagggacaggacctgtcgacaatcagcccggctattatcttcgaatcaatgtttcagaactcagacgatacggctatccaggaggatccacagcagacagcttccctgactgaatccttcaatggtgacgccgaatcggtctccgacgtgcctccatctacgggcaactcagccagcctgagtttgccgcttgtgctacagcccggactctccgagcccccccagccactgctccctgctagcgcaccatccgcgcccccacctgctccctctttagggcccggatcccagcaggctgcttttggaaacccaccggccctgctacaaccacctgaggtgcctgtcccccatagtacacagttcgctgctaaccaccaggagtttctgcctcacccacaggcgcctcaacccatcgtgcccgggttgagtgtggttgcaggggccagcgcctccgctgccgcagtcgcctcagccgtggcagcccctgcacccccccagtccacaaccgagccattaccagcgatggttcagacactccccctcggagcaaacagcgtgttgacaaacaaccctaccatcacaatcacacctacaccgaacactgctattctgcagtcctctctcgtcatgggagagcaaaatcttcagtggattttgaatggagctaccagcagtccccagaaccaagaacagatccagcaggcgagcaaggttgaaaaggttttctttactaccgccgtgcccgtggctagctcccctggcagcagcgtgcagcaaattggcctatctgtgcccgtgatcatcattaaacaagaagaggcgtgccagtgccagtgtgcctgcagggacagcgccaaagagagggccagcagccggaggaaaggctgctccagtccacctccacccgaaccctcgccccaggcgccagatggacctagtttacaactgcctgcgcaaacatttagttctgcacccgtacccggtagttcatctagtacactgccgtcgtcttgtgaacagtctcgccaggccgaaacaccttctgatccacagaccgaaaccctgtccgccatggatgtgagcgagttcctgtcgctacaaagtcttgacacaccatcaaatttaattcccatcgaagcactgctgcagggtgaagaggagatgggcttgacatctagtttcagtaagtag

SEQ ID NO: 194923 - DNA, 603 bp, synthetic construct
  misc_feature 1..603: note = Description of Artificial Sequence: Synthetic coding sequence
  source 1..603: mol_type = other DNA
aagcagagccaggtgaagcggtaccagtgcaccttcgagggctgcccacgcacctactccacagccggcaatctgcgcacacatcaaaagacccatcgaggcgaatacaccttcgtgtgtaatcaggagggatgcggaaaagcctttctgacgtcctatagcctgcgaatccacgtgcgagtgcacaccaaggaaaagccattcgagtgtgacgtgcagggttgtgagaaggcctttaacaccctgtatcgcctcaaggcacatcagcggctgcatacgggcaaaacattcaattgcgaaagcgagggatgtagcaaatactttacgacactgtctgacctgcggaaacatattcggacccacacaggcgagaagccatttcggtgtgatcatgacggatgtggaaaagctttcgcagcatcacaccacctgaaaactcacgtccggacacacaccggagagagaccattcttttgtccatccaacggatgtgagaagacattctcaacacagtatagtctcaaatctcatatgaaaggccatgataataagggtcacagctacaatgcactgccccagcacaatggaagtgaatccacttag

SEQ ID NO: 194924 - DNA, 2559 bp, synthetic construct
  misc_feature 1..2559: note = Description of Artificial Sequence: Synthetic coding sequence
  source 1..2559: mol_type = other DNA
atgctgatcaccgagcggaagcacttccggagcggccggatcgcccaatccatgtccgaggccaatctgatagacatggaagccggaaagcttagcaagtcttgcaacatcaccgagtgccaggatcccgacctactgcataattggcccgatgccttcaccctgcgaggcaacaatgcgtctaaagtggcgaaccccttctggaatcagctctcagcctccaacccttttttagatgatatcacacagctgaggaataaccggaaacggaacaatatttcaatcctgaaagaagacccttttttgttttgtcgggaaattgaaaatgggaattcatttgacagcagtggggacgagcttgatgtgcaccaattgctgcgacagacaagttcccgaaactccggcaggagcaagtcagtctccgaactattagatattttggatgacacagcacatgcccatcagtcaattcacaatagtgaccagatactccttcatgatctggaatggctgaagaatgatagggaggcgtataagatggcatggctctcccagcggcagctggcgcgcagttgcttggacctgaatactatttctcaatctccaggttgggcccagacacaactcgctgaggtgacaatcgcctgcaaggtgaatcaccagggcggcagtgtgcagttgcccgaaagcgacatcacagtccatgtgcctcagggccacgtggctgtgggagaattccaggaagtgagcctgagagcattcctcgatcctccacacatgctgaatcacgaccttagctgtactgtctccccacttttagaaataatgctgggtaatctgaataccatggaggccctgctccttgagatgaagattggcgccgaagtgagaaaagatccctttagccaggttatgaccgaaatggtgtgtcttcattctctggggaaggagggtccattcaaagttctgtctaactgctacatttataaagacacaatccaggtcaagctcatcgatctgtctcaagtgatgtaccttgtagtcgcggcacaggccaaagctttgccaagtcctgcggcgacgatctgggactacatccacaagacaacctcgatcggtatttatgggcctaagtacattcaccctagcttcactgtggtgcttactgtgtgcggacacaactatatgccgggccaactgactatctctgatatcaagaagggcgggaagaatatttccccggtcgtattccagctttgggggaagcaaagtttcttacttgacaaacctcaggacctctccataagtattttctcctgcgacccagatttcgaggtgaagacagagggagagcggaaggaaattaagcaaaaacagctcgaggctggggaggtggtacaccagcagtttttatttagcctcgttgaacatcgcgaaatgcacctgtttgacttttgcgtgcaggtcgagccccctaacggagaacctgtagcacagttcagtataacgacccccgacccaacccccaacctgaagagattgtccaatcttcctggctacctgcaaaaaaaagaggaaatcaagtccgccccactgagtccaaagatcctggtcaaatatcccacgttccaagacaagacactcaacttttctaactacggggtgaccctgaaggccgtgctccggcagtcaaagattgattattttctggaatacttcaaaggggacactatagcactactgggcgagggcaaggttaaggctattgggcaatctaaagtcaaagagtggtatgtaggagtgctccggggtaaaatcggactggtacactgtaagaacgtgaaagtgatttcaaaggagcaagtaatgttcatgagcgacagtgtgtttaccacccgtaacttgcttgagcaaatagtattaccactcaagaagctcacctatatttacagcgtcgtgttgacgttggtttctgagaaagtgtacgattggaaagtgctcgcggatgttctaggatactcccacctgagcctggaggattttgaccagatccaggcagacaaagaatcagagaaggtctcctacgtcatcaagaagcttaaagaagactgccatacagagagaaacacccgcaaatttctgtacgagttgatagtggccctgctaaagatggattgtcaggagttagtagccagacttatccaggaagcggccgtgctaaccagcgctgtgaagctggggaagggctggcgggagctggctgagaaactggtcaggctgacaaagcagcagatggaagcgtacgagatcccccacagggggaacaccggagacgtggctgtggagatgatgtggaagcctgcatatgacttcctgtacacatggtctgcgcactacggaaacaactatagggacgtgctccaagatctccaatctgccctggaccgtatgaaaaaccccgtgacgaaacattggcgcgagctcaccggggtactgatcctcgtcaattcactggaggtgcttagagtcacagctttttcaacaagtgaagaggtttag

SEQ ID NO: 194925 - DNA, 2559 bp, synthetic construct
  misc_feature 1..2559: note = Description of Artificial Sequence: Synthetic coding sequence
  source 1..2559: mol_type = other DNA
atgctgatcaccgagcggaagcacttccggagcggccggatcgcccagtcaatgagcgaggccaacctgattgatatggaggcaggcaaactgagcaagtcatgcaacatcactgaatgtcaggatccagacctgttacataattggcctgatgcttttaccctgcgaggcaacaacgcatctaaggttgccaatccgttctggaaccagctgagcgcgagcaacccatttctagatgatatcactcagttgagaaataatcgcaaaaggaacaatatatccattttgaaggaggatccttttctattctgccgcgaaattgagaatggtaactcctttgattcttctggcgacgagctcgacgtccatcagttactaagacagacttcatctcggaattcaggccggagcaagtccgtgagcgagttacttgatattctcgacgataccgcccacgcgcaccaatccatacataattccgaccaaattctccttcatgatttagagtggcttaaaaacgacagggaggcctataaaatggcttggcttagtcaaaggcagctagcacggtcctgtctggatctcaatactattagccaatccccggggtgggctcagactcagcttgcggaggtgacaattgcctgtaaagtgaaccaccaaggcggctcagtgcagcttccagaatcggatattaccgtccacgtcccccagggccatgtcgccgtaggcgaatttcaggaggtgagcctccgggcattcctggacccccctcatatgctaaatcacgacttatcatgtaccgtgagccccctcctggagattatgctcggaaacctcaacacgatggaagccttgttgctcgagatgaagattggtgctgaggtgagaaaagatcctttcagccaggttatgactgaaatggtgtgcctgcattccctgggcaaagaaggccctttcaaggtcctgagtaactgctatatctataaggatacaatccaggtgaagcttatcgatctgtcgcaggttatgtatctcgtggtggccgctcaggctaaggcactgccctctcccgctgctacaatttgggactatattcacaagacaactagcattggcatttatgggcccaaatatatccacccttcctttactgtggtcctcacagtgtgcggccataattacatgccggggcagctgactatctccgatatcaaaaagggaggtaaaaacataagccctgtggtgttccagctgtggggcaagcagagctttctgcttgataaaccccaggatctgagcatctctatcttctcttgtgatccagatttcgaggttaaaaccgagggggaacggaaagagatcaagcagaagcaactcgaggctggagaggttgtccatcaacaattcctcttctcccttgttgaacaccgcgaaatgcatctctttgatttttgtgtgcaggtggaacctccgaacggcgagcctgtggcccaattcagtataaccacccctgatccaacccctaacctgaaacgcctgtcaaatctgccaggctatctgcagaaaaaggaggagatcaaaagcgcacccctgagtccaaaaatactggtaaagtaccccacctttcaggacaaaactctcaacttctccaactatggcgtgactttgaaggccgttcttcgtcagagcaagattgattacttccttgagtactttaaaggggacacgatcgcactgcttggcgagggtaaggttaaagccatcgggcagagcaaagtgaaagagtggtatgttggagtgctgcggggcaagatcggcctcgttcactgtaagaacgttaaagtgatctccaaagaacaggtcatgttcatgagtgacagcgtttttactactaggaacctcctggagcagatcgtgcttcctctgaagaagctgacctacatttatagtgtcgtcttaacattggtttccgagaaggtgtatgattggaaggtgcttgcagacgtcctgggctatagccatctttccctcgaagattttgatcagatacaggctgacaaggagtctgagaaagtgtcctatgtcattaaaaagctgaaagaagactgccatactgagcgaaatactcgtaagttcttgtacgagctaattgtggcgcttctgaaaatggactgtcaggagctagtggcgaggctgattcaggaagcagctgtcttgaccagtgccgttaaacttggaaaggggtggagggagttggctgagaagctggttcggcttacaaagcaacagatggaggcctacgagataccccatcgaggaaataccggagatgtggccgttgagatgatgtggaaacctgcatacgacttcctttacacatggtccgcccactatgggaacaactatcgagacgtcctccaagacctacaaagcgctctagacaggatgaaaaaccccgtcacaaaacactggcgggagctcaccggagtcctgatattggtcaacagtcttgaggtcctgagggtcacagccttctccacctccgaagaggtatag

SEQ ID NO: 194926 - DNA, 1308 bp, synthetic construct
  misc_feature 1..1308: note = Description of Artificial Sequence: Synthetic coding sequence
  source 1..1308: mol_type = other DNA
atgctgctgggcggccccccccggagcccccggagcggcaccagcccaaaaggaccatggtcatccacaggacatgtacaattcggcaagtcccctcagacctggcctagaagaactcgccctaggtcaccagaacccgctgcaccatcgggggttcggggttcaacgtggaccaggcgccgggacacgcctcggcgcgccggcccaactgctctgtccagatacgtgggacatctgtggatgggcagacgacccccgtctccagaagctcgcggcccggtaccccgctcctctgccgccagtagggccaggagatctctagcttccccagggatctccccaggcccccttacggccacaatcggcggtgccgtggctggggggggccccagacagggaagggctgaagcacacaaggaggtgttcccgggccagagggtcggaaaaatggctgcacccatggagctgttttgttggagtggagggtggggccttcccagtgtcgatctcgactctctggcagtgctcacatacgcccggtttactggtgcacctctaaaggttcataaaatctcgaacccctggcaatccccatccggcaccctgccggcacttcgtacttcccacggagaagtgatctctgtgccacacaaaatcatcactcatcttagaaaggaagtccacacattttggatcgacaccaaaaattacgtggaggtaacgaggaagtggtacgcagaagccatgcctttccctctgaactttttcctgccgggaagaatgcaacggcagtatatggagaggttgcagcttctcactggagagcaccgaccagaggacgaggaggagttggaaaaggaactttacagggaggcgagggagtgccttacgctgctgagccagcggctgggaagtcaaaaatttttctttggcgacgccccggcaagcttggacgcgttcgtgttcagttacctcgcgctcctccttcaagcaaaactcccatctggaaagctgcaggtacacctgagaggacttcacaatttatgcgcttactgcacccatatcctctctctgtatttcccttgggatggcgccgaggtgccccctcagcgccaaacaccggcaggaccagagacagaggaagaaccttatagaagacgtaatcagattcttagcgtgcttgctggactcgccgcaatggtgggttatgcactgctgagtggcatcgtttccattcagagagcaacaccagccagagcacctggaaccagaaccctggggatggctgaggaagatgaggaggagtag

SEQ ID NO: 194927 - DNA, 1401 bp, synthetic construct
  misc_feature 1..1401: note = Description of Artificial Sequence: Synthetic coding sequence
  source 1..1401: mol_type = other DNA
atgctgctgggcggccccccccggagcccccggagcggcaccagcccaaagggcccatggtctagtactggccatgtgcagttcgggaagagccctcagacctggccgaggcggacacggcctcgatcccccgagcctgcagccccttcaggggtgcgaggctccacttggacacgccggagggatactcccaggcgcgcaggccctaccgctctctctaggtacgtggggcatctgtggatggggagacgccccccaagtccagaggcaagaggcccagtgccccgaagcagcgcggcttctcgtgccagacggagcctggcatcccctggaatatcccccggccctctaacagcgaccatcggtggcgctgtcgccggaggcgggccacggcagggcagagctgaagcccataaagaggtgtttccaggacaacgagtgggcaagatggccgcgccaatggagctcttctgctggtccggcgggtgggggctccccagtgtcgatttggactcattagcagtcctaacatacgcgcgttttacaggcgcccccctgaaggtccacaaaatcagcaacccctggcagagcccatctggtacactgcccgctctccggacctctcatggggaagtcatttcagtgcctcataagataattacacacctaagaaaggaaaagtacaatgccgattacgatctcagtgctaggcaaggagccgatacccttgctttcatgtctctgttagaggagaagctactgcccgtgttagtgcatactttctggattgacacaaaaaattacgtcgaggtcacccgaaaatggtatgccgaagcgatgccattcccattgaacttcttcctgcccggtcgcatgcagagacagtacatggagcggctccagctgttaactggcgaacatagacccgaggatgaagaggaacttgagaaggagctgtacagggaagccagggaatgcttgaccctgctcagtcaaagacttggcagtcagaaattcttctttggggatgccccagcttcacttgatgcctttgtgttctcttatctggccttactgttgcaagcaaagcttcccagcggtaagctgcaggttcacctgagaggactgcacaatctgtgtgcttattgtacacacattctctccttatactttccctgggatggcgctgaagtgcctccccagcgccagacgcccgctggtccagaaaccgaggaagagccttatcgacgccgaaaccagatactgtccgttcttgcgggtctagccgctatggtcggctatgctctgctgtctggtatcgtgtccatccagagagcgacacctgccagggccccaggaacccggaccctgggaatggctgaggaagacgaggaggagtag

SEQ ID NO: 194928 - DNA, 951 bp, synthetic construct
  misc_feature 1..951: note = Description of Artificial Sequence: Synthetic coding sequence
  source 1..951: mol_type = other DNA
tgagagggcggccaggacggcggcgcccacggcgccgtgctgctggtgagagggctcggcgctgctgtcagcggaccaggacagcctggtcgtgctgatttgtgccagatctactggtgtagcaccgaaggcacccaggatcagcagcccttggccgaaccatttagatacccagtgtctctgggtggaacactgcctgccctcagaaccagccatggggaagtcatctccgtcccacacaagatcatcacccatctgagaaaggagaagtacaacgccgactacgacctgtccgcccgtcagggagctgataccctggcctttatgtcgctgctcgaagagaagcttctgccagtcctcgtacacaccttctggatagacaccaagaactacgtcgaggtgactcgcaaatggtacgctgaggcaatgccgtttcccctcaactttttcttgcctgggaggatgcaacggcaatatatggaacgcctgcagcttcttaccggtgagcaccgacccgaagacgaggaagagctagagaaggaactttatcgggaggctagggaatgtctaacactgttgtcgcagcgcctgggtagccaaaagtttttctttggtgatgcccctgcatccctcgacgcttttgtgttttcttatttagcactcttacttcaggccaaactaccctccgggaagctgcaggtacacttgcggggcctgcataacctgtgtgcttattgcactcacatcctttccttatattttccttgggacggagcggaggtacctccccaacggcaaactcctgccggacccgagaccgaggaagagccttacagaaggagaaatcaaattttgtcagttttggctggcctcgccgccatggttgggtatgctctcctgtcaggcattgtttccatccaacgcgctacacccgccagggcaccaggctag

SEQ ID NO: 194929 - DNA, 1188 bp, synthetic construct
  misc_feature 1..1188: note = Description of Artificial Sequence: Synthetic coding sequence
  source 1..1188: mol_type = other DNA
atgaacggccccgtggacggcctgtgcgaccacagcctgagcgagggggtctttatgtttacttctgaatccgtcggcgagggccaccccgataagatctgcgaccagatctccgacgctgtcttagacgcccacttgaagcaggatcctaacgctaaggtagcttgcgagaccgtgtgtaagacgggcatggtgttgctctgtggggagattacaagcatggccatggtggattaccagcgtgtggtgcgtgacacaatcaagcacattggttacgatgacagcgccaaggggtttgatttcaaaacatgcaatgtgctggtggccctcgaacaacagagccctgacatcgctcagtgcgtccacctagatagaaacgaggaggatgtcggcgctggcgaccagggactgatgtttggttatgccactgatgaaaccgaagagtgtatgccattaaccattatcttggcccacaagctgaatgcacgcatggccgatcttcggagatctggcttgctgccctggctgcgccctgatagcaagacgcaagtgacggtacagtatatgcaagacaacggagcagttatccctgtgagaatacacaccatagtgatctccgtgcagcacaatgaagacatcacccttgaggaaatgcgccgggcgctaaaggagcaggtgattcgggcagttgtccctgcaaaatacctagacgaggacactgtgtatcacctgcagccatcaggacggtttgttataggaggacctcagggagatgctggcgttacaggacgcaagatcattgttgacacttatggcggctggggagcccatgggggcggtgctttttctggcaaggactacacaaaagtcgatcgctccgccgcctatgccgccagatgggtggctaaatcattggtgaaggccggtttgtgccggcgggtgttagtgcaggtgtcgtatgcaataggagtggcggagcctctgtctatctctatctttacctatggaaccagtcagaaaacggagagagagctgctggacgtagtgcacaagaacttcgacctcagacctggagtgattgtccgcgatctggatctcaagaagccaatatatcagaagaccgcttgctacggccacttcggccgatcggaatttccatgggaagtaccccgtaagcttgtgttctag

SEQ ID NO: 194930 - DNA, 1188 bp, synthetic construct
  misc_feature 1..1188: note = Description of Artificial Sequence: Synthetic coding sequence
  source 1..1188: mol_type = other DNA
atgaacggccccgtggacggcctgtgcgaccacagcctgagcgagggtgtctttatgtttacatctgaatctgttggcgaggggcatcctgacaagatttgtgatcagatctctgacgctgtgctagacgcccacctgaaacaagaccctaacgcaaaagtggcttgcgagacagtgtgcaagacaggtatggtacttttgtgtggtgaaattacctcaatggcaatggttgactaccagagagtggtgagggacactatcaaacacataggatatgacgactctgccaaaggatttgattttaagacttgcaacgtgctggtggctctcgagcagcaatctccagacattgcccagtgcgtgcacttagacaggaacgaggaagacgtgggcgcaggtgatcaggggcttatgtttggctacgctacagacgagactgaggagtgtatgccactcacaatcatcttagcgcacaagctcaacgctagaatggctgatttgcggcggagtggcctgctgccttggctgcgacccgattccaagacacaggtaaccgtccagtacatgcaagacaatggagccgtcattcccgttcgaatacacactatcgtgatctctgtgcagcacaatgaggacatcactctggaggagatgagacgggctcttaaagaacaagtgatcagggccgtagtcccagctaaatacttggatgaagacactgtgtaccatctacagccttcaggccgtttcgtgatcggagggccccagggagacgccggtgtaaccgggcgcaaaattattgtggacacttacggcggttggggcgcacatggcggcggtgcattctcgggcaaagactataccaaagtggaccgctcagctgcttacgcagcacggtgggtggccaaatcactcgtcaaggctggcttatgtcggcgcgttttggtacaggtctcctatgccataggggtagctgagcccctatccattagtatctttacatacggaacctcccaaaaaaccgagagggaactgcttgatgtagttcacaaaaacttcgatctgagacccggggtgattgttcgtgatctcgatcttaaaaaacccatctaccagaaaactgcatgctatggacacttcggcaggtcagagttcccatgggaggtcccacgcaagctcgtcttctag

SEQ ID NO: 194931 - DNA, 438 bp, synthetic construct
  misc_feature 1..438: note = Description of Artificial Sequence: Synthetic coding sequence
  source 1..438: mol_type = other DNA
gagagcgtgggcgagggccaccccgacaagatctgcgaccagatctcagatgcagtactcgacgctcacttgaagcaggatccaaacgctaaggtggcatgtgggtttgactttaagacttgcaacgtccttgtggccctggagcagcaaagcccagatatagcccaatgcgtgcatttggaccggaatgaagaagatgttggtgccggagatcagggcctgatgttcgggtatgccactgacgagacagaggagtgcatgcccctcaccatcattttggcacacaaactcaacgcaagaatggctgaccttcgtcgctcaggcctgttgccctggctgcggccggatagcaaaactcaggtcacagttcaatacatgcaggataacggagctgtaatcccagttagaattcacacgatagtcatctcggtccagtag

SEQ ID NO: 194932 - DNA, 1188 bp, synthetic construct
  misc_feature 1..1188: note = Description of Artificial Sequence: Synthetic coding sequence
  source 1..1188: mol_type = other DNA
atgaacggccagctgaacggcttccacgaggccttcatcgaggagggtaccttcctttttacctctgaatccgtgggagaaggccacccagacaagatctgtgaccaaatatccgacgccgtcctcgacgcgcatcttcagcaggatccagacgctaaggtcgcctgtgagactgtcgccaaaacgggcatgatcctgctggcaggagagattacatcccgcgcagccgtcgactaccaaaaggtggtgagagaagctgtgaagcatatcgggtatgacgactcctctaaaggctttgactacaagacctgtaacgtcctcgtggccttggagcagcagagtcccgatatcgctcaaggcgttcatctggacaggaatgaggaagatatcggagcaggtgaccaagggctgatgttcgggtacgcaaccgatgagactgaagaatgcatgccactgactattgtgctcgcacataaattgaatgccaagcttgctgaattacggcggaatggcaccctaccctggttaagacctgactctaagacacaagtcacggtccagtacatgcaagaccgaggcgcagtgttgcctataagggtacatactatagtaataagcgtgcagcatgacgaggaagtctgtcttgacgagatgagagacgcattgaaagagaaggtcattaaggctgttgttcccgccaaatatctggacgaggataccatatatcacctgcagccctccggccgctttgtaattggcggccctcagggggatgcaggcctgacagggcgcaagatcatcgttgacacttacggtgggtggggggcacacggcggcggggccttttccggtaaagactatactaaggtggaccggagtgccgcttatgctgcgcggtgggtcgcgaagtcactagtaaaggggggactgtgtagacgagtgctggtccaggtctcttacgcaattggtgtcagccatccactctcaatctccattttccactatggcacaagccagaaatctgaacgagagttattagagatcgtcaaaaagaactttgatctccgcccgggcgtcatcgttagagaccttgacttgaagaagccaatataccagcgcactgcggcttatggtcactttggtagggactccttcccctgggaggttcccaaaaaacttaagtactag

SEQ ID NO: 194933 - DNA, 531 bp, synthetic construct
  misc_feature 1..531: note = Description of Artificial Sequence: Synthetic coding sequence
  source 1..531: mol_type = other DNA
atgaacggccagctgaacggcttccacgaggccttcatcgaggagggcaccttcctctttacctctgaatccgtgggtgagggccacccagacaagatctgcgaccagatcggggatgctgggttaactggaaggaaaatcatcgtggatacatacgggggctggggtgcgcacggcggcggcgcattctctgggaaggattataccaaagtggataggtccgcagcctacgctgcgcgttgggtggcaaaatcattagtgaaggggggcctgtgccggagggttttggtgcaggtgagctatgctatcggcgtgtcccaccccttaagtatatctatatttcactatgggaccagccagaaaagcgaaagggagctgcttgaaatagttaagaagaattttgatctcaggccaggggttatcgtacgtgatttggacctcaaaaaacctatttaccagagaacagccgcctatgggcatttcggtcgcgattcttttccatgggaggtgcctaagaaactgaaatattag

SEQ ID NO: 194934 - DNA, 549 bp, synthetic construct
  misc_feature 1..549: note = Description of Artificial Sequence: Synthetic coding sequence
  source 1..549: mol_type = other DNA
atggcccggctgctgtggctgctgcggggcctgaccctgggcaccgctccacggcgggctgtgaggggccaggctggcggcggtggaccaggaactggacccggcctgggagaggcaggcagcctggctacctgtgaactcccactcgcaaagtccgaatggcagaagaaattgacgccagaacagttctacgttacccgagagaaagggactgagcctccattctccggaatttaccttaataacaaggaggcaggtatgtatcactgcgtgtgctgcgattctcctcttttcagctcagagaaaaagtattgttccggcaccgggtggccctcattcagtgaagcccacgggaccagcggatcagacgaaagtcacacaggcatactgcgtcgtctcgacaccagccttgggagtgcacggaccgaagtggtctgcaagcagtgcgaagcacatctggggcatgtgtttccagatgggcctggccccaatggacaacgcttctgtatcaactcggtagcactcaaatttaaaccaagaaaacactag

SEQ ID NO: 194935 - DNA, 558 bp, synthetic construct
  misc_feature 1..558: note = Description of Artificial Sequence: Synthetic coding sequence
  source 1..558: mol_type = other DNA
atgagcgccttcaacctgctgcacctggtgaccaagagccagcccgtcgcactccgggcttgcgggctgccgtcaggctcttgtcgtgataaaaagaattgtaaggtggtcttctcccaacaggaattacgcaagcggctcacacccctccaatatcacgtgacccaagaaaagggcacggagtctgcatttgaaggtgagtatacacatcataaagatccaggaatctacaagtgcgtggtgtgcggtaccccattattcaagtctgagacgaagttcgactctggtagtggttggccaagtttccacgacgtaatcaatagcgaagcaataacttttactgatgacttctcttacggtatgcaccgagtcgagacttcctgttcccagtgtggggcccacctgggccacatttttgatgacgggcctaggccgacgggcaagagatactgcataaacagtgcagccctcagcttcacaccagcagattcgtccggcacagccgagggaggctccggcgtggctagccccgctcaggcagataaagctgagctgtag

SEQ ID NO: 194936 - DNA, 579 bp, synthetic construct
  misc_feature 1..579: note = Description of Artificial Sequence: Synthetic coding sequence
  source 1..579: mol_type = other DNA
atgagcccccggcggaccctgccccggcccctgagcctgtgcctgagcctctgcctctgcctatgtctcgcagctgccttggggtccgcgcagtcaggttcatgtagggacaagaagaactgtaaagtcgtcttttcccagcaggagttaaggaaaaggctgactccactgcaatatcacgtgacacaggaaaagggtaccgaatctgccttcgagggcgagtatactcatcacaaagatcccggtatttacaagtgtgtagtctgcggtactccccttttcaaaagcgaaacaaaatttgacagcggatccggctggcccagtttccacgacgtcatcaattctgaggcaatcacattcaccgacgattttagttacggcatgcacagagtagagacttcctgctcccagtgtggagcgcacctgggccatatcttcgacgatggtcctcgccccaccgggaaacggtactgtatcaattctgctgccctatcattcacacccgctgactcctcaggcactgccgagggcgggagcggggtggcaagtccggcccaggcagataaggcagaactttag

SEQ ID NO: 194937 - DNA, 495 bp, synthetic construct
  misc_feature 1..495: note = Description of Artificial Sequence: Synthetic coding sequence
  source 1..495: mol_type = other DNA
atgagcgccttcaacctgctgcacctggtgaccaagagccagcccgtggctctcagagcgtgcggcctgccttctggaagctgccgcgacaagaagaattgcaaggtggtctttagccagcaggagctcaggaagaggctcaccccgctgcaatatcacgtgactcaggagaagggcaccgaatccgcctttgagggggagtacacccatcacaaggaccctggcatctacaagtgcgtggtttgcggcactccgctctttaagtccgagactaagttcgactccggatctgggtggccatcctttcacgacgtgatcaactcggaggctattacattcacggacgatttctcttacggaatgcaccgggtcgagactagctgttcacaatgtggcgcccatctggggcatatttttgatgatggccctcgaccaactgggaagaggtattgtattaactcggccgcgttaagttttacaccagccgactcctag

SEQ ID NO: 194938 - DNA, 558 bp, synthetic construct
  misc_feature 1..558: note = Description of Artificial Sequence: Synthetic coding sequence
  source 1..558: mol_type = other DNA
atgagcgccttcaacctgctgcacctggtgaccaagagccagcccgtggcgctcagggcctgcggactcccaagcggatcttgtcgcgacaaaaagaactgcaaagtcgttttttcacagcaggaactgaggaagaggttaaccccactccagtaccacgttactcaagagaaggggacagaaagcgctttcgagggagaatacacccatcacaaggaccccggaatctacaagtgcgttgtttgcggcacaccactcttcaagagcgagactaagttcgacagtggctcaggatggccgtcgttccacgacgtgattaactctgaagctataactttcaccgacgacttctcctatgggatgcatagagtggaaactagctgcagccagtgtggcgcccatcttggacacatctttgatgatgggccccgacccaccggcaagaggtactgtatcaactcggcagccctgtcctttacgccggcagacagttctggaacggcagagggcggaagtggcgtggcgtcgcccgctcaggcggacaaagctgaattgtag

SEQ ID NO: 194939 - DNA, 354 bp, synthetic construct
  misc_feature 1..354: note = Description of Artificial Sequence: Synthetic coding sequence
  source 1..354: mol_type = other DNA
atgagcgccttcaacctgctgcacctggtgaccaagagccagcccgtggccctgcgcgcatgtggactgccatctggctcctgtcgggataaaaaaaactgcaaggtcgtgttctctcaacaagaattgagaaagcggctcacacctctccaatatcacgtcacgcaggaaaagggaaccgagtccgctttcgagggtgaatacacacaccacaaagatccaggaatttataagtgcgtcgtatgcggaactccccttttcaagtcggaaactaagtttgactctgggtctggatggccttctttccatgatgtaatcaactccgaggccattacttttacagacgatttttag

SEQ ID NO: 194940 - DNA, 2703 bp, synthetic construct
  misc_feature 1..2703: note = Description of Artificial Sequence: Synthetic coding sequence
  source 1..2703: mol_type = other DNA
atgcggctgttcgtgagcgacggcgtgcccggctgcctgcccgtgctcgcggcagcaggaagggcacgggggcgagccgaggtcctgattagcacagtgggaccggaggactgcgttgttccgttcctgacaagaccgaaggttccggtgcttcagttagacagcggcaactatcttttttctacatccgctatctgccggtacttttttcttctgtccggatgggagcaagatgatttgacgaatcagtggctcgagtgggaggctacagaactgcagcctgccctcagtgcagcactctactatctggtggtgcaggggaaaaaaggtgaagacgttctcggatccgtccggcgggccctgacccacatcgaccactcactttctagacaaaattgcccgttcctcgcaggtgaaactgagagcttagctgacattgtgttatggggggcactctatcccctgctccaagatcccgcatacctgcccgaggaactatccgccctgcacagttggttccaaacattgtcaactcaagagccgtgtcagcgcgcggccgagaccgtgctcaaacagcaaggggtcctggcccttagaccttatctgcagaagcagccacagcccagcccggctgaggggcgagcggtgaccaacgaacccgaagaagaggaattggccacgttaagcgaggaggaaatagctatggccgttaccgcctgggagaagggtctagaaagtctacctccacttaggcctcagcagaatcccgtgttgcccgtggctggagagcgaaatgtcttgattaccagtgccctgccctatgtcaataacgtgccacacctggggaacatcattggctgtgtgctctcagctgatgtgttcgccagatactcacgcctgagacagtggaatacactttatctgtgcgggaccgacgagtacggcaccgccaccgaaaccaaggcactggaagaaggcttaacaccgcaggaaatctgcgataagtatcacatcatccacgcagacatttatagatggttcaacatcagcttcgacatctttgggagaacaacaacgccccagcagaccaaaataacccaagatatttttcagcagttgctcaaacggggcttcgtgctgcaggacacagtcgaacagctcagatgcgaacactgcgcccgcttccttgccgataggtttgttgaaggggtttgtcctttctgcggctatgaagaagccagaggtgaccagtgcgacaaatgtggaaagttgatcaatgccgtcgagctgaagaagcctcagtgcaaggtgtgccggagctgccctgtcgtccaaagttctcaacatctgttcctcgaccttcctaagctggaaaaacgcctggaggagtggctgggccgaaccttgccaggcagtgattggaccccaaacgcacagtttattacccgcagttggctaagagacggtttaaaaccccgatgtattaccagagacctgaagtggggtaccccagtgcctctcgaagggtttgaggataaggttttctatgtgtggttcgatgcgaccataggctacctgagcatcaccgccaattacacggatcaatgggagcgatggtggaaaaaccccgagcaagtggatttatatcaattcatggccaaagacaacgtgccatttcacagtctggtctttccatgttcagccctgggggccgaggacaactacaccttggtctcccacctcattgctacagagtatctaaactatgaggacggtaaatttagcaagagtcgtggggttggggtgtttggagatatggcgcaggacaccggtatacccgccgacatctggcgcttctatcttctgtacatccggcccgaagggcaggatagcgcattcagctggactgaccttttgctgaagaacaactctgagctgctgaataacttgggcaacttcatcaatcgcgccgggatgtttgtttctaaattctttgggggctacgtgccggaaatggttctcactccagacgatcagaggcttctggctcatgtgactctggagctgcagcattaccatcagcttctggagaaggtgagaatcagggacgcccttaggtccattctgactatatctcgccatggaaaccaatatattcaagtcaatgaaccctggaagcgcatcaagggcagcgaagccgacaggcaacgagcgggaacagtgactggactggcagtgaatattgccgcccttctctctgtgatgttacaaccatacatgcccacagtttctgccaccatacaagcacaactccagctccccccccctgcatgcagcattctgttgactaattttctgtgtactttacctgcagggcaccagattggtacggtatctcccctatttcagaagctggagaacgatcagatcgagagtctgagacagcgcttcggcggcgggcaagcaaaaactagcccaaagccagctgtggtggagactgttactactgcaaagcctcaacagatccaggccctgatggatgaggttactaagcaaggcaacattgtgcgagagctcaaggcacaaaaagccgacaagaacgaggtcgcagcagaagtcgcaaaactactcgacctgaagaaacagctggctgtcgcggaaggaaagcctcctgaagcacccaagggcaagaagaagaagtag

SEQ ID NO: 194941 - DNA, 1908 bp, synthetic construct
  misc_feature 1..1908: note = Description of Artificial Sequence: Synthetic coding sequence
  source 1..1908: mol_type = other DNA
atggccgtgaccgcctgggagaagggcctggagagcctgccccccctgcggccgcagcaaaatccagtccttcccgtggccggcgagcgaaacgtgcttatcacgtctgccttgccctacgtgaataatgtgccacatctgggcaacatcatagggtgtgtactgagcgctgatgttttcgcacgctactctcgccttagacagtggaacacactttacctttgcgggactgatgagtacggcacggccactgagaccaaagctttggaagaaggtttgaccccccaggagatctgtgataaatatcatattatccacgctgatatctaccgatggttcaatatctcgtttgacatctttggccggacaaccacacctcagcaaactaaaattacgcaggacatcttccagcagttgctgaagcggggctttgtgctgcaagatactgttgagcagttgagatgtgagcattgcgcccgtttccttgccgatcgattcgtggagggcgtgtgcccattttgcggctacgaggaggctaggggggaccagtgcgataaatgtggcaagttgataaatgctgtcgaactgaagaaaccgcagtgtaaagtttgtcggagttgccccgtagtgcagagttcccaacacctgtttctggacttgcctaaactggaaaaacggctagaggagtggttgggccgaacgttacctgggagtgactggactcccaatgcccagttcattaccagatcttggttgcgcgacggccttaagccgcggtgcattactagggacctgaaatgggggactcccgttcccttggagggcttcgaagataaggtgttctacgtatggtttgatgccaccatcggttacttatccattacagcaaactacaccgaccagtgggaacgatggtggaagaatcccgaacaggtggatctgtaccagtttatggcaaaggacaacgtgcctttccactcattggtcttcccctgttctgccctgggcgccgaggataactacaccctggtgtcacatctcattgcaactgagtatctgaactatgaagatgggaagttctccaaatctaggggggtgggcgtgtttggtgacatggcccaggacacgggcattcccgcagacatctggcggttctacctcttgtacattcgtccagaggggcaagatagcgcattttcctggacggatctgttactgaaaaacaattcggaactgctgaataacctcggtaatttcattaaccgcgcaggaatgtttgtctccaagtttttcggaggatacgtgcccgagatggtgctcacaccagacgaccagagattgctggctcatgttactctggagttacagcactaccaccagctgttagaaaaggtgcggatacgcgatgccctgcggtctattctgactatctctcgtcacggaaaccagtatattcaggtcaacgagccttggaaaaggattaaagggagcgaggcagaccggcaacgggcagggaccgtgaccggactggcagtcaatatagctgcccttctgagtgtgatgctgcagccatacatgcctacggtgtccgccacaattcaggctcagcttcagctgccacctccggcttgcagcatcttactgacgaattttctgtgtacccttcccgcaggtcaccagattggaacagtatctcccctgtttcagaagctagagaatgatcagatcgaatctttgagacaacgttttgggggcggccaggtgaggaagctgaaggccgtcccttcccttcataattcccactccatcaccagcttgatcagcctgtcctcgcctcaccctagcctcttcccgtcctttgggcctgcagcttcatctctaacagtgttcttgtcctgcttaaactag

SEQ ID NO: 194942 - DNA, 1641 bp, synthetic construct
  misc_feature 1..1641: note = Description of Artificial Sequence: Synthetic coding sequence
  source 1..1641: mol_type = other DNA
atgcggctgttcgtgagcgacggcgtgcccggctgcctgcccgtgctggcggccgcgggacgcgcacggggcagggccgaggtgctcatcagcaccgttggccccgaggattgcgtcgtgccattcttgacgagaccaaaagtgccagtgctccagctggacagcggtaattacttattttccacaagtgctatctgcagatatttttttctgcttagcgggtgggagcaggacgacctcacaaatcagtggctagaatgggaggctacggagctgcaaccagctctgagtgctgctctatactatttagtggtgcaaggcaaaaagggcgaggatgtcttggggtctgttcgccgtgccctcacccacattgatcacagcctctccagacagaactgccctttcttggctggcgagactgaaagtctagctgatatcgtcttgtggggtgcactgtatccactgctgcaggaccccgcctacctgccagaggagttgtcagctctgcattcctggtttcaaaccctcagtacccaggaaccatgccagagggcagctgaaacagtcctaaagcagcaaggagtcttggcacttaggccctatctccagaagcagccccagccaagccccgccgaggggagggcggtcaccaatgaaccagaggaagaggagctagcaacgttatcggaggaagagatcgcgatggccgtgaccgcttgggagaagggcctggagagtctgcctcccctgcggcctcagcagaatccggtcttgcccgtcgctggcgagagaaacgtgcttatcaccagtgcactcccttacgtgaataacgtgccgcatctaggtaacatcattggttgcgtcctgagcgctgacgtattcgctcggtactcccgcctgagacagtggaacacattgtacctttgtggcacagatgagtatggaactgccactgagacaaaggccctcgaggaggggctcactccccaggaaatctgcgataaataccacataattcatgctgacatttataggtggttcaatatctcgttcgacatatttgggaggaccacgactccccagcagaccaagatcactcaggacatctttcaacaactgttgaagcgaggctttgtgctgcaggatactgtagagcagctccgctgcgaacactgcgcgaggttccttgccgatcgattcgtggagggagtttgtccattctgcgggtacgaggaggctaggggtgatcagtgcgataaatgtggcaagttgattaatgcagttgagttgaagaaaccacagtgcaaagtgtgccgatcatgccctgtggtccagtcatcccagcatttgttcctcgatttgcctaaactggagaaacggctcgaggagtggctagggcgcactcttcctggttcagactggacacctaatgcccagttcatcacacgctcctggcttagagatgggctgaagcctcgttgtatcaccagagaccttaaatggggaacaccagtaccacttgaaggcttcgaagataaagtcttctatgtgtggtttgacgcgacgattggatacctcagtatcaccgcgaactatacggatcagtgggagcgctggtggaagaaccccgagcagccctag

SEQ ID NO: 194943 - DNA, 1782 bp, synthetic construct
  misc_feature 1..1782: note = Description of Artificial Sequence: Synthetic coding sequence
  source 1..1782: mol_type = other DNA
atgctgcggaccagcgtgctgcggctgctgggccggaccggcgcctctcgtctgagcctgctcgaggacttcggccccagatattactcctctggttccctgtccgccggcgatgacgcttgcgacgtgagggcttacttcactacaccaattttttatgtgaatgcggcacctcacatcggccacttgtacagcgccctgctggccgacgcactttgccgacataggaggctgcgggggccaagcacagccgcgacacggttttctacaggtaccgacgagcacggcctgaagatccagcaggccgcggcgacagcgggactcgccccaaccgaactgtgtgatcgagtcagcgaacagttccagcaactgttccaagaggctggaatttcctgcacagacttcatcagaactaccgaggcacgtcacagggtagccgttcagcatttctggggagtgctgaaaagtagaggcctgctgtacaaaggcgtttatgagggatggtactgcgcctctgacgagtgcttcctccccgaagctaaggttacccaacagcccggaccctccggcgacagctttccagtgagcctggagagtgggcatccggtgtcttggactaaagaggaaaactacatattcaggctttctcagttccgaaaaccactgcaacggtggctccgcggcaacccacaggccattacgcccgaaccattccaccatgtagttctccaatggctggatgaggaacttcccgacctcagtgtgtctcggcggagcagccatctgcattggggtattccagtcccaggagacgactctcaaactatatacgtctggctcgacgcacttgtgaactatctgactgtgattggatatcccaatgctgagttcaagtcatggtggcccgccacctctcatatcatcggcaaagacatcctcaaatttcacgccatctactggccagcctttctgctgggagcagggatgtctcctccacagcgaatctgtgttcacagccattggaccgtgtgtggtcaaaagatgtccaaatctctgggaaacgtggtggaccccaggacttgcttgaatcggtacactgtcgatggattcagatacttcctgctgcgacagggtgtcccaaactgggattgtgactattacgacgaaaaagtagttaagctgctgaactccgaactcgctgacgccctcggggggctgcttaacaggtgtactgcaaagcgcataaacccatccgaaacatacccagccttctgcaccacctgtttcccatctgagccaggactagtaggcccttccgtgcgggcacaggcagaggactacgcactggtctccgccgtcgccactttgcctaagcaagtggccgatcactatgataactttcggatttacaaggcccttgaagcagttagtagctgtgttaggcagacgaacggattcgtccaaagacacgctccttggaagttaaactgggagtctcccgtagatgcaccatggctgggaacagtcctacatgtggcattggagtgcctccgcgtgtttggcacgttactccaacctgtgactccctccctagcggacaagctgctgtcccgtcttggcgtctccgccagcgagaggagcctgggggaactgtattttctcccgagattctacgggcatccttgtccattcgaaggaaggcgcctcggtccagagaccggactgttatttccccgtctggaccagtctcgcacatggctcgttaaggctcaccggacctag

SEQ ID NO: 194944 - DNA, 1563 bp, synthetic construct
  misc_feature 1..1563: note = Description of Artificial Sequence: Synthetic coding sequence
  source 1..1563: mol_type = other DNA
atgctgcggaccagcgtgctgcggctgctgggccggaccggcgcctctagactgagtttgctggaagactttggcccgcggtactattcctccggatccctcagcgccggcgatgatgcttgtgatgtgcgcgcctacttcaccactcctattttctatgtgaatgcggcaccacatataggccatctctatagtgccctactggccgatgcactttgtcggcacagacgcctccgggggccgagcacagcggcaacccgattctccacaggtactgacgaacatggcctgaaaatccagcaggcagccgctactgctggcctggccccaacagaactgtgtgacagagtgtccgaacagttccagcagttgtttcaagaggctggaatctcatggactaaagaggagaattacatcttcagactgtcccagttcagaaagcctttgcaacgctggctccgagggaacccacaggcaatcacccccgaacccttccatcacgtagtgttgcagtggctcgatgaggaactaccagatcttagcgtgtctaggcgcagtagccacctacactggggcattccagtgccaggggatgacagtcagactatctacgtatggctggatgcacttgtgaattatctgactgtgatcggctaccctaatgcggaatttaaatcttggtggccagccaccagccacatcattggcaaggatatcctgaaattccacgccatctactggccggcattcctcctgggcgccggcatgagtcctccacagcggatttgtgtgcactcccattggacagtctgcggccaaaagatgtccaaatcactcgggaacgtcgtagatccccgaacctgcttgaaccggtatactgtggacggctttagatactttctgctgcggcaaggagttccaaactgggactgcgactattatgatgagaaggtggtgaagttgttgaatagcgagctggcagatgccttggggggactattgaaccgatgcaccgcaaagagaattaaccccagtgagacatatccggccttttgcactacctgttttccgagcgagccaggactggtcggcccgtctgtgagagcccaggccgaagactacgcgttggtatctgcggtcgctaccctccctaaacaggtcgcagatcattatgacaatttccggatctacaaggctctggaagcagtgagctcttgtgttcgccagaccaatggcttcgtacaaaggcacgccccttggaagctcaactgggagtcccctgtggacgctccatggctggggacagtgcttcatgtcgccctcgagtgtctgcgtgtgttcggtaccctgctgcagccagtgaccccatcacttgcggacaaactgctctctagacttggcgtaagcgccagcgagcgctccttgggggaattgtactttctcccccgcttctacgggcacccgtgcccatttgaaggaaggaggctgggcccagagacaggtcttctctttcctagactagaccagtccaggacatggttggtgaaagcacatcgcacttag

SEQ ID NO: 194945 - DNA, 1461 bp, synthetic construct
  misc_feature 1..1461: note = Description of Artificial Sequence: Synthetic coding sequence
  source 1..1461: mol_type = other DNA
atggtggccggcatgctgggcctgcgggaggagaagagcgaggaccaggacctgcagggcctgaaagacaagccacttaaatttaaaaaagtgaaaaaggataaaaaggaggaaaaggaaggtaagcacgagccagtacagcccagtgcgcaccactcagccgaaccagccgaagctggcaaagccgaaacctccgagggatcaggcagtgcacccgcggtaccggaggcatctgcgtctcctaaacaacggcgatccattattcgagatcggggtccaatgtatgacgacccaactctcccagaaggttggacccgcaagctgaagcagagaaagtcaggccgttccgctggtaaatacgatgtgtacctcatcaatccccaggggaaagccttccgtagcaaagtggaattgatcgcctacttcgaaaaggtaggtgatactagcctggatcctaacgatttcgatttcactgttacaggtaggggctctccttcccgccgcgagcagaaaccccccaaaaaaccaaaatctcctaaagcccctggcacgggacgtggccgaggccggcccaaggggagcgggacaactcgaccaaaggccgccactagcgaaggtgtacaagtgaaaagggtcctggagaaaagccccgggaagctgctggttaaaatgccgtttcaaacatccccaggaggcaaggccgaagggggaggcgccacaactagcacacaggtgatggtgataaaacggccaggccggaaaaggaaggcagaggcagatccacaggccattcccaagaaacgaggccgaaagcctgggagtgtagtggctgccgcggccgctgaggccaaaaaaaaggctgtgaaagagagcagtattaggtctgttcaggagaccgtgcttccaatcaaaaaaagaaaaaccagggagacggtgtcaatcgaggtgaaggaggtagtgaagccacttctggtgagcactctgggcgagaagtctggcaaaggactgaagacttgcaagagcccgggcagaaaaagcaaagaatcctcccccaagggacgcagctcttcagcaagttccccccctaagaaggaacatcaccaccatcaccaccatagcgagagccctaaggcccctgtgccactcttgccaccactaccaccaccaccgccagagccagagtcttcagaggatcctacctcaccacccgagccacaggaccttagctcctctgtctgtaaggaagaaaagatgccaaggggtggtagcctagaatctgacggttgtcctaaagagcctgcaaagacccagccagctgtggcaacggctgccaccgcagcggagaagtataagcacagaggtgaaggtgagcggaaagatattgtttctagctcgatgcccagacccaacagggaggagccagtagacagtaggacccccgtaaccgaacgcgtgagctag

SEQ ID NO: 194946 - DNA, 816 bp, synthetic construct
  misc_feature 1..816: note = Description of Artificial Sequence: Synthetic coding sequence
  source 1..816: mol_type = other DNA
atggtggccggcatgctgggcctgcgggaggagaagagcgaggaccaagaccttcagggcttaaaagacaagccactgaaattcaagaaggtgaagaaggataagaaggaagagaaggagggcaagcatgaacctgtacagccatcagctcaccacagcgccgagcccgctgaagccgggaaggcggagacctctgagggttctggttccgcccccgccgtccccgaggcttctgccagccctaagcagagacgatccatcatccgggacaggggtcccatgtacgacgaccctacactgcctgagggctggactaggaagctgaagcaacgtaagtcaggtaggtctgctgggaaatacgatgtttaccttattaatccgcagggaaaggcttttagatctaaggtcgaacttattgcctacttcgaaaaggtaggcgacaccagcctagacccaaacgacttcgacttcactgtgactggaagaggaagtcctagccgaagggaacagaagcccccgaagaaacctaagtcccctaaggctcctggtacagggcgcgggaggggtcggcccaagggctcgggaaccacacgtccgaaggctgcaacatcagagggggtccaggttaagcgcgtgctggagaagagtccagggaagctccttgtcaagatgccgttccagacatccccggggggaaaggcggaagggggcggagccacaacttcaacacaggtgatggtcattaagaggcccggccgtaagcggagtccgcgagccccccggactccccccgcccctcttagccctcggacatag

SEQ ID NO: 194947 - DNA, 153 bp, synthetic construct
  misc_feature 1..153: note = Description of Artificial Sequence: Synthetic coding sequence
  source 1..153: mol_type = other DNA
atggtggccggcatgctgggcctgcgggaggagaagagcgaggaccaagacctgcagggcctgaaagataagccactgaagtttaaaaaggtgaaaaaggacaaaaaggaggaaaaagagggcaaacatgaaccagtgcagccctccgcttag

SEQ ID NO: 194948 - DNA, 1497 bp, synthetic construct
  misc_feature 1..1497: note = Description of Artificial Sequence: Synthetic coding sequence
  source 1..1497: mol_type = other DNA
atggccgccgccgccgccgccgcccccagcggcggcggcggcggcggggaagaggagcgcttagaggagaaaagcgaggatcaggacttacagggtctgaaggacaaacccctgaaatttaaaaaggtcaaaaaagacaagaaggaggagaaagagggcaagcatgagcctgtgcagccatctgcacaccattcggcggaacctgcagaagcaggaaaggccgagacaagcgaaggatccggatccgcccctgcagtcccagaggcttctgcaagcccaaaacagcgtcgaagcatcattagggacaggggccccatgtatgatgatcctaccctacccgagggctggaccagaaagctgaaacaacggaaatctggacgatcggctgggaaatacgatgtatacctcatcaatcctcaaggcaaagcctttcggtccaaggttgaattgatcgcctacttcgagaaagttggggacacaagccttgaccccaatgacttcgattttaccgtgactggacggggcagcccaagtcgcagggagcagaagcccccgaaaaaacccaaatcccccaaggccccgggtactggcaggggtagagggcgccctaaagggtccggtactaccagacctaaggcagcaacctctgaaggcgtgcaggtgaaaagagtgctggagaagtcccccggtaaacttctcgtgaagatgccctttcaaacaagtccaggcgggaaggccgaggggggtggagccacgacctcaactcaggttatggtgattaaacgacccggtagaaagagaaaggctgaggccgaccctcaggccatccccaagaaaagaggccgaaagcccggcagtgttgtggcagcggccgcggctgaagccaaaaagaaagccgtgaaagagtccagtatccgttccgtccaggagactgttcttccaattaaaaaacgaaaaactcgggaaactgtaagtatagaagtgaaagaggtggtaaagcccttattagtgagtaccctgggtgaaaagagcggcaagggactcaaaacttgcaaatcacccggccggaaaagcaaggagagtagcccaaaaggacgatcaagcagcgcttccagccctccaaagaaagagcaccaccatcatcaccatcatagtgagtcaccgaaggccccagtacccttactgccccccctacctccgcccccgccagaacctgaaagctcagaggatcccacatcccctccggagcctcaggacttgagctccagcgtgtgtaaggaagagaaaatgccacgcggaggatcccttgaatctgatggatgccctaaagaacccgccaagactcagcccgctgtcgccacagcggcaaccgctgccgagaagtacaaacacagaggagaaggggagcgcaaggacatcgtgtcttcatccatgccccgtccaaatcgcgaggagccggtagacagtagaacccccgtgaccgagagggtttcgtag

SEQ ID NO: 194949 - DNA, 1185 bp, synthetic construct
  misc_feature 1..1185: note = Description of Artificial Sequence: Synthetic coding sequence
  source 1..1185: mol_type = other DNA
atggtggccggcatgctgggcctgcgggaggagaagagcgaggaccaggacctgcagggcttgaaagacaaacccctgaagttcaagaaggtgaagaaagataaaaaggaggagaaggaaggcaagcacgaacctgtgcagccaagcgctcaccacagcgccgaacctgcagaagctgggaaagcagagacctctgagggttcgggttctgcccccgcagtgccggaggcctctgcctcccctaaacagagacggagtattatcagagaccggggacctatgtatgacgaccctacgttacccgagggctggacacggaagctgaagcagaggaagtccgggcgatctgcagggaagtacgacgtgtacttgattaatccgcaaggtaaggcatttagatccaaagttgaactgatcgcctactttgagaaagtgggcgataccagcctggaccctaacgattttgatttcactgtcacaggacggggtagtccctcaagacgagaacaaaagcctccgaagaagcccaagtccccaaaggcgcctggcaccggtcggggcaggggcagaccgaagggatctggcaccaccaggcctaaggccgcaacatcagaaggagtccaagttaaacgagtcctcgagaagtctcccggcaagcttctggtgaagatgccctttcagaccagccccggcggcaaggccgagggagggggagcgacaaccagcacgcaggtgatggtaatcaaaagaccgggtcggaagcgaaaagcggaggcagatccgcaggccattcccaaaaagcgaggccgcaagccggggagcgtagtggccgctgcggccgcggaagcaaagaaaaaggctgtcaaagaatccagcattagatcagtccaggagaccgttcttcccatcaagaagagaaagacccgcgaaacagtcagtatagaagtcaaggaagtggtgaaacccttattggtctctacgcttggcgagaaatccgggaaaggactgaagacatgtaagtctcctggacgcaaatctaaggagtccagccctaaaggcaggtcttcatctgctagctcgcctcctaaaaaagagcatcaccatcatcaccaccacagcgagagcccaaaggctcctgtgccaactcgaataaaggctgccgttgtgtcgtccccatacggctag

SEQ ID NO: 194950 - DNA, 1818 bp, synthetic construct
  misc_feature 1..1818: note = Description of Artificial Sequence: Synthetic coding sequence
  source 1..1818: mol_type = other DNA
atggccgaggactggctggactgccccgccctgggccccggctggaaacgccgcgaggttttcagaaagagcggcgctacctgtggccggagcgatacatactatcagtctccaaccggcgatagaatccgtagtaaagtcgagttaacccggtacttgggacctgcatgtgacctgaccctcttcgatttcaagcagggaatcctgtgctaccccgcaccaaaagctcaccccgtcgcagtggcctcaaaaaagaggaaaaagccatctcgcccggcaaagactcgtaagcgtcaggttggaccacaatccggggaggtgcgcaaggaagcgcctagagacgagacaaaggcggacacagacaccgctccagcctctttcccagcccccgggtgctgtgagaattgcggcattagcttcagtggtgatggtacccagaggcagcgactcaagaccctatgtaaggattgtagggctcagcgcatagccttcaacagggagcagaggatgtttaaaagggttggatgcggcgagtgcgcagcctgccaagtcaccgaagattgcggagcttgttctacttgcctcctgcagctaccccacgatgttgcatcggggctgttctgcaagtgcgagagacggcgatgtttgaggatcgtggagcgaagcagaggatgtggagtgtgcaggggctgtcagacacaagaagattgtggacattgtcccatctgtctgagaccccccaggccaggactccgccgccaatggaagtgcgtccagaggcgctgccttcggggaaagcatgcccggcgaaaagggggctgcgattccaagatggctgcgcggaggaggccaggcgcccaacctttgccccctcctcccccttcccagtctccagagcctaccgagccccacccgcgtgctttggcccctagtcctccagcagagtttatctattactgcgtggacgaggacgagcttcagccgtacactaaccggcgtcagaaccgaaaatgtggagcttgtgccgcttgcttacgtaggatggattgtgggaggtgtgatttttgctgtgacaagcccaagtttggtgggtctaatcagaaaaggcagaagtgcagatggcgccagtgtctacagttcgctatgaagagactgctcccgagtgtctggtccgagtccgaagatggagctggttcaccgcccccctacagacgaagaaagcgtccatcctcagcccgaagacaccacttgggacccacgcttaaacccacactggctacccggacagcacagccagatcatacacaggccccaactaagcaggaggcagggggtggcttcgtcctgcccccacccggcactgacctggtcttcctgcgcgagggcgcctctagccctgttcaggtgcccgggccagtggctgcctcaactgaggcgttgctccaggaggcccagtgctctggcctgtcatgggtcgtggcattaccccaggtaaagcaggaaaaggcggatacccaggacgagtggaccccagggaccgccgttctcacaagcccagtgctcgtccctggatgcccaagtaaagctgtcgatccagggctgccatccgtgaaacaggaaccacctgacccagaagaggacaaagaagagaacaaggacgatagcgcctccaaactcgctccggaggaagaagcgggcggtgccggcacgccagttattacggaaatatttagtctgggggggacccgttttcgtgacaccgctgtgtggttgcccaggtcaaaggatctgaagaagccgggcgccaggaagcaatag

SEQ ID NO: 194951 - DNA, 1761 bp, synthetic construct
  misc_feature 1..1761: note = Description of Artificial Sequence: Synthetic coding sequence
  source 1..1761: mol_type = other DNA
atggccgaggactggctggactgccccgccctgggccccggctggaaacgacgggaggtgttcagaaagtcaggagctacatgcggacgctctgacacctactatcagagcccaaccggggatcggatccggagtaaggtcgaactaacaagataccttgggcccgcctgtgacctgacactgtttgactttaagcagggcatcctctgctacccagctcccaaggcacacccagtggcagtggcttccaagaaacgcaaaaaaccatcaagaccagctaaaaccaggaagaggcaggtgggcccacagtcaggggaagtgcgaaaagaggcccctcgggacgaaacaaaagccgacacagacactgctccagcaagtttccccgcacccggttgctgcgaaaattgcgggatatccttctcaggcgacgggactcaaagacagaggctgaagactctgtgcaaggattgccgggcacaaaggatcgcattcaacagagagcagagaatgtttaagagggttgggtgtggagaatgcgctgcctgtcaagtgaccgaagactgcggagcctgctctacctgcctcctacaactgccacacgatgtggcatccggcctgttttgtaagtgtgagagacgccgatgtctgcggatagtggagagatccaggggctgtggagtttgcagggggtgccagacacaggaagactgcggacactgccccatatgcttgcgaccgccccgtccaggcctgcgcaggcagtggaaatgtgtgcagcgaaggtgccttcgaggaaagcacgccagaaggaaggggggctgtgacagtaaaatggccgcacgccggcggcctggcgcccagcccctgccgccgccaccccccagccaatcccccgaacccaccgaacctcaaccttatacaaaccgcagacagaatcgtaagtgcggggcgtgtgcggcctgtcttagacgtatggactgcggcagatgtgatttctgttgcgataagcctaagttcggcggatccaatcagaagcggcaaaagtgcagatggcgtcagtgtctccagtttgcgatgaagagacttctgccctcggtctggagcgaaagcgaagacggcgcaggctcaccccccccgtaccgaaggcgcaaacggccaagcagtgctcgcagacatcaccttgggcccacattgaaacctaccctggctactcggacggcccagcctgatcacactcaggccccaacgaaacaggaagccggaggcgggttcgttctccctccacctggaacagacctcgtatttctgagagaaggcgcttcctcgccagtgcaggtcccgggcccagtggccgcaagtactgaagccctactgcaagctgttgaccctggcctcccaagcgtaaagcaggagcctcccgatccagaggaggacaaggaagagaacaaagatgattctgcctcaaaactcgctccagaggaggaagccggcggagccgggacacccgtgatcactgagatcttcagcttaggaggaactagattcagagacacagcagtttggctaccttcccttcaaggcaggcacagtggtcgggaggacggatgcaaggtgtgggaaaccgaggataccgtggaacccactagcacctcttggaaccccagagggtggccgggtacccacgtgagcctttctccccccccagcaagcatgatgtgggtaagttgccgtcgctcttggtgtccctccagtcagagctag

SEQ ID NO: 194952 - DNA, 1653 bp, synthetic construct
  misc_feature 1..1653: note = Description of Artificial Sequence: Synthetic coding sequence
  source 1..1653: mol_type = other DNA
atggccgaggactggctggactgccccgccctgggccccggctggaaaagacgggaagtctttagaaaatcgggcgctacctgtggacgaagcgatacatactaccagtcccccaccggtgaccggatcagatcgaaggtcgaactgaccagatacctcggccccgcttgcgacctgacactatttgatttcaaacagggaatactctgttaccccgcccctaaggcgcaccctgtggcggtggctagtaaaaaacgcaaaaaaccaagtagaccagctaaaacgcgaaaacggcaggtgggtccacagtccggtgaggtgcggaaggaagccccacgcgatgagactaaagcagacacggatactgctcctgctagttttcctgcgcctggttgttgtgaaaattgcggcatatctttcagtggagacggcactcagaggcagcgcctgaaaacactttgcaaggattgtagagcacaaagaattgcatttaatagagagcagagaatgttcaagcgcgttgggtgtggcgagtgcgcagcatgtcaggtgactgaggattgcggggcttgttccacatgccttctccaactcccacacgacgttgcttccggcttattttgcaagtgcgagcgccgacgttgtctgcgaattgttgaaagaagtagaggttgcggtgtgtgtagagggtgtcagacccaggaggactgcggccactgtcctatatgtttgagacctcccagacccggtttacgccgccagtggaagtgcgtgcagaggcgatgtcttcgcggcaaacacgccaggagaaagggggggtgtgactcaaaaatggctgcccgccgcagacctggcgcccagccgttgccacccccaccaccaagccagtcccccgagcccacggaaccacacccacgcgcccttgccccatcccccccagccgagtttatatactactgtgttgatgaagatgagctccagccgtacactaatagaaggcagaaccgcaaatgcggagcttgcgctgcatgtctgagaaggatggactgcggaagatgtgacttctgctgtgacaagcctaagtttggaggcagtaatcagaagcggcaaaagtgcagatggcggcagtgcttgcagtttgcgatgaagagattgctgcccagcgtttggtcggaaagcgaagatggagctggctcaccgccaccatatcgacgtcgcaagcgcccttctagcgcaaggaggcaccatttgggaccaaccctcaagccgaccctggccacaagaaccgcccaacctgatcacacacaggcccccacaaagcaagaagcgggagggggatttgttcttcctcccccgggtaccgatctagttttcttgcgagaaggtgcttcaagtcccgtacaagtccctgggccagtggccgccagcactgaagctcttctgcaggctgtcgatcccggcctgccctccgtaaaacaggaaccccctgaccctgaagaggataaagaagagaataaggatgatagcgccagtaagctggcgccggaggaggaggccggcggcgcaggcacaccagtagaacctacaactcagccacagtattcaggcaacttcgacaatgacctgtacgagatctatctcatcgatatttag

SEQ ID NO: 194953 - DNA, 1650 bp, synthetic construct
  misc_feature 1..1650: note = Description of Artificial Sequence: Synthetic coding sequence
  source 1..1650: mol_type = other DNA
atggccgaggactggctggactgccccgccctgggccccggctggaaaagacgtgaagtgttcagaaagagcggcgctacatgtggacgctctgatacttattatcagtcgccaacaggcgacaggattagatccaaagtggagctaacaaggtatctcgggccagcctgcgatttaactcttttcgatttcaagcaaggcatcttgtgctatcctgcgcctaaagcacatccagtggccgtggccagtaagaagcgcaagaagccaagtcgacctgctaaaacacgcaagaggcaggtgggcccccagagcggagaggtaaggaaagaagccccccgtgacgaaaccaaagcagataccgacaccgcccccgctagcttccctgccccaggttgttgtgagaactgcggaattagctttagcggtgatggaacccagcgtcagaggttgaagacgctttgcaaggattgcagagcacagcggatcgcctttaaccgcgagcagagaatgttcaaaagagtcgggtgtggagaatgtgccgcttgtcaggtgacagaagattgtggcgcatgcagcacctgcctgctgcagctaccccacgatgttgcaagcgggctcttttgcaaatgtgagagaagaagatgtctgcgcattgtggaaagaagtcgcggctgcggcgtatgtagggggtgccagacccaggaagactgtggccattgccctatttgccttcgtccccctagacctggattacgccggcagtggaagtgcgttcagagacggtgccttcgtggaaaacatgcacgacgcaagggcggctgcgactctaagatggctgcccggaggcgaccaggcgcccagccactgcccccgccgccccctagccagtcgcccgagccgactgagccacaccctagagcactagctccctcaccaccagctgagtttatttactactgtgtggatgaagacgaactgaagcgcctcctgccgtctgtgtggagcgagagcgaagatggcgcgggaagcccaccaccctacagaagacgtaagcgccctagtagcgcccgccggcaccatcttgggcctaccctgaagccaactctggcaacaaggaccgcccagcccgaccacacgcaggcccctacaaaacaggaagccggtggcggcttcgtgctgccaccccccgggaccgatcttgtcttcttacgcgagggggcctcctcacctgtgcaggtgcccggccccgtggccgcttcaacagaagcgttactgcaagaagcacagtgcagcggcctctcctgggtagtggctctaccacaagtgaaacaggaaaaagctgacacacaggacgaatggactccagggaccgcagtcctcacctcccctgttcttgtgcccggctgtccatcgaaggccgtggaccccggcctccccagtgtgaagcaggagccacccgatcccgaagaggataaggaggagaacaaagatgattctgcgagcaaattagctcctgaggaggaggcgggaggcgcaggtactcccgtcataacagaaatcttttcactgggcggaaccagattccgagataccgcagtctggcttccccggtcaaaggatctcaagaagcccggggcccgaaagcaatag

SEQ ID NO: 194954 - DNA, 1512 bp, synthetic construct
  misc_feature 1..1512: note = Description of Artificial Sequence: Synthetic coding sequence
  source 1..1512: mol_type = other DNA
atggccgaggactggctggactgccccgccctgggccccggctggaagcgccgcgaagtctttagaaaaagcggagctacttgtggtagatccgacacgtactaccagagccccacgggcgatcgcatacgatccaaggttgaacttactaggtatctcggcccagcttgtgatctgactctgttcgacttcaaacagggaatcctgtgttatccagcgccaaaggctcacccggttgcagttgcatcaaagaaaagaaagaaaccatcacggccggctaaaacccgtaaacgacaagtgggcccccagtctggggaagtgagaaaggaggcccctcgggacgagactaaggctgatacagataccgcgccggcaagcttcccagcaccaggatgctgcgagaactgcggcatttctttcagcggagatggaacgcagagacagcggctcaagacgttgtgtaaagactgtcgagcacagcggatagcctttaatcgggagcagcggatgtttaaacgcgtgggctgcggggagtgcgcagcatgtcaggtgacagaagattgcggcgcatgtagtacctgtctcctacaattgccacacgacgtggcgagcggtctgttttgcaaatgtgagagacgcaggtgcctcaggattgtagagcggtctaggggctgtggggtatgtcgaggatgccagacccaggaagactgtggccactgtcctatctgcctcagaccacctaggcctggcctccgcagacagtggaaatgcgtgcagagacggtgccttcgtggcaagcacgcgcgcaggaaagggggctgtgatagcaaaatggccgctcgacggaggcctggagcacagccgctaccacctcctccaccttcacaatccccagagccaaccgaacctcacccaagggcccttgcaccgtcacctcctgccgagtttatctattattgtgtcgacgaggatgagctgaaaaggttgctgccgagcgtatggagcgaatcagaagatggggcaggaagccccccgccctacagacggcggaagcgaccatcctctgcaaggcgccaccacttggggcctacactcaaacccaccctggcaacccggacagcccagccggatcatactcaggccccgacaaagcaggaggccgggggaggctttgtgttaccacctcctgggactgatcttgtctttctgagagagggcgcttcatccccggtgcaggtgccaggccctgtggccgcctccaccgaggcactgttacaggccgtggaccccggtctcccctctgttaagcaggagccgcctgatcctgaagaggataaggaagagaataaggacgattctgctagcaagttggctcccgaggaggaagcgggcggggctggcactccagtcatcacagagatattcagtctcggcggtactcgtttcagagataccgccgtctggctcccacggtcgaaggacctgaaaaaacccggtgcaagaaaacaatag

SEQ ID NO: 194955 - DNA, 1671 bp, synthetic construct
  misc_feature 1..1671: note = Description of Artificial Sequence: Synthetic coding sequence
  source 1..1671: mol_type = other DNA
atggccgaggactggctggactgccccgccctgggccccggctggaagcgcagggaggtattcagaaaaagtggcgcaacctgcggacggtctgatacatactaccagtcacctaccggcgatcgcattagatcaaaggttgaactcacccggtacctgggcccagcatgtgacctgactctcttcgatttcaagcaaggaatcctatgctatcctgccccaaaggcccacccagtcgccgtggcgtccaagaagcgcaagaagccatcccgacctgctaaaacaaggaagcgccaggtggggccccagtccggagaggtacgaaaggaggcccccagagatgaaaccaaggccgatacagacaccgcgcctgcctccttcccggcccccggttgttgcgaaaattgcggcatctcgttttcaggtgatggaacccagaggcagaggcttaaaacactgtgcaaagattgtcgcgcccaacgcattgcattcaaccgtgaacagcgcatgtttaagtcaagaggctgcggtgtgtgcagaggttgccaaactcaggaggattgcggccattgtcccatctgcctgaggcctcctcgtcccgggctacgtagacagtggaagtgtgttcagagacggtgtctccgcggaaagcatgcacgccgaaagggaggatgtgattcaaaaatggctgctcgaaggagaccaggcgcacaacctctgcctccaccgcctccatcacagtcgccagaacccacggagccccaccctagggcattggcaccctcaccccctgctgagttcatctactactgcgtggacgaagatgagctacaaccctatacaaacagacggcaaaatcgcaagtgtggggcttgtgccgcttgccttcgacgtatggactgtggcaggtgcgacttctgctgtgacaagccaaagttcggggggagcaaccagaagcggcagaagtgccgttggcggcagtgtctgcaatttgccatgaagcgactgctacccagcgtgtggtccgagagcgaggacggggcagggtcccctcccccttaccgtcgtcgaaagagacctagcagcgctcgtcgccatcatctgggcccgaccctgaagccaacactcgccactcgaacagctcaaccagaccatactcaggctcccactaagcaggaagctggggggggttttgtcctgcccccacctggcaccgatctagtgttcttgcgggagggcgcgtcaagtcccgtacaagtgcctggacccgtggctgcatcaaccgaagccttgctccaggaagcccagtgttctgggctatcatgggtggtggcactgccccaggtaaagcaggaaaaggccgacacacaggacgagtggactccaggaacagcagtgttaactagccctgtgcttgtcccagggtgtccaagcaaggcggttgacccaggcctgccgagcgtaaagcaggaacccccagacccagaagaggacaaagaagagaataaggacgattcagcctccaagctcgcgcccgaagaggaggcaggaggcgctggtacacctgtgataacggagatcttctctctggggggtacaagatttcgggatacggctgtgtggctacctaggagtaaagacctcaagaaaccaggagcccggaaacaatag

SEQ ID NO: 194956 - DNA, 1818 bp, synthetic construct
  misc_feature 1..1818: note = Description of Artificial Sequence: Synthetic coding sequence
  source 1..1818: mol_type = other DNA
atggccgaggactggctggactgccccgccctgggccccggctggaagcgccgggaagtctttaggaagtcaggcgcaacctgtgggaggtctgatacatactaccagtctcctaccggcgacagaatccggagcaaagtggaactaacgcgctatctgggccccgcttgtgatctaaccttgtttgacttcaagcaagggattctgtgttatcccgcccctaaggcacacccggtggcggtcgccagcaaaaagcggaagaaacccagcaggcccgcaaagacccggaagcggcaggtcggcccacaatcaggggaggtgcgcaaggaagcccctcgcgacgaaactaaagctgacaccgatacggcacccgcctcttttcctgcaccaggatgctgtgagaactgtgggatttccttttccggtgatggcacccagcgacagcgactgaaaaccctgtgcaaggactgtagggcccaaagaattgccttcaatcgggaacagcggatgttcaaacgcgtgggatgcggggagtgtgccgcctgtcaggttacggaagattgcggggcgtgctcaacatgtctgctccaattgccgcacgacgtagcctccggcctcttctgcaagtgtgaaaggcgccgctgtttgagaatagtagagcggtcgagagggtgcggcgtttgtcgcggctgtcaaacgcaggaagactgcgggcactgtcccatttgcctgagaccacctcgaccaggattacgaaggcagtggaaatgcgtgcagaggcggtgcttgcgcgggaagcacgctcgtcgaaaaggcgggtgcgacagcaagatggccgctcggagacggcccggcgcacagccccttcctccccctcctccaagtcagagccccgaaccaaccgaacctcacccacgcgcactggccccgagcccaccggcagaatttatctattactgtgtggatgaggacgaactgcagccatacactaacagacgtcagaacagaaaatgtggcgcttgcgctgcctgtttacgtagaatggactgtgggaggtgcgacttttgttgtgacaaacctaaattcggtggaagtaatcagaaacggcaaaagtgccgctggaggcaatgcttgcagtttgccatgaaacgattgctcccaagcgtgtggagcgaatccgaggatggggccggctctcctcctccgtatcgtcgcagaaagcgcccctcatccgcacgcagacatcacctgggcccaactctgaaaccgactctggcgacaaggactgcacagcccgaccacactcaggcgccaactaaacaggaagccggcggtggattcgtcctgcccccgcccggaacagacttggtttttctccgggagggagcatcaagccctgtgcaagtgcccggtccggtggctgcctcaaccgaggccctgctccaagaggcacaatgctctggcttatcctgggttgttgcactgccgcaagtgaaacaggagaaagctgatacgcaggatgaatggaccccaggcactgcggttctaacctcgcccgtgttggtgcccggttgcccttcaaaagctgtggacccagggctgccttcggtgaaacaggaacctcccgaccctgaggaggataaggaggaaaacaaggacgattctgcttcaaagctagcccctgaagaggaagccggtggcgccgggacacccgtgataactgagatcttttccctgggaggaactcgatttagagatactgctgtctggctgccaagaagtaaagacctcaaaaagcctggagctcgaaaacagtag

SEQ ID NO: 194957 - DNA, 1512 bp, synthetic construct
  misc_feature 1..1512: note = Description of Artificial Sequence: Synthetic coding sequence
  source 1..1512: mol_type = other DNA
atggccgaggactggctggactgccccgccctgggccccggctggaagcgcagagaggtctttcggaaatcaggagccacatgcggtcgttccgacacatattaccagtcacccacaggtgataggattcggagcaaagtcgagctgacaagatacttgggcccggcgtgtgacctcactctctttgactttaagcagggcatcttgtgttacccagctccaaaggctcatcccgtggccgtcgcatccaaaaaacgcaaaaagccatctaggcccgccaaaacccgaaagcgccaggtagggccccaatcaggcgaagtcaggaaagaggcaccccgcgacgagaccaaagccgacaccgataccgcccctgctagctttcctgctccaggatgctgtgagaattgtggaatcagtttttccggcgatggcacacaacgccaaagactgaagacactatgcaaggactgtcgggctcagaggatcgcttttaaccgggagcaaaggatgttcaaacgtgttggatgtggagaatgtgcggcatgccaggttacagaagactgtggggcatgctcaacttgccttctccaactcccccatgacgtggcgtcgggcctcttttgtaagtgtgaaaggcgccgctgtctacggattgtggagaggagcaggggctgcggcgtgtgcagaggctgccaaacacaggaggattgcgggcattgtcctatctgtctccgcccaccccgcccgggcctgaggcggcagtggaagtgcgtacaacggcgctgtctccgagggaaacacgctaggagaaaaggaggttgtgactcaaagatggccgctcgccggcggcctggcgcacagcccctgccccctcctcctccttcacaatctcctgaaccaaccgaaccacacccacgtgccttagcaccatcaccgcctgctgagttcatatactactgcgtggacgaagatgagctaaaaagactgcttcccagcgtgtggtctgagtccgaggacggtgcgggctcaccacccccttacagacgaaggaagcgaccaagcagtgcacgaagacatcacctggggcccacgttgaagcccacattagccacaaggaccgctcagccagaccacacccaggcaccaaccaagcaagaagccgggggcggatttgtactgccgccgcccgggaccgacttagtgtttttgcgtgaaggcgccagtagccccgtacaggtccctggaccagtcgccgcctcgacggaagccttgctgcaagcggtcgaccctgggctgcccagcgtgaagcaggagccgccggatccagaggaagataaagaggagaacaaggatgacagcgcctccaagcttgccccggaggaagaagctgggggcgcgggaacgcctgttatcacagaaatcttctcattaggaggtactcgcttccgagatacagccgtgtggctccctagatccaaagatctgaaaaagcccggggcaagaaagcagtag

SEQ ID NO: 194958 - DNA, 1650 bp, synthetic construct
  misc_feature 1..1650: note = Description of Artificial Sequence: Synthetic coding sequence
  source 1..1650: mol_type = other DNA
atggccgaggactggctggactgccccgccctgggccccggctggaaacggagggaggtgtttagaaaaagtggggcaacttgtggtcgatcagacacatattatcaatcacccaccggggatagaatcagatccaaagtggagttgacaagatacctgggccccgcgtgcgacttgaccctgttcgacttcaaacagggcatcctctgctaccctgcaccaaaagctcacccagtggccgtggcctctaagaagcgcaagaaaccttccaggcctgctaaaacaaggaaacggcaggtgggaccacaaagtggcgaggtacgcaaagaggccccccgggacgagactaaagctgacactgatacagcccccgccagcttccccgccccagggtgttgtgagaactgcggtatctcctttagcggagacggaacccaacgacagcgcctcaaaactctctgtaaagattgcagggcacagcggatagccttcaaccgggaacagcgtatgttcaaacgcgtgggctgtggcgagtgcgccgcttgtcaggttacagaggactgcggggcttgctccacctgccttttgcaactgccacacgacgtggcttcaggactcttttgcaagtgcgaaaggcgcagatgtctgcggattgtcgaacggtctcggggttgcggcgtttgccggggctgtcagactcaggaagattgtggccattgtccaatttgcttgcgccccccgcgacccggtctgcggcggcaatggaagtgcgtccagcgaagatgcctgcggggcaagcatgccaggaggaagggcggctgtgattctaaaatggcagctaggcgtcggccaggggcccagccactcccccccccaccaccctcccagagtccagaaccgaccgagccacatcctcgggcgctggccccttccccccccgcggagtttatctattactgcgtggatgaggatgaactgaaaaggctattgcctagcgtctggtccgagagcgaagatggggcaggatccccgcccccatataggcgaaggaagagaccaagctctgcccgaagacaccacctagggccgacactgaagcccaccttggctactagaactgcacagcctgaccatacccaggctccgacaaagcaggaggccggaggtggatttgtgttgcccccccccggtaccgacctggtgtttctaagagagggggcttccagccctgtgcaagtccccggtcccgttgccgccagcaccgaggctctgctccaggaagcccagtgttcaggtctgagttgggtcgtcgcattacctcaagtcaaacaggagaaggccgacacgcaggatgaatggacaccaggaacggcagtattgacctcacccgttttagtgcccggctgtccatcaaaagcagtcgatcccggcctcccttcagttaaacaagaacccccagaccccgaagaggacaaagaagagaacaaagacgatagcgccagtaagctcgccccagaggaggaggccggcggcgccggtaccccagttattactgagatctttagtctgggaggcacaaggtttagggataccgccgtgtggttgccaagatcaaaggatcttaaaaagcccggggcccgcaagcaatag

SEQ ID NO: 194959 - DNA, 1818 bp, synthetic construct
  misc_feature 1..1818: note = Description of Artificial Sequence: Synthetic coding sequence
  source 1..1818: mol_type = other DNA
atggccgaggactggctggactgccccgccctgggccccggctggaagcggagagaagttttcaggaagtcaggagccacttgtggaaggagcgatacatactatcagagcccaaccggagacaggatcagaagtaaagtagaactaacaaggtacctgggacctgcttgcgacctgacgctgttcgattttaagcagggcattttatgctatcccgcccctaaagctcacccagttgctgtggcttccaagaagcgaaaaaagccatctcgaccagcaaagacaaggaagcgtcaggtgggcccacagtccggcgaagttcgcaaggaagctccaagggatgaaaccaaagctgatacagatactgcccccgcctcctttccagcccccgggtgctgcgaaaattgtggaataagtttttcaggcgacggcactcaacgtcaaaggctcaagacactttgcaaagattgcagggcgcaaagaattgccttcaatcgagagcagcgcatgttcaagcgcgtcggttgtggggagtgcgcagcttgccaagtgaccgaggattgtggtgcctgtagcacctgtctgctccaactgccccacgacgtggcctcagggctgttctgcaagtgcgagcgccggcgctgcctccgcatagtggagcgttccagaggctgtggcgtgtgtcggggctgccagacacaagaagactgtggacactgccctatctgtcttcgcccccctcgccctgggttgcggaggcagtggaaatgtgtccagcggcgctgcctgagagggaaacacgcaagaagaaaaggtggatgcgactctaaaatggctgccaggcgacgtcctggggcccagccattgccgcccccgccaccctcccagtcaccagagcccactgaaccccaccctagggccctggccccatcgccacccgcggaatttatttactattgtgttgatgaggacgaacttcagccctacaccaacagaaggcagaaccggaaatgtggcgcttgtgccgcatgtcttcggcggatggactgcggaaggtgcgacttctgttgtgacaaacccaaatttgggggatcaaatcagaagaggcagaaatgtcgctggagacagtgtttgcagttcgccatgaagcggttacttccttctgtttggagcgaatcggaggacggcgcgggcagtcctccaccgtatcgtcgaaggaagaggccaagtagcgcgcgccgacaccacctggggcccacactgaaaccaactctggctaccaggacagctcagcccgatcatacccaagcacccaccaagcaggaagcaggcggcggcttcgtgctcccacctccaggaacagatctggtctttctgcgcgagggggcttctagccctgttcaggtgcccggtccagtggcggccagcactgaggccttgctgcaggaggctcagtgctcgggcctgtcctgggtggttgctctaccccaggtaaaacaggagaaagcggacacacaggatgaatggacccccgggaccgccgtgctgacgtcccccgtgcttgtgccgggttgcccatcaaaagctgtcgatcctggcttgcctagcgtgaagcaggagccacctgaccccgaggaggacaaagaggaaaacaaggatgattctgcctccaagctcgcccctgaggaagaggccggcggcgccggcactcctgtgataaccgaaatctttagcctgggaggaactcggttcagagatacggctgtgtggctgcccaggtcaaaggatcttaaaaaacctggagcccggaaacagtag

SEQ ID NO: 194960 - DNA, 1971 bp, synthetic construct
  misc_feature 1..1971: note = Description of Artificial Sequence: Synthetic coding sequence
  source 1..1971: mol_type = other DNA
atgggcggcttccggctgcggaccggccggaacgccgccctgaactccgatcgcctgttactgcttcctgtggcatccatggcagaagattggctcgactgtcctgcactaggtcctgggtggaagcggagagaggtgtttcgcaaatccggggccacttgcgggcgcagcgatacgtattaccaatcccctactggcgaccggattagatcgaaagtagagctgaccagatatctcggaccagcctgtgacctcaccctcttcgattttaaacagggaattctgtgctatccggctcccaaggcacaccccgtggcggtggcctccaaaaaacgtaagaagccatcgcgcccagcaaagaccagaaaaagacaagtgggcccccaatccggcgaggttagaaaggaggctcctagggacgaaacaaaggccgacacggatactgcaccagcctcttttcccgctcctggctgttgtgagaattgcggaatttctttctccggggatgggacccagagacagagactgaaaaccctctgcaaagactgccgggcacagagaattgcttttaacagggagcagcgtatgtttaagagggtgggttgcggtgagtgcgcagcatgtcaggtcaccgaggactgcggtgcttgttccacttgcctcctgcagctcccgcacgacgtcgccagcggcttgttctgtaagtgtgaacgcaggagatgcctgcggattgtggagcgatcccgggggtgtggagtgtgccgcggatgtcagacacaggaagattgcgggcattgcccgatctgtctgaggcctccccggccaggcctgcgccggcagtggaaatgtgtgcaaagaaggtgcctaaggcacctcgctcaccggcttaggcgcaggcatcagaggtgccaacgacggacgcctcttgctgtagctcccccgaccggaaaacatgctcggagaaagggaggctgtgactctaagatggctgcccgccggagacccggtgctcaaccacttccaccgccccctcccagccagagtccagaaccgactgaaccgcatcctagagcactagctcccagcccaccagccgagttcatatactattgcgtcgatgaggacgagttgcagccttatacaaacaggagacagaaccgtaaatgcggggcctgcgcagcatgcctcagacggatggattgcgggcggtgtgacttttgttgtgacaagccaaagttcgggggcagtaaccaaaagcggcaaaaatgcaggtggaggcaatgtcttcaattcgctatgaagcgactgctaccctctgtttggtccgagagtgaggacggcgcggggtccccccctccatatcggaggcggaaaagaccctcgtctgctcgccgtcaccacctgggcccaactttaaagcccactctcgccacgaggaccgcccagccggaccacacccaggctcccactaagcaggaggctgggggaggcttcgtcctaccgcctcctgggaccgatctggtctttttgagggaaggcgcttcttctcccgtgcaagtacccggacccgtagccgcgagcacagaggccctgctgcaggaagcccaatgtagcggcctgtcctgggtagttgccttgccccaggtgaagcaggaaaaggcagacacccaggatgaatggacccccggcactgccgttctgacttctccggtgctagtgccagggtgtccaagtaaggcagtggatcccgggctacccagcgtaaagcaggaacctccagacccggaggaagacaaggaggaaaacaaggatgactctgcttccaaattggcgcctgaagaagaagcggggggcgccggaacccctgtcatcaccgagatattctcactaggcggcactcgcttcagggataccgccgtgtggctgccaagaagtaaggatcttaaaaagcccggggcacggaaacagtag

SEQ ID NO: 194961 - DNA, 1611 bp, synthetic construct
  misc_feature 1..1611: note = Description of Artificial Sequence: Synthetic coding sequence
  source 1..1611: mol_type = other DNA
atggccgaggactggctggactgccccgccctgggccccggctggaaaagacgggaagtatttagaaaatccggagctacatgtggtagaagtgacacctattaccagagccccaccggggatcgcatcaggtctaaggtcgagctcacaagatatctcggcccggcttgcgacctcaccctgttcgacttcaagcaggggatcttatgctatcctgcacctaaagctcatccggtggcagtcgccagtaaaaagcgcaaaaagccgtcccgcccggccaaaactcggaagcggcaagtcggccctcagagtggagaagtgcgcaaagaggctcctagggatgaaactaaagccgacacagacaccgcccccgcctctttccctgcaccagggtgctgtgagaactgcggcatttcctttagtggcgatgggacacagcgccaaaggctcaagacattatgcaaagactgccgtgcacagcgaatcgcgttcaacagggagcaaagaatgtttaagcgagttggatgcggcgaatgtgctgcatgccaggtgactgaagactgcggagcttgttcgacatgtctgctccaactgcctcacgacgtagcctctggactgttttgcaaatgcgaacgacgacggtgtcttcgcattgtagagcgtagtagagggtgtggcgtttgccggggttgtcagacacaggaagattgtgggcattgtcctatttgcctacggccaccgcgccccggtttgcgaaggcaatggaagtgcgtacagcgaaggtgcctgcgcggcaaacatgcacgaagaaaaggtggatgcgactccaaaatggctgcccggaggagaccaggagcacagccactcccacccccaccgccatcacaaagcccagagccaaccgaaccacagccctataccaacaggagacagaaccggaagtgcggtgcttgcgcagcttgtctgagacggatggattgcggacgctgcgatttctgttgcgacaagcctaaattcggggggtccaaccagaagcgacagaagtgtaggtggagacagtgcctacagttcgccatgaaacggctcttgcctagcgtttggtccgagtccgaagatggcgctgggtcccctcctccttaccgaaggcggaaaagacccagtagtgcccgaaggcatcacttggggcccacactgaaaccaacactggctactcgcactgctcagccagatcacactcaagcccctaccaagcaagaagctgggggcggattcgtgctgcctcctcctgggaccgacctggtgttcctgcgcgagggggcgagttcacctgtgcaagttcctggacctgttgcagcctccactgaagctctgctacaggctgtagacccaggcttgccatctgtcaaacaagaacctccagacccagaggaagataaggaagagaataaagacgactctgcctctaagctcgcacccgaagaagaagctggcggcgcgggcacccctgtcatcacagagatcttctcacttgggggaacccgctttcgggacacagcagtgtggctgccgcgatcaaaagaccttaaaaaaccaggtgcaagaaagcagtag

SEQ ID NO: 194962 - DNA, 1893 bp, synthetic construct
  misc_feature 1..1893: note = Description of Artificial Sequence: Synthetic coding sequence
  source 1..1893: mol_type = other DNA
atggccgaggactggctggactgccccgccctgggccccggctggaaacgacgcgaagtgtttcggaaatccggagctacttgcgggagatctgatacatattatcagagcccaactggcgatcgaatccgctcgaaggttgagctgactcgatatttggggcctgcctgtgacctgacactctttgatttcaaacagggaatcctgtgctatcccgccccgaaggctcacccagtagctgttgcttcaaagaagcgtaaaaagccctcccggcccgctaagactaggaaacgacaagtggggccccagtctggggaagtgcgaaaagaagccccccgggacgaaacaaaggctgacacagacaccgctcccgcaagctttccagccccagggtgctgcgagaattgcggaatttctttttcgggggatggcacccagagacagagactgaagaccctttgtaaagattgtcgagctcagagaattgcatttaaccgggaacagagaatgtttaaacgagtcgggtgtggtgagtgcgctgcctgccaagttactgaagattgtggcgcttgctctacctgtttactgcagctgccgcacgacgtagcatcaggccttttttgcaaatgcgaaagacgtcggtgccttagaattgttgagagaagtaggggctgtggggtctgtagaggatgtcaaactcaggaggattgtggccattgccctatctgcctccgaccaccacggcccggcttgaggcggcagtggaagtgtgtccaaaggcggtgtcttcgccatctcgcacaccggctgaggcgcaggcaccagcggtgccagagacgtacccctctggctgttgctccccctacaggtaagcacgcaaggcggaagggagggtgcgactcaaagatggccgccaggcgcagacccggcgcccaacccctacctcctccccccccctctcagtctccggagccaactgaaccccacccccgtgcactagctcccagccctccagctgaattcatttactattgtgtggatgaggacgagctgcagccttacacaaatagacgccaaaatagaaagtgcggcgcgtgcgcagcctgcttacggcggatggactgtggcagatgtgacttttgctgcgataagccgaagtttggtgggagcaaccaaaaacgtcagaagtgtagatggcgccagtgtctgcaatttgctatgaagaggttacttccatctgtatggagtgaatctgaggacggagccgggagcccacccccttatcgtcgcaggaaaagaccctccagcgctaggcgccatcacctggggcccactctaaagcccacgcttgcaacccggaccgcgcagccggaccacactcaggctcccactaaacaggaagcagggggcggctttgtactgccgccccctggtactgatttggtttttctgcgcgagggcgcgagctcacccgttcaggtcccaggaccagtggccgcctcgaccgaggcccttttgcaggaggctcagtgtagcggtctttcttgggtagtagcactaccccaagtaaagcaagagaaggcagacacccaggatgaatggactcctggcactgccgtgctcactagccctgttctggtccctggttgtcctagcaaggcagtggatcccggtctgcctagtgtcaaacaagagccgcccgatccggaagaggataaggaagagaacaaagacgactcagcaagtaaactagccccggaagaggaggccggcggcgcagggacacccgttatcactgagatcttttcacttggaggaacgcgattccgggacacggctgtttggctgccgaggtcaaaggatcttaagaaacccggggcccgaaagcagtag

SEQ ID NO: 194963 - DNA, 1704 bp, synthetic construct
  misc_feature 1..1704: note = Description of Artificial Sequence: Synthetic coding sequence
  source 1..1704: mol_type = other DNA
atggccgaggactggctggactgccccgccctgggccccggctggaagcgcagagaggtgtttagaaagtctggagccacttgcggtagaagtgacacgtactatcagtcccctactggagaccgcatccgcagcaaggttgaattgacacgctacctggggcctgcatgcgacctgactttgtttgattttaaacaagggatcctgtgttatcctgcaccaaaagcccaccccgtcgctgtggctagcaagaaacgaaaaaaaccttcacggcctgcaaagacgcgtaagagacaagtggggcctcagtccggggaagtgcggaaggaggcaccgagggacgagaccaaagccgacaccgacacagcccccgcttcatttcctgcacccgggtgctgcgaaaactgtggtatttcattctccggcgatgggacacagagacagcggctaaaaaccctctgtaaggactgccgtgctcaacgaatcgcctttaaccgggaacagaggatgtttaagtctcgaggatgcggcgtatgccgtggatgccagactcaggaggactgcggacattgtcccatatgcttgcgtcctccccgtcccggtcttcgccggcagtggaaatgtgttcaaaggagatgcttgcggggcaaacacgcacgccgcaagggagggtgtgattctaaaatggctgcacgcagacgccccggggctcagccactgccccctccgcctcccagtcagagccctgagcctacagagccacatcctcgggcccttgccccatctccacctgcagagttcatctattactgcgtcgacgaggatgagctgccctacaccaacaggcggcagaaccggaaatgcggcgcttgcgccgcgtgtctgagacggatggattgcggccgctgcgacttttgctgtgacaagccgaaattcggaggttccaaccagaaacgtcagaaatgcagatggcgccaatgtctgcagtttgccatgaagcgtctactccccagtgtctggtccgaaagtgaggatggtgccgggtcgccgcccccctaccgacggagaaagcggccgtcttccgcaagacgacatcacctcggccccacactgaagccgaccctggccactcgaaccgcccagccagatcatactcaggcgcccaccaagcaggaggctggcggcggcttcgtcctgccccctcctggtactgacttggtctttctgagagaaggtgcttcatctcccgttcaggttccaggaccagtagctgcctcaaccgaagcattactgcaggaggctcagtgctctggcctgtcgtgggttgtggcactgccacaggtcaagcaagagaaggccgacactcaggacgaatggacacccgggactgctgtcctcacctcgcctgtgttggtccctgggtgtccctcaaaggccgtcgacccaggattaccctcggtgaaacaggaaccgccagaccccgaagaggacaaggaggaaaataaggatgatagcgccagtaagctggctcctgaggaagaagcaggaggcgccggcactccagtgattaccgagatcttcagccttggcggcacacggtttagggacaccgcagtctggttgccgagatactatcacctggccctggactggaagtgcaattgtgggtaccacttatgttgtagatcagtgctggtgccatag

SEQ ID NO: 194964 - DNA, 1608 bp, synthetic construct
  misc_feature 1..1608: note = Description of Artificial Sequence: Synthetic coding sequence
  source 1..1608: mol_type = other DNA
atggccgaggactggctggactgccccgccctgggccccggctggaaacggagagaggtctttcgtaaatcaggcgcgacctgtgggcgttcagatacttactatcagtccccaacaggcgacaggatacggtctaaggtggaactgactcgatacttgggtcctgcctgcgacctcactctgtttgacttcaagcagggaatcctttgctatcccgcgcccaaagcacatcctgttgccgtggctagtaagaaacgcaagaagcctagtcgacctgcaaagacccgcaagaggcaagtagggccccagagcggtgaggttaggaaagaggcaccgagggatgagacaaaagccgataccgacactgctccagcctcgtttccggcccccggttgctgtgagaactgtggaatcagcttttctggagatggcacacagaggcagcggcttaagaccctctgtaaggactgtcgggcccagcgtattgccttcaatagagagcagagaatgttcaagcgcgtggggtgcggtgagtgcgccgcctgccaggtcacagaagattgtggagcttgcagcacatgtcttttacagttaccacacgacgtggcctcaggcttgttctgcaaatgtgagaggagacgttgtttgagaattgtcgaaaggtctcgaggctgcggcgtatgccgcggctgtcagacacaagaagactgcggccattgccctatctgcctcagaccgcctagacctgggctccgacgccaatggaagtgcgtgcaaaggaggtgcttgcgcgggaagcacgcgagaaggaagggagggtgcgacagtaaaatggccgccagacggcggcccggagcacaacccctaccacccccccccccatcccaaagcccagagcctaccgagccccaccccagagccctggctccaagccctcccgctgagtttatttattattgcgtggacgaggacgagttgaagcgactgctccctagcgtgtggtcggagtcagaggatggcgctggctcgccccctccataccggaggcgaaagcgccccagtagcgcaagacgacaccatctcggtcctactctcaaacctacgctggcgacaaggacagctcagccagatcacacgcaggccccaacaaagcaggaagctggcggcggttttgttctgccgccaccgggcacagacttggtctttctgagggaaggtgctagcagccccgtccaggtacctggccccgttgcagccagtacagaggccctcctgcaggcggtagatccaggcctgcctagcgtcaaacaggagccacccgaccccgaagaggataaagaagagaataaggacgatagcgcatcgaaattggccccggaggaggaggcaggaggcgcaggcacccccgtgatcacagagattttttcactcggggggacacggttccgggacactgcagtatggctcccgagggcagggactagggaaggtaaaatggatgtcaagtgcggcagaccccgcactcagtggagtcctcgcgcacgggccggtacccatgaagatggcctcgagccaatgagcgtcagtcatcacctgcagctgcggtag

SEQ ID NO: 194965 - DNA, 1968 bp, synthetic construct
  misc_feature 1..1968: note = Description of Artificial Sequence: Synthetic coding sequence
  source 1..1968: mol_type = other DNA
atggccgaggactggctggactgccccgccctgggccccggctggaaacgtcgagaggtatttagaaagagtggggcaacctgtggacggtccgacacctactatcaatccccgacgggcgaccggatcaggtcaaaggtagagctgacccggtacctgggacctgcctgcgacctgacattgtttgacttcaaacaagggatcttgtgctaccctgcccctaaagctcaccctgtagcggtcgcctccaagaaacgcaaaaaaccctctcgaccggctaaaacacgtaagcggcaggtgggcccccagtcaggggaggtacgcaaggaggcaccacgcgacgaaactaaagcggacactgacactgcaccagcctcgttccccgcccccgggtgttgcgagaattgtggaatttcattttcaggcgacgggacccaacgacagaggctgaaaaccctgtgcaaggattgccgcgcccagcggattgcattcaatagggagcagcgaatgttcaaaagggtcggctgtggggagtgtgccgcgtgccaagttaccgaagactgcggcgcgtgttccacttgtctgttacaacttccacatgatgttgcgtccgggctgttttgcaagtgtgagcggagacgctgcctcaggattgtggaacggtctaggggttgcggcgtgtgcagggggtgtcagactcaggaagactgtgggcattgtcctatttgcctcagaccaccccgacccggcctacggaggcagtggaagtgtgttcagcgcaggtgcctccgcggaaaacatgcccggcggaaagggggttgtgatagtaaaatggccgcccgccggcggccaggcgcacagccgctgccaccacctcccccatcccaaagtcccgagccaactgaacctcatcctagggctctcgctcccagcccaccggcagaatttatttactactgcgtcgatgaggacgaactgcaaccctacactaacagacgccagaaccgcaagtgcggcgcttgtgcagcctgtcttcgccgcatggattgcggtcgctgtgatttttgttgtgataaacctaagtttggggggagcaatcaaaaacgccaaaaatgtcgctggaggcagtgtctccagtttgcaatgaaaagattattgccatccgtctggtcagaatctgaggatggagccggttcaccccctccctatcggcggcggaaacgtccctcctccgccagacgtcaccacctaggccctaccctgaagcccactctcgcaaccaggaccgcacaacctgaccacacacaggcacccaccaaacaagaagctggcggcggctttgtactcccaccacccggaaccgatctggtctttcttcgggaaggagcttcctcccctgttcaggtgccagggcccgtagcagcgtctaccgaggctttgctgcaggaggcacaatgttctggactgtcttgggtggtcgctttaccacaagtcaagcaggagaaagcagatactcaggatgagtggacgcctggcaccgcggttctgacttcccctgtactggtgcccggatgcccttccaaagcagtggaccctggactcccaagcgtgaaacaggaacctcccgaccctgaggaggacaaggaggaaaacaaagacgacagtgcctcaaagctggcacctgaggaagaggctggtggagcaggcacccctgtcatcaccgagatattttctctgggtggtactcgctttagagacaccgccgtctggcttccgagcttgcagggacgacattcaggcagagaagatgggtgtaaggtctgggagaccgaagacaccgtggagcctaccagtaccagctggaatccccgaggttggccgggtacccacgtgtcactgtcccctcccccagcatccatgatgtgggtgagctgccgtcgctcatggtgccctagcagccagtcatag

SEQ ID NO: 194966 - DNA, 1236 bp, synthetic construct
  misc_feature 1..1236: note = Description of Artificial Sequence: Synthetic coding sequence
  source 1..1236: mol_type = other DNA
atgcgggcccaccccggcggcggccggtgctgccccgagcaggaggaaggcgagagcgctgcaggcggctccggcgccgggggcgactctgcaatagagcagggagggcagggtagcgcgcttgcaccatcccctgtcagtggcgtcagacgggagggcgcccgtggcggtgggcggggcagaggccgttggaaacaggccgggcggggcggcggtgtttgtgggagaggcagaggacgcggcagggggcgcggacgcggtcgaggtcgtggtcggggcaggggccgtcctccgagcggcggtagcggcctcggaggcgacggcgggggctgtggcggagggggttctggtggaggtggtgccccccgccgcgaacctgttccctttccttctggcagtgcagggccgggcccccgcggcccaagagctactgaatccggtaagaggatggactgcccagctctgccaccaggctggaagaaggaggaagtgatcaggaagagcggcttgagtgccggaaagagcgatgtgtactacttcagtcctagtggtaagaagtttagatccaaacctcagctcgcccgctacctcggcaacactgtggacctgtcctcctttgactttaggacaggcaaaatgatgccgagcaaacttcagaaaaacaagcagcgtcttcgaaacgatcctctcaaccaaaacaagggaaagcccgacttgaacacaaccctgccgatcagacagactgcgtcaattttcaagcaaccggtcacaaaagtgacaaaccatccttccaataaagtcaagagtgatccgcagcggatgaatgagcaaccccggcagctattctgggagaaacgtctccagggcttgagtgcatcagacgtcacagagcaaattatcaaaactatggaactccccaagggcctgcagggggttggcccgggatccaacgatgaaacgctgctgtccgctgttgcctccgcgttgcacacatccagtgctcctatcacgggccaagtgagtgccgcggtggaaaagaaccccgcagtgtggttgaacacctctcagcccctgtgcaaggccttcatcgtgacagatgaagatataagaaaacaggaggagcgagttcagcaggtaagaaaaaagttggaagaggctttgatggccgatatactgtcgcgggccgcagataccgaagagatggacatcgagatggactcaggggatgaagcatag

SEQ ID NO: 194967 - DNA, 909 bp, synthetic construct
  misc_feature 1..909: note = Description of Artificial Sequence: Synthetic coding sequence
  source 1..909: mol_type = other DNA
atgcgggcccaccccggcggcggccggtgctgccccgagcaggaggagggggagtccgctgcaggcggatctggggcaggaggcgactctgccattgagcaggggggacagggatcggctctggcaccctcgcccgtgtccggggtgaggcgcgaaggcgcacgaggcggcgggaggggacggggccggtggaaacaggcgggccggggtggcggtgtttgtgggaggggtagaggaagggggaggggcaggggtcgcggacgcggtcggggccgcggtcggggtcgccccccgagcgggggctccggacttggaggggacggggggggatgtggggggggaggctccggggggggaggcgctccccggcgcgaacctgtcccgtttccctctggctctgccggtcccggtccccggggaccccgcgcgaccgagagcggaaagaggatggattgtcccgccctacctcctggttggaaaaaggaggaggttattcgcaagtcaggcttgtccgccggcaagagcgatgtttattacttctcccctagcgggaaaaaattccggtccaaaccacaattggctcgctacctcggcaatacggtcgacctctcttccttcgattttcgcactggaaagatgatgccaagcaagttacagaagaacaaacagaggttgaggaacgatccactcaaccagaacaagttacgctggaacactcaccggcctgctccgtggcacgccctgtctagattgtgcctgcttatacggtgtctcttgtgccttgaatgcgcatatcctctccccctccaccttgtgaatagctatagctcaaagacacagctgcactgccttcacctttgggaggcatgtcccgcctacagccgccagaatcagtctttccctccatag

SEQ ID NO: 194968 - DNA, 909 bp, synthetic construct
  misc_feature 1..909: note = Description of Artificial Sequence: Synthetic coding sequence
  source 1..909: mol_type = other DNA
atgcgggcccaccccggcggcggccggtgctgccccgagcaggaggaaggtgaaagcgctgcgggtggctcaggagcagggggggatagtgccattgaacagggtggtcaaggctctgccctggcaccatcccccgtgagtggagttcggcgggaaggcgcgcggggcggagggagaggcagagggagatggaagcaagccggtcggggcgggggcgtgtgcggcaggggcagaggcagaggccgcgggaggggacggggacggggacggggcagggggaggggccgccctccaagtggtgggtccggtcttgggggagatggtggggggtgcgggggtggcggaagcggtggcggcggagctccacggagagagcctgtgcccttcccttccggttctgccggacctggacctcggggtccaagagcaaccgaatcgggaaagaggatggattgtccagcgcttccccccgggtggaagaaagaagaggtgatacggaagtcgggactgagtgcaggaaagagcgacgtgtactacttcagcccatcgggaaagaagtttagatccaaaccccagttggccaggtacctcgggaatacagtagacctttcgtcgtttgactttaggacaggaaagatgatgccaagcaaactgcagaaaaacaagcagcggctccggaacgaccccctaaatcagaataagttgcgctggaacacccataggcccgccccatggcacgccctgtctcgactgtgcctgctgatcaggtgtctgctttgcctggaatgcgcctaccccctgcctttacatctggtgaactcctacagctcaaaaactcagctacactgtctgcacctctgggaggcctgccccgcttactcccggcaaaatcagagtttcccgccatag

SEQ ID NO: 194969 - DNA, 876 bp, synthetic construct
  misc_feature 1..876: note = Description of Artificial Sequence: Synthetic coding sequence
  source 1..876: mol_type = other DNA
atggagcggaagcggtgggagtgccccgccctgccccagggctgggaacgagaggaagtgccacgccgcagtggcctatccgctggacatagagacgtgttctactacagtccctctgggaaaaagttccgttcaaaaccccagcttgcccggtacctcgggggatcaatggacttaagtactttcgacttcaggactggaaagatgctgatgtccaaaatgaataagtctaggcagcgcgtaagatatgattcctctaaccaggttaaaggcaaaccagaccttaacactgccttgccggtcagacaaaccgcctctatctttaaacagccagtgacaaaaatcacaaatcatcctagcaacaaggtcaagtcagatcctcagaaggcagtggatcaacccagacagctattttgggagaaaaagctcagcgggctgaacgcatttgacattgcggaggagctcgttaagacaatggacctcccaaagggtctccaaggcgtgggacccggctgcaccgacgaaaccttgctctccgctatcgctagcgccctccacacaagcactatgcccattaccgggcaactctctgcagccgtggagaagaatcctggtgtgtggctgaatacgacgcagcccctgtgtaaggcctttatggtgaccgatgaggatatcagaaagcaggaagaacttgtgcagcaggtgaggaagcggctggaggaagccctcatggctgatatgctggcgcacgtggaagagctcgccagagatggggaagcccctctcgataaagcatgcgcggaagacgacgacgaggaagacgaagaggaagaggaagaggaacccgacccagatccggagatggagcatgtgtag

SEQ ID NO: 194970 - DNA, 780 bp, synthetic construct
  misc_feature 1..780: note = Description of Artificial Sequence: Synthetic coding sequence
  source 1..780: mol_type = other DNA
atggagcggaagagccccagcggcaagaagttccggagcaagccccaattggcgcgatacttgggggggtctatggacctgagtacatttgactttcggactgggaagatgctgatgagcaaaatgaacaaaagtagacagcgggtgagatacgacagtagcaaccaagtgaagggcaagcctgacctgaacacggcactgccagtgcgacagactgctagcatttttaagcagcccgtaaccaaaatcacaaaccatcccagcaacaaggtgaagtctgatccacagaaggctgttgatcaaccacgccagctgttttgggagaaaaagctgtcgggcctgaacgcatttgacatcgcggaagagctcgtcaagaccatggacctgccgaagggcttgcagggggttggtcccggatgcactgacgaaacccttctctccgccatagcatcggccctgcatacctccacaatgcccatcacgggtcagctctcggcagccgtggagaaaaatcctggggtctggttgaatacaacgcaacctctgtgtaaagcatttatggtgacggatgaagatatccgcaagcaggaggaactggtacagcaggtcagaaagcggctggaggaggccctgatggcggacatgctggcccatgtcgaggagctcgcaagggacggcgaggctcctctggacaaagcttgtgccgaggatgacgacgaagaggacgaggaagaggaagaggaagaaccagaccccgaccccgagatggaacacgtttag

SEQ ID NO: 194971 - DNA, 4485 bp, synthetic construct
  misc_feature 1..4485: note = Description of Artificial Sequence: Synthetic coding sequence
  source 1..4485: mol_type = other DNA
atgaacggcggcaaggagtgcgacggcggcgacaaggagggcggcctgcctgcaatccaggtgcctgtaggatggcagagacgggttgatcagaacggagtcttatatgtatccccttccggttccctgctgtcttgtcttgagcaagttaagacatacttgctcaccgatggcacgtgtaaatgcggccttgaatgtcccctcatcctccctaaggtatttaatttcgaccccggagctgccgtgaagcagcggacagccgaagatgtgaaggcggatgaggatgttacgaaactgtgcatacataaacgtaaaataattgcagtcgctaccctgcacaaaagcatggaggcacctcatcctagcctggtccttacctcaccaggcggcggaactaacgccacccctgtggtacccagccgggccgctacgccacggtcagttcgcaataaatctcatgagggaataaccaacagcgtgatgcccgagtgtaaaaatccattcaagttgatgatcgggtctagcaatgccatgggcaggctgtacgtgcaagaactcccaggctcccagcaacaagagcttcaccctgtgtatccgagacagcggttggggagtagcgagcacggacagaaatcaccatttcgggggtctcacggaggcttacctagtcccgcaagtagtgggtcacagatttacggagatgggtctatatcgcctaggacagatccactggggtcccctgacgtcttcacccgctccaacccaggattccacggagcaccaaactctagcccgatccatctgaatcgcacaccacttagccccccaagtgtgatgctgcacggaagtcctgtgcagtcatcttgcgccatggccgggcgaacaaacattcctctctctcccacattaaccactaagagccccgtcatgaaaaagcccatgtgcaatttctcgaccaatatggaaattccccgcgctatgtttcaccacaaacctcctcagggacctccccctcccccgccaccctcctgtgcactccagaagaagcccttgacctcagagaaagaccccctgggtatcctggaccccatcccctccaaaccagtgaaccaaaacccagtcatcattaaccccacctccttccacagtaacgtgcactcccaggtgcctatgatgaatgtgagtatgccaccagctgttgtgcctctgccatctaatctcccattgcccacggtcaagccgggccatatgaaccacggctcccatgttcagcgagtgcaacacagtgccagcacttccctgagtcccagcccagtgactagccccgtgcacatgatgggcactggaatcggtagaatagaagcatcgccacaaagatcccgctccagctcaacatcaagtgaccacgggaacttcatgatgccacccgtgggaccacaggctaccagtagtggcatcaaggtgccgccccggtcgccgcgttcaaccattggctccccacgaccatccatgccaagctcgccatcgacaaagagcgatggacatcatcagtacaaggatattcccaatccattaattgccggcatttctaacgtgttgaacactccttccagtgccgccttccccaccgcctcagccggcagctcgagtgtcaaatcgcagccggggttgttaggcatgcccctcaaccagatcttaaaccagcacaacgcggcttcattccccgcatcatctctgctgtctgccgcagccaaggcccagctggccaaccaaaataaattggctggcaataatagctccagcagctctaattcgggtgccgtagcggggagcggcaacaccgaagggcacagcactctcaacacgatgttccctcccaccgcgaacatgctgctgcctactggggagggccaatctgggcgtgccgctttaagggataaactaatgagccagcagaaagacgcactcaggaagagaaagcagcccccgacaacagtactttctttattgcgccaatcccaaatggactctagtgcagtgccaaaacccggtcctgacctgcttaggaaacagggacagggatcctttcctatctcatctatgagccagctgctccagtccatgtcctgtcaatcaagtcacctgtcaagtaacagcacacccggatgcggagcctccaacacagccctaccgtgttcggccaatcagctccattttactgatcctagcatgaattccagcgtgctccagaatattcccctcagaggagaagccgttcattgccataacgccaacacaaacttcgtccactccaattctcccgttccaaatcaccacctcgccggcctaatcaatcagatacaagctagcgggaattgtgggatgctctcccaaagcggcatggctctcggcaactccctacaccctaatcctccccagtcccggatatccactagttctacccctgtgatccctaactcaatagtttctagttacaatcagacgtcaagtgaggctggtggatcagggcctagtagcagcatagctatcgctgggaccaatcacccagccattacaaagaccactagcgtgcttcaggatggagttattgtcacaacagccgccgggaaccctctgcagtcacaactcccaattggtagcgatttcccatttgtcggtcaagaacatgcactgcatttcccgtccaacagtactagtaataatcatctgccacatcccttgaatccaagcttgctgtcatcgctcccaatatccctccccgtaaatcagcagcacctcctgaatcagaatttgctgaacatcctccaaccatcggctggcgaaggtgatatgagttcaatcaacaacactctgagcaatcaccagctgactcatctacaatcgctgctcaacaataaccaaatgtttcccccaaaccagcagcagcagcaactgctccaaggataccagaacttgcaagcctttcagggccagtccacgataccctgccccgccaataacaatccaatggcctgtttgttccagaacttccaggtccgtatgcaggaggacgccgccttgctcaataagcgcatttcaacacagcctggactgaccgctctgccagaaaaccccaacactactctcccccccttccaggatacgccttgcgaattacagccccgcatagatccctcactcggtcagcaggtaaaggacggcctggtcgtcggggggccaggcgatgcttctgtagatgctatttacaaggccgtggtcgacgccgcgtccaagggaatgcaggtggtgataaccaccgctgttaattccaccacacagatctctcctatccccgcactgagtgcaatgtccgccttcacagcatccatcggcgatcctctgaacctgagtagcgcagttagtgctgtcattcatggaagaaatatggggggcgttgatcatgatggacgtctcagaaactcgcgtggcgcaagacttcccaagaacctggatcatggcaaaaacgtgaacgagggtgacggcttcgagtactttaaatctgcgtcctgccatacgagcaaaaaacagtgggacggggaacagtccccacgcggagaacgcaatcggtggaaatacgaagagtttctagaccacccgggtcacatacacagttccccatgccatgaacgaccaaacaatgtcagtacattgcccttcctcccaggtgaacagcatcccatccttcttccaccccgtaactgcccgggggataagatcctagaggagaactttagatacaacaactacaagcggactatgatgtcttttaaagaaagactcgagaacacagtggaacgctgcgcacatatcaatggaaatagaccaagacagagtaggggattcggcgagcttctcagtaccgcgaagcaggatctggtgttagaggaacagtccccctcctcgtcgaattccctggaaaactctcttgtgaaagactacattcattataatggtgactttaacgcgaagagcgtaaacggatgtgtcccttctccctctgacgccaagtccatatcatccgaggatgacttgcgtaaccctgactcacctagcagtaacgaactcatacattacagaccacggacattcaacgttggcgatcttgtgtggggccagattaagggccttacaagttggccgggcaagcttgttcgggaagatgacgtccacaactcttgccagcagagtccagaagaggggaaagtggaaccagaaaagctaaagacgctgacggaggggcttgaggcatattctagagtccgcaagagaaaccgtaagagtgggaaacttaataaccaccttgaggcggccatacacgaggcgatgagcgaacttgacaagatgagtggcactgtccaccagatcccccaaggggaccggcaaatgcgcccccccaaacccaagagacggaagatttcccgctag

SEQ ID NO: 194972 - DNA, 2178 bp, synthetic construct
  misc_feature 1..2178: note = Description of Artificial Sequence: Synthetic coding sequence
  source 1..2178: mol_type = other DNA
atggccgccgccagcgccgtgagcgtgctgctggtggccgccgagcgcaataggtggcacagattgccttccctcctgcttcctccaagaacgtgggtgtggagacagaggactatgaaatatacgactgctactggccggaacattactaaagtgctgatagcaaaccgtggcgagatcgcttgcagggtgatgcgcacggcaaagaaactaggggtccagaccgttgccgtctacagcgaggccgaccgtaactcgatgcacgtggacatggccgacgaagcctattccatcggtccagccccatctcaacagtcatacttgtccatggagaagattatccaggtcgctaaaactagcgccgctcaggcgatccacccaggatgcggctttctctctgaaaacatggaattcgctgagctctgtaagcaggaaggaattattttcataggtccccccccaagtgccattcgcgacatgggaattaaatcaaccagcaaaagtattatggccgcggctggagtgccagtcgtggaggggtaccatggtgaagatcagtcagatcaatgcctgaaagaacatgcgaggcgcatcgggtaccccgtaatgatcaaagccgtcagaggcggcgggggtaaaggaatgagaatcgtcagatccgaacaagaatttcaggaacagctcgagtccgcaagacgggaggcgaaaaagagttttaacgacgatgcaatgctgatcgagaagttcgttgatacccccagacatgtggaggtgcaggtatttggagatcatcacggcaatgccgtttatctatttgagagagattgcagtgtccagcgcagacaccagaaaattatagaagaggcccccgctccaggtatcaagtctgaagtgaggaagaagctgggagaggcagctgttcgggcggccaaggcagtcaattacgtgggcgctgggacagtggagttcatcatggattccaaacacaatttttgtttcatggaaatgaacactagactccaagtggaacatccagtgacggagatgatcacgggcaccgatctggttgagtggcagttgaggattgctgctggtgagaagatccccctcagtcaggaagagatcaccctacaaggccacgctttcgaggcacgcatatacgccgaggaccccagcaacaatttcatgcctgtagccggacctctcgttcacttaagcacacccagagccgacccaagcacgcgtatcgaaactggtgtgcggcaaggcgacgaagtgtccgtccactacgatcctatgatcgccaagctggtggtctgggctgccgaccgccaagccgctctgacaaaactgcgctattctctcagacagtataatatagtcgggctccacacaaatatcgactttcttcttaacctgtctggtcaccctgaattcgaggcgggtaacgtacacaccgattttatcccacagcaccacaaacagttactcctgagtaggaaagcggccgcgaaggagagcttgtgccaggcggcccttggcctcatattaaaagaaaaagccatgaccgataccttcacactgcaagcgcatgatcagtttagccccttctcctcatcatctgggagacggctgaacataagctacacccggaatatgaccctgaaagacggaaaaaacaacgtcgcgatcgccgttacctataatcatgatgggagctactccatgcagattgaggataagaccttccaggtgcttgggaacctctatagcgagggcgactgcacctatttaaagtgctcagttaacggcgtagcttctaaggcgaaactcataatactggaaaatactatttacctcttctcaaaagagggctctattgaaattgatatccccgttcctaagtatctgtcgagtgtcagctcccaggagacacagggaggacctctcgcccctatgactgggacaatcgaaaaggtcttcgttaaagccggagataaggtgaaggcgggagattcactcatggtgatgattgccatgaaaatggaacacaccattaagtcacccaaggatgggactgtgaaaaaagtattctatcgggagggcgcacaagccaatagacatactcccctagtcgagttcgaggaggaagagagcgacaagcgtgagtctgagtag

SEQ ID NO: 194973 - DNA, 1728 bp, synthetic construct
  misc_feature 1..1728: note = Description of Artificial Sequence: Synthetic coding sequence
  source 1..1728: mol_type = other DNA
atggagaagatcatccaggtggccaagaccagcgccgcccagcacattcagtcaatcatggctgctgccggtgtgccagtagtagaaggatatcatggcgaggatcagtccgaccagtgcttaaaagaacatgcaagaaggatcggttatcccgtgatgattaaagccgttaggggcggaggagggaagggcatgaggatcgtgcggtccgagcaggaatttcaagaacaacttgagtccgcccgccgtgaggccaaaaaatcctttaatgacgacgcgatgctcatcgaaaagtttgtggacacacccagacacgtggaggttcaggtctttggcgatcatcatgggaacgctgtatacttattcgaacgggattgttccgtccagcgtcgtcaccagaaaataatcgaggaggcacctgccccaggaatcaaaagtgaggtgagaaagaagctcggagaggcagctgtgcgggcggctaaggctgtgaactacgttggggcaggcaccgtggagtttatcatggacagcaagcataacttctgtttcatggagatgaacacccgacttcaggtcgagcaccctgttactgagatgatcacgggaaccgacctggtggagtggcagttgcggattgccgccggcgagaagatacccctcagccaggaagaaattacattgcagggtcatgccttcgaggcgaggatctatgccgaagacccatcaaacaacttcatgcccgttgcgggccccttggttcatctgtccaccccacgcgcagaccccagtactaggatagagacaggagttcgccagggggacgaagtctctgtgcattacgaccccatgattgccaaactggttgtgtgggctgcagacaggcaggcggcgctgactaaactcagatatagcctgcgacagtataacatcgtgggtcttcacacgaacatcgattttttgttgaaccttagcggacaccccgaattcgaggctggcaatgtacacactgactttattccccagcaccacaaacagttgttgctgagccgaaaagctgctgcaaaggaatccctttgccaggccgcactaggcctcattctaaaagaaaaagcaatgactgatactttcaccctgcaggctcacgaccagtttagcccattttcctcatcctccggccgccgattaaatatcagctatacaagaaacatgacccttaaagacggtaagaacaatgtggcgattgctgtcacctacaatcatgacggctcctactccatgcagattgaagataagactttccaggtgcttggtaatttgtactcggaaggagattgcacctatctcaaatgtagcgtaaacggagttgcttcaaaagcgaagttgatcattctggaaaatactatttacctcttcagcaaagagggaagcatagaaattgatattccagttcctaaatacctctcctcggttagttcacaggagacacaggggggacccctcgcacctatgactggcacaattgagaaagtgttcgtcaaggccggcgacaaagttaaagccggcgattcgctgatggtcatgatcgccatgaagatggaacatactattaaatcaccgaaagacgggactgttaaaaaggtgttttaccgcgagggggcccaagcgaacagacacacgcccctggtggaattcgaagaagaagaaagcgacaagcgtgagtccgagtag

SEQ ID NO: 194974 - DNA, 1425 bp, synthetic construct
  misc_feature 1..1425: note = Description of Artificial Sequence: Synthetic coding sequence
  source 1..1425: mol_type = other DNA
atggccgccgccagcgccgtgagcgtgctgctggtggccgccgagaggaacaggtggcaccggctccccagtcttctcctgccgcctagaacgtgggtttggcgtcaacgaactatgaagtacactaccgctacagacgaagcctactccatcgggccagcgccttcacagcaatcttacctgagtatggagaagatcatccaggtggcaaaaaccagcgccgcccaagcaatccaccccgggtgtgggtttcttagcgagaacatggagttcgccgagttgtgcaaacaagaaggcatcattttcatcggacccccgcccagcgccattcgggacatgggcattaagtcaactagcaaaagcatcatggctgccgccggcgtccccgtggtggaaggataccacggcgaggaccagagcgaccagtgcctgaaagaacatgctaggagaatcggctatcccgtcatgatcaaagccgtccgcgggggcggggggaaaggaatgagaatcgtgcggtcagagcaggaattccaggaacagctagaatctgcccgccgggaggctaaaaagagtttcaacgatgatgccatgctaattgagaaatttgtcgacactcccagacatgtcgaagtccaagtattcggggatcaccacgggaacgccgtgtacctgtttgaaagagattgttctgtgcagcgaaggcatcagaagatcattgaagaagcacccgcacccggcattaaatctgaggtccggaaaaagctgggggaggcagcggtgagagcagctaaggctgtaaactatgtgggggccggcactgttgaattcataatggactctaaacataatttttgcttcatggagatgaatacgcgactgcaggtggaacatcccgttaccgagatgatcacaggcaccgacctggtggaatggcagctgaggatcgcagccggcgaaaaaatcccactgtctcaagaagaaatcaccctgcaaggacacgcttttgaggcacggatttacgcagaagacccaagcaataacttcatgcccgttgccgggccactggtccacctctccacccctagggccgacccgtcaactcgcatcgaaacgggggtacggcagggcgacgaggtgtctgtgcattatgatcctatgatcgcaaagttggtggtatgggccgcagaccgacaagctgccctgacgaagctgagatactcgctgcggcaatataacatcgtggggctgcacactaacttaactagctattcaacctgcttagcaacccagtctttaaagctggggacctgtaccctcatttcctctctcaacacaactaactcctgttgttccgtgggacgcctgcagcccaaaagcttgtacgcacgacagccttgggttagttcctcgcggagaaagccatag

SEQ ID NO: 194975 - DNA, 1281 bp, synthetic construct
  misc_feature 1..1281: note = Description of Artificial Sequence: Synthetic coding sequence
  source 1..1281: mol_type = other DNA
atggagttcgccgagctgtgcaagcaggagggcatcatcttcatcggccctccaccttctgccatcagagacatgggcattaagtctactagcaagagtatcatggctgcggccggcgtacccgtcgtcgagggttaccacggagaggaccagtccgatcagtgcttaaaggagcacgctagaaggattggttacccagtgatgattaaggcggttcgtgggggcggaggcaaagggatgagaattgtcagaagtgaacaggagttccaggagcagctggagtcggcacgccgcgaggctaagaaaagctttaatgacgacgccatgctgatagagaagttcgttgacaccccaaggcacgtggaggttcaagtattcggcgatcaccacggaaatgctgtctatctttttgaaagggactgttctgtgcagcggcgccatcaaaagatcatcgaggaagccccggcgcctggaattaagtcagaggttagaaagaaactgggggaggccgcggtgcgggccgctaaggcagtcaactacgttggtgctggcactgttgagttcataatggactccaaacataatttctgttttatggaaatgaatacaaggctgcaggttgagcaccctgtcacagagatgattacagggacggacctcgtcgagtggcaactgcggatagccgcaggcgagaaaattcccctcagccaggaagagatcacactccagggacacgcttttgaagcccgtatttacgctgaagacccgtccaataattttatgccagttgcgggccccttagtacatctctctaccccgagggccgaccccagcaccaggatcgaaaccggtgtccgccagggtgacgaagtgagcgtccattacgacccgatgattgcaaaactggtcgtgtgggctgccgaccgacaagccgcgctcacaaaacttagatatagtctccggcaatataacattgttggactgcacactaacattgatttcctgcttaacctgtccggccaccctgagttcgaagccggtaatgtccacaccgacttcattcctcaacatcataagcaactgctgctgagtcggaaagccgcggccaaggagagcttgtgccaggcggccctggggctcatcttgaaagagaaagcaatgacggatacttttactctgcaagcccacgaccagttctctcctttctccagcagttcgggcaggcgccttaacatttcctacacccgaaatatgacccttaaggacggaaagaataattag

SEQ ID NO: 194976 - DNA, 603 bp, synthetic construct
  misc_feature 1..603: note = Description of Artificial Sequence: Synthetic coding sequence
  source 1..603: mol_type = other DNA
atggagaagatcatccaggtggccaagaccagcgccgcccaggccatccaccccggatgtgggttcctgtctgagaatatggaattcgcagaattatgcaagcaggaaggcatcatcttcataggccctccgccgtctgctataagagatatgggaatcaaatcaaccagtaaatcaatcatggctgctgccggagtaccagttgtggaaggttatcacggagaggaccagagtgaccagtgcctgaaagagcacgcccgtcggatcggctaccctgtgatgatcaaggcagtgcggggaggcggcgggaagggaatgaggattgtgcgtagcgagcaggaatttcaggaacagcttgagagcgcacggagagaggcgaagaagtcctttaacgacgatgcaatgctgatcgaaaagttcgtggataccccccgtcacgtggaagtgcaggtgttcggggaccaccacggcaacgcagtgtatctgttcgaaagagactgctctgttcagcgccgtcaccagaaaatcatcgaagaagccccggcccctggaataaagagtgaagtgaggaagaaggggcggagttgctctcagtcatgctag

SEQ ID NO: 194977 - DNA, 1578 bp, synthetic construct
  misc_feature 1..1578: note = Description of Artificial Sequence: Synthetic coding sequence
  source 1..1578: mol_type = other DNA
atgtgggccgtgctgcggctggccctgcggccctgcgcccgggcctcaccagccggccctagagcttaccatggtgattccgtcgccagtcttggcacgcaaccagaccttggttctgcactgtatcaggagaactacaaacaaatgaaagctctcgtgaatcaactgcatgagcgggttgaacacatcaaattgggcggaggggagaaggctagagctctgcacatcagtaggggcaaattgctgcccagggaacgcattgacaacttaattgaccctgggagcccattcttggaattgtctcagtttgccgggtatcagctgtatgacaacgaagaagtccctggtggcggaatcattacggggatcgggcgtgtatcgggcgtcgaatgcatgattatcgcaaacgacgccaccgtgaaaggcggcgcatattaccctgttaccgtaaaaaaacaattgcgagcccaagaaatagccatgcaaaaccgtttgccctgtatttatctcgtcgactcaggtggtgcatacctgcctaggcaggctgatgtgttccctgatagggatcactttggtagaaccttctataaccaggcgatcatgagctccaagaacatagctcaggtaaaagccgcgacaggcgaggaagtaagtgcggaggatctgggcggcgctgacttgcactgtcgcaagtccggggtgagtgaccactgggccctggacgaccaccacgctctacacctcacaaggaaggtggtgaggaacctgaactaccagaaaaagctcgacgtgaccattgagccatctgaggaaccactcttcccagctgacgaactgtatggaattgtgggcgccaacctgaagaggtcatttgacgtcagggaagtgattgccaggattgtggacgggtcaaggttcacagagttcaaagcgttctatggcgataccctcgtgactgggttcgctcgcatctttggctacccagttggcattgtcggtaacaacggcgttctgtttagcgaatcagctaagaagggcacgcacttcgtacagctctgctgtcagcgtaacatcccactactgtttctgcaaaatattaccggcttcatggtcggtagggagtacgaggccgaaggcatagccaaggatggggccaagatggtagccgcggtggcttgtgctcaggtccccaaaataacgctcattatcggcggaagctacggcgcaggaaattacgggatgtgtggtcgggcttatagcccacgctttctctacatctggcctaacgcccggatcagcgttatggggggggaacaggctgccaacgtgctggcaactatcaccaaggaccaacgggcacgagaaggcaagcagtttagcagcgcggacgaggcagctctgaaagagccaatcatcaagaagttcgaggaggagggtaatccctattactccagtgcaagggtgtgggacgatgggatcatcgatcctgccgatacacggctggtgctgggcctgagtttctctgccgccttgaacgccccaattgagaagacagacttcggaatttttcgcatgtag

SEQ ID NO: 194978 - DNA, 1692 bp, synthetic construct
  misc_feature 1..1692: note = Description of Artificial Sequence: Synthetic coding sequence
  source 1..1692: mol_type = other DNA
atgtgggccgtgctgcggctggccctgcggccctgcgcccgggcctcccccgcagggcctagagcctatcacggggattctgtggcgagcctgggcacgcagcctgacctgggctcagccctctatcaggagaactataagcagatgaaggcactcgtcaaccaattacatgaacgcgtcgagcatatcaaactggggggcggggaaaaggcccgggccttacatatctcccgagggaagttgctgcccagagaaagaattgataacctgattgacccaggctcacctttcctcgagttatcccagttcgcaggatatcagctttacgacaacgaagaagtccccggcggtggcataattactggcatcgggagggtttctggcgtggaatgtatgattattgcaaacgacgctaccgttaagggcggcgcctactacccggttaccgttaagaagcagctcagggcgcaagagatagccatgcaaaaccgcctgccttgtatctacctagtcgacagcggaggcgcctatctgccgaggcaagctgacgtgtttcctgacagagatcatttcgggcgcaccttctataaccaggccataatgagttcgaaaaacatcgcacagattgctgtggtcatgggctcctgtacagcaggcggggcctatgtcccagccatggccgatgaaaatattattgtccgaaagcagggcactattttccttgcggggccccccctggtgaaggctgctaccggggaggaggtgagtgccgaagacctggggggcgctgacttgcattgcagaaaatctggggtgtccgaccactgggcgttagacgaccaccacgctcttcatttgacccgtaaagtggtacgtaatctgaattaccagaagaaattggacgtgaccatcgagccttcagaggagcctctgttcccggccgacgagctatatggcattgtcggtgccaacctgaagcgaagcttcgatgttcgtgaagtaatcgcccgaattgtggacggtagccgtttcaccgagttcaaagcattctatggcgataccctggttacagggtttgcaagaatcttcggttaccctgtcgggattgttggcaataatggcgtgctgttttccgaatcagcaaagaaggggacccacttcgtacaactgtgttgtcagcggaatattcccctgctcttcctccagaacattacagggtttatggtaggccgtgagtatgaagccgaagggatcgccaaggacggagctaagatggttgcggccgtagcatgcgctcaggtccctaagattacgctgatcataggggggtcctatggagccggcaactacgggatgtgtggccgtgcttacagccctcgcttcctgtatatttggcccaacgctcgaatctctgttatgggaggtgaacaggcagccaacgtattggctaccataactaaagatcagagggcacgagagggcaaacagtttagttcagcagacgaggccgccttgaaggaaccaatcattaagaagtttgaggaagaggggaatccctactactctagcgctcgcgtgtgggatgatggaattattgatcctgcagatacacgcttggttctcgggcttagcttttctgctgcactgaacgcacctatcgagaagacagactttggcatcttccggatgtag

SEQ ID NO: 194979 - DNA, 870 bp, synthetic construct
  misc_feature 1..870: note = Description of Artificial Sequence: Synthetic coding sequence
  source 1..870: mol_type = other DNA
atggccaagcacatccagaaggagatccagcggggcgtggagagctgggttagcttaggcaacagacgacctcacctttcgataatcctggtcggagataacccagcaagccacacttacgtgaggaataaaatcagggctgcgtccgctgtaggaatttgctccgaactaatactcaaacccaaagacgtctcacaggaagagctgctagatgtgacagaccaactgaatatggaccccagagtgagtgggatattggtccagttaccacttcccgatcatgtcgacgaaaggaccatctgcaacggcatcgcacccgagaaggatgtcgatggttttcatattattaatataggccgattgtgcttggatcaacacagccttatccctgccaccgcctcggctgtgtgggagataataaagagaacggggatccagacttttgggaaaaacgtagttgttgcagggcgttcaaaaaatgttggcatgcccatcgcaatgttactgcacacagacggcgagcacgagcggcccgggggtgacgctacagttaccatagctcatcgctacaccccaaaggagcagctgaaaattcatacccagttagctgatatcatcatcgtagctgcaggcattcccaaactcatcacgagcgacatggtgaaagagggagcagccgttattgacgtgggcatcaactatgtccacgatcccgtcactggtaaaaccaagctggtcggggacgtagactttgaagccgtgaagaaaaaggccggctttatcacacctgtgcccgggggggttggccccatgaccgtcgctatgctcctgaagaatactttgctggcagccaagaaaatcatctactag

SEQ ID NO: 194980 - DNA, 672 bp, synthetic construct
  misc_feature 1..672: note = Description of Artificial Sequence: Synthetic coding sequence
  source 1..672: mol_type = other DNA
atggccaagcacatccagaaggagatccagcggggcgtggagagctgggtgagtctcggcaataggaggccacatttgagtataatccttgtgggggacaacccagcgagccatacttatgtgcgaaataagatacgggccgcctccgcagtcggcatttgttccgagctgattttaaagcccaaggatgtgtctcaagaagagttgctagacgtgacggatcagctcaatatggaccccagagtcagcggcattctggttcaattgcccctccccgaccatgtggatgagcgtactatctgcaatggaatcgctcccgaaaaagacgtggatggatttcatataatcaacatagggaggttgtgtctggaccaacatagcctgatccccgccacagcaagtgcagtttgggagatcattaagcgcacagggatccagacattcggaaagaatgtggtggtagctggccggtccaagaatgtggggatgccgatcgcaatgctgctgcacaccgatggggaacacgagcgcccgggaggagacgccactgtgactatagcgcaccgctacactcccaaagaacagctcaagattcacactcagcttgctgatatcataattgtggctgccgaaagatttcaccatttcgcccaagatctgagcaactcctag

SEQ ID NO: 194981 - DNA, 762 bp, synthetic construct
  misc_feature 1..762: note = Description of Artificial Sequence: Synthetic coding sequence
  source 1..762: mol_type = other DNA
atggccaagcacatccagaaggagatccagcggggcgtggagagctgggtgtccttaggcaacagacgaccccatctatccatcattctcgtgggggacaatcccgcaagccacacctacgttcgcaataaaattcgagccgcctccgccgtggggatttgtagcgaactcatcctcaaacctaaggacgtgtctcaggaggagctcttagacgtgacagatcagctcaatatggacccccgggtgagcggcatcctggtccaactaccgctgccagatcacgtggacgagagaacaatatgcaatggcatagccccagaaaaggacgtggacggatttcacatcattaacattggccgattgtgcctggatcagcacagtctgataccagctactgctagtgctgtgtgggagatcattaagcgtacaggcattcagacgttcgggaagaatgtcgttgtagctgggcgtagcaagaacgtaggtatgcctatcgccatgcttcttcacacagatggagagcacgaacgccctggcggcgacgccacagtaaccattgcgcacaggtatacaccaaaagagcagcttaagattcatacccagttagctgacatcatcatagtggctgcaggaattccaaagctcattaccagtgacatggtgaaagaaggcgcggcggttatcgatgtgggaattaattatgttcacgacccggtcacaggaaagactaaattggtgggtgatgtggatttcgaggcatag

SEQ ID NO: 194982 - DNA, 1044 bp, synthetic construct
  misc_feature 1..1044: note = Description of Artificial Sequence: Synthetic coding sequence
  source 1..1044: mol_type = other DNA
atgaccgtgcccgtgcggggcttcagcctgctgcggggccggctggggagggctcctgcgcttggcaggagcacggccccaagcgtgagggcgcccggcgaacccggaagcgccttcagaggttttaggtccagcggtgtgcgacatgaggccatcattatcagcggtaccgagatggcgaaacacattcaaaaggagatccagcgaggtgtggaatcatgggttagcctgggtaaccggagaccgcacctgtcgatcatactggtgggggacaaccctgcaagccatacatatgtgagaaataagatccgggccgcctctgcagtcggtatatgttctgaactaatcctgaaacccaaagacgtcagtcaggaagaactcctggacgtgacagatcagttgaacatggatccccgagtgtcagggatccttgtgcaactgccactccctgatcatgtcgacgaaagaactatctgcaacggcattgcaccagaaaaagacgttgatggctttcacattataaacattggccgcttgtgcttggaccagcatagcttaattcccgccaccgcatcggctgtgtgggagatcattaaacggactggaatccagaccttcggcaaaaacgtcgttgttgcagggcgtagcaaaaacgttgggatgcctatcgccatgctcctgcacaccgacggcgaacacgagagacctggcggcgacgccaccgtaactatcgcccaccgttacactcccaaagaacaactgaagatccatacccagctcgccgacattatcattgttgcggccggcattccaaagctgattacgagtgacatggttaaggagggcgccgcagttatagatgtcggaattaattacgtgcacgacccagtgacggggaaaactaaactcgtcggcgatgttgacttcgaggccgtgaagaagaaggcagggtttatcaccccagtgcccggcggggtagggccaatgaccgtggctatgctgctgaaaaatacactgcttgccgcaaaaaagatcatctactag

SEQ ID NO: 194983 - DNA, 441 bp, synthetic construct
  misc_feature 1..441: note = Description of Artificial Sequence: Synthetic coding sequence
  source 1..441: mol_type = other DNA
atggacccccgggtgagcggcatcctggtgcagctgcccctgcccgatcacgtcgatgaacggaccatctgtaacggaatcgcaccggagaaggatgtggacgggttccacattataaatattggccgactctgtctggaccagcacagcctaatcccagcaaccgcttcagcagtttgggagattattaaaagaaccggaatccagacatttggaaagaacgtggtggtggctggccgcagcaaaaatgttggtatgccaatcgctatgttgctccatacggatggcgagcatgagcgccccgggggtgatgcaactgttacaatagcacatcgctacacccctaaggaacaactaaaaatccatactcaactcgctgacatcattattgtagccgcggagcgctttcaccattttgctcaggacttgtccaatagctag

SEQ ID NO: 194984 - DNA, 1257 bp, synthetic construct
  misc_feature 1..1257: note = Description of Artificial Sequence: Synthetic coding sequence
  source 1..1257: mol_type = other DNA
atgcccatgctgctgccccacccccaccagcacttcctgaagggcttgctgcgggcaccattcaggtgttaccattttatcttccactctagcacgcacctcgggtcagggatcccttgtgcccagccctttaatagcctgggcctccattgtactaagtggatgctgctctccgacgggctgaaaaggaaactgtgcgtgcagaccaccctgaaagatcacaccgaggggttgagcgacaaggagcaaagattcgtggacaagctgtatactggtctgatccagggacagagggcttgtctcgcagaggcgatcaccctcgtagagtctactcacagtaggaagaaggaactcgcgcaagtccttttacagaaggtgctactttatcacagggaacaagagcaatcaaataaaggcaaacccctggcttttagagtaggactgagcgggccgcctggtgcgggaaagtctacatttattgaatacttcgggaaaatgctcacagagaggggtcataagctgtccgtactggcagttgaccccagctcgtgcacgtctggtgggtctcttctcggcgataaaacccggatgactgagctaagccgggatatgaatgcctacatcagaccctcacctactcggggcacactcggcggggtgacccggacaacaaacgaagccatcctactgtgtgaaggagctggatacgatataatccttatcgagacagtaggagttggacaatcagagtttgcggtggcagacatggtggatatgttcgtgctgctgctacctccggccggcggcgacgagcttcaggggataaagcgtggtattatagagatggctgacttagtcgccgtcacaaagtcagatggggatctgattgtcccagcccggaggattcaagccgaatacgtgtcagccttgaagctcttaagaaaaaggtcccaggtgtggaagccaaaggtgatcagaatcagcgcacggtccggggaggggatctccgagatgtgggataaaatgaaagacttccaggacctgatgttggcatccggagaactgaccgcaaagcgacgaaagcagcagaaggtctggatgtggaacctgatccaagagtcagtgctggagcatttcagaacacatcccactgtcagggaacagattcccctcctggagcagaaggtgctaatcggcgctctgagcccgggactggctgccgatttccttctgaaggcatttaaaagccgcgactag

SEQ ID NO: 194985 - DNA, 1275 bp, synthetic construct
  misc_feature 1..1275: note = Description of Artificial Sequence: Synthetic coding sequence
  source 1..1275: mol_type = other DNA
atgcccatgctgctgccccacccccaccagcacttcctgaagggcctcctccgggctccctttcggtgttaccatttcattttccatagttccactcatctgggctcagggatcccctgcgcacagccctttaattctttgggactgcattgcacgaagtggatgctgctaagcgacggactgaagcgcaaattatgcgttcagacaactttgaaggaccataccgagggcctgagcgacaaggagcagcgctttgtcgataagctgtacaccgggcttatccaaggacagcgggcttgcttggccgaggcaataactcttgttgagagcacccattcccggaaaaaggaactggcccaagtgctgctccaaaaggtcctcctttatcaccgggaacaggagcaaagcaacaaagggaagccactggccttccgtgtgggtctcagcggcccaccgggggcagggaagagcacatttattgagtactttggcaagatgctcaccgagcgcggccacaaattgtcagtgttggctgtcgatccgtcttcgtgcacttctggcggctcgctgttgggcgacaagacaagaatgacagaactaagccgtgacatgaatgcctatataagaccctcccctactagaggaaccctcggtggcgttactagaaccacaaacgaagcgatactgctgtgtgaaggtgccgggtatgacatcatcctgatcgagacagtgggtgtgggacagtcggagttcgcagttgccgacatggtagacatgttcgtgctcttgctgcccccggccggcggcgatgagctgcagggaattaagcgggggataatagaaatggccgatctggtggccgtgactaaaagtgatggagatctgatcgtcccagctcggagaatccaagctgaatacgtgtctgccctcaagctcctgagaaagaggtcacaggtgtggaaaccgaaggttatcaggatttcagctcgcagtggagaggggatctcagagatgtgggataaaatgaaggatttccaggacttgatgttggctagcggagagttaaccgcaaaacgaaggaaacagcagaaagtttggatgtggaatctgattcaggaatctgtgctcgaacatttccgcacgcaccctactgttcgggaacagatccccctgctcgaacaaaaagtactaataggcgcattatctcctggtttggccgccgactttttgctgaaagccctgaaagccgagaccaataagattcaccccgtatag

SEQ ID NO: 194986 - DNA, 414 bp, synthetic construct
  misc_feature 1..414: note = Description of Artificial Sequence: Synthetic coding sequence
  source 1..414: mol_type = other DNA
atggccgacctggtggccgtgaccaagagcgacggcgacctgatcgtgcccgcccgccgtattcaggccgaatacgtttccgcactcaagttgctgcgcaaacgaagccaggtgtggaaacccaaggtgattagaatcagcgcccgctccggagagggcatctctgagatgtgggataaaatgaaggactttcaggatctgatgctcgccagcggggagctcaccgcaaagcgacgaaaacagcaaaaggtctggatgtggaacctgatccaggaatctgtgctcgaacactttcggacccacccaacagtgcgagagcaaattcctctgttggaacagaaggtgttgatcggagccctctctcccgggctcgccgcagacttcctgctgaaggctttcaaatccagggattag

SEQ ID NO: 194987 - DNA, 480 bp, synthetic construct
  misc_feature 1..480: note = Description of Artificial Sequence: Synthetic coding sequence
  source 1..480: mol_type = other DNA
atggccggcctgacccggttcgccctggagctggtgaccgagaagggtcatacctttgccgaggaacttcagaaaatccaatgcacactccaggatgttgggagcgctcttgcgacgccctgttcttccgcccgcgaagcccaccttaagtacaccactttcaaggccggcccaattcttgagttagaacagtggatcgacaagtatactagccagctccccccgctgactgcatttatccttccttcagggggaaaaatttctagtgcgcttcacttctgccgggcagtttgtaggcgcgcagagaggcgcgttgtaccactcgtacagatgggcgaaacagacgcaaacgtggccaaattcctgaacaggctttccgattacctgtttacgctcgccagatacgcagcaatgaaagagggtaatcaagagaaaatctatatgaagaatgaccccagcgctgaaagcgagggactttag

SEQ ID NO: 194988 - DNA, 753 bp, synthetic construct
  misc_feature 1..753: note = Description of Artificial Sequence: Synthetic coding sequence
  source 1..753: mol_type = other DNA
atggccgtgtgcggcctgggcagccggctgggcctgggcagccggcttggcctgcggggttgtttcggcgccgcccggctcctgtaccctcgattccagagtagagggccacagggagtagaagacggcgacagaccacagccaagctctaaaaccccccgcatcccgaagatctacacaaaaactggcgacaaaggctttagtagtaccttcactggagagaggcgcccgaaggatgatcaggtctttgaagcagttgggacaacagacgagttgagctctgcgattggcttcgccttggaactggtgactgaaaaaggtcatacgtttgccgaggagttgcaaaagatccagtgtactttgcaggacgttggtagtgcacttgccactccttgctcttcggcccgggaggcgcacctgaagtatacaacattcaaggctggaccaattcttgagcttgagcagtggatcgataaatacacatcacagctcccacctttaaccgcttttatactcccctcaggcggtaagatcagctctgcattgcacttctgcagagccgtttgtaggagagcagaacggcgcgtggtgcccctggtgcaaatgggtgaaactgatgccaatgtggcaaaatttctgaaccggctgagtgattacctctttactctggcccggtatgctgcaatgaaagaagggaatcaggagaagatctatatgaagaacgatccttccgctgagagcgaaggtctgtag

SEQ ID NO: 194989 - DNA, 849 bp, synthetic construct
  misc_feature 1..849: note = Description of Artificial Sequence: Synthetic coding sequence
  source 1..849: mol_type = other DNA
atggagcccaaggtggccgagctgaagcagaagatcgaggacaccttgtgccctttcgggttcgaggtgtaccctttccaggtcgcctggtacaatgagctgctgcccccagcgttccacctgccattgccagggcccacgctggccttcctcgtgctcagtacgccagccatgtttgatagggctctgaagcccttcttgcagtcttgtcacctccggatgctgacagaccctgtagaccagtgtgtggcctaccatcttgggagggtgcgcgagtctctccccgagctccagattgagattattgcggattacgaagtgcaccccaaccggcggcccaaaatactcgctcagaccgccgcccacgtagcgggcgccgcctattactaccagagacaggacgtggaggctgacccttggggaaatcaacggatatctggcgtgtgcatacaccccaggtttggtgggtggtttgccattcggggtgtggtgctgctgccgggtatcgaggtcccagatttgcctccgcgcaaaccacatgactgtgtcccaacgcgcgccgatcgaatcgccttgctggaagggtttaatttccattggcgagattggacctaccgtgatgctgtgacacctcaagagaggtactctgaggagcagaaggcatactttagcacaccaccagcccaacgattggcgctgctggggctcgcccaaccatccgagaaaccatcctccccttcgccggaccttccattcaccaccccagctcctaaaaaaccgggcaacccgagcagggcccggagctggctcagtccacgcgtctcccccccagcaagccctggcccttag

SEQ ID NO: 194990 - DNA, 891 bp, synthetic construct
  misc_feature 1..891: note = Description of Artificial Sequence: Synthetic coding sequence
  source 1..891: mol_type = other DNA
atggccaacgtgctgtgcaaccgggcccggctggtgagctacctgcccggcttttgttccctcgtgaagcgggtggtgaacccgaaagccttttcgactgcgggaagttcaggctccgacgaatcacacgtggccgctgcaccaccagatatttgctccagaaccgtttggcccgacgaaacaatgggtccgtttgggccgcaggaccagcgcttccaactcccaggcaacatcggattcgactgccacctgaatggaacggctagtcagaaaaagagtctcgtccacaaaactctccctgatgtgttagccgagcctctgtcctcggagcggcacgaatttgtaatggcccaatacgtcaacgagtttcagggcaacgacgcccccgtggagcaagagatcaactcagccgagacctattttgagagtgctcgcgtagaatgcgccatccagacatgcccggagctcctgcgcaaggacttcgaatccttattccctgaggtggcaaacggtaaactcatgatcctgacagtcacccagaaaacgaaaaacgatatgaccgtatggtctgaggaggtggaaattgagcgtgaggtgctgctcgagaagtttattaacggcgccaaagagatttgctacgctctgcgagccgagggatactgggctgactttattgacccttcaagcggactcgcctttttcggcccctatactaacaataccctctttgagactgatgaaaggtatcgccacctgggctttagtgtggatgatctcggctgctgcaaagtgatcaggcactcgctatggggcacacacgtggtggtgggctccatcttcacaaatgccactcccgacagccacatcatgaagaagctgagcggaaattag

SEQ ID NO: 194991 - DNA, 891 bp, synthetic construct
  misc_feature 1..891: note = Description of Artificial Sequence: Synthetic coding sequence
  source 1..891: mol_type = other DNA
atggccaacgtgctgtgcaaccgggcccggctggtgagctacctgccaggtttttgctccctagttaagcgggttgtgaatcccaaggcattcagtaccgcgggatcatccggctcagacgagtcccacgtcgctgctgcccctcctgacatctgctcacgcaccgtgtggccagatgagaccatgggaccattcggaccgcaggaccagaggttccaactgcctggcaatataggtttcgattgccacctaaacgggactgctagccagaagaagagtctggtgcacaagactctgccggacgttctagcagaacccctctcttctgagcggcacgaatttgtgatggcccagtatgtgaacgaattccagggcaacgacgctccagttgagcaggagataaatagcgcagagacatacttcgagtccgcacgggtcgagtgcgccattcagacctgtcctgaactgcttcgaaaggatttcgagtctctgttccctgaagtggcgaatggaaaactgatgatcttaacagtaactcagaagaccaagaatgacatgaccgtttggtccgaggaggttgaaatcgaacgggaggtgttgctggagaagtttatcaatggtgctaaagagatttgttatgccctgagggcagagggatattgggcggacttcattgacccatcctcaggcctcgcattcttcgggccgtacacaaataatacactgtttgaaacagatgagcgatataggcatctgggcttcagcgtggacgacctgggctgttgtaaggtgatccgccactcactgtggggtacacatgttgtggtgggttctattttcacaaacgcgacacccgacagccacattatgaagaagttatcaggcaactag

SEQ ID NO: 194992 - DNA, 531 bp, synthetic construct
  misc_feature 1..531: note = Description of Artificial Sequence: Synthetic coding sequence
  source 1..531: mol_type = other DNA
atggcccgggtgctgaaggccgccgccgccaacgccgtgggcctgttctcaagattacaggcgccaatccctactgtgcgagcatcatctacctcccagcctctggaccaggtgactggctccgtttggaatctaggtcggctgaatcatgtcgcaatagctgttcccgatttagaaaaggccgccgcattttataaaaatatcctcggagcccaggttagcgaggccgtgcccctgcccgaacatggagtgtcagtagtgtttgttaacctggggaacaccaaaatggagttgctgcacccattaggccgcgactcccctattgccggtttcctccagaaaaataaagcgggtggcatgcatcacatctgcatcgaagtggacaacataaatgcagctgtgatggacttaaaaaagaaaaagattcgtagcctatcagaagaggttaaaataggagctcatggtaagcctgttattttcctgcatcctaaagactgtggaggagttttggtcgagctggagcaggcatag

SEQ ID NO: 194993 - DNA, 2070 bp, synthetic construct
  misc_feature 1..2070: note = Description of Artificial Sequence: Synthetic coding sequence
  source 1..2070: mol_type = other DNA
atgatcgagatggccgccgagaaggagcccttcctggtgcccgccccccctcctccattgaaggatgagagtggcggaggcgggggcccaactgtcccccctcaccaagaagctgctagcggggaacttcgcgggggcaccgagcggggccctggccgctgcgctcccagtgcggggagccccgcagctgctgtcggtagagaatcccccggggcagccgcgacttcctcctcaggcccacaggcacaacagcaccgtggtggcggtccccaggcccaatctcacggagaggcccgcctttccgatcctcctggaagggccgccccccccgatgttggtgaggagcggcgtggcggcggcgggactgaattaggccctcctgctcctccccgcccacgcaacggttaccagcctcatagacctcctgggggcgggggcggcaaacggaggaacagctgcaatgtcggagggggtggaggcgggttcaagcatcccgcatttaagcgccgtagaagggtgaactcggactgcgacagcgtccttccctctaacttcttattaggcgggaatatcttcgaccctcttaatttaaatagcctgttagacgaggaggtgtccaggaccctgaacgctgagactcctaagtcatctcctctgcctgccaaagggcgcgatccagtcgagattctgataccaaaagatatcaccgatccactcagtctgaatacctgtacagacgaggggcacgtggttttagcctccccattgaagacaggacgaaagcgccataggcaccgggggcagcaccaccagcaacagcaggcagctggcggatctgagtcccatccagtaccccccaccgcgcccctgacccctttgctgcacggtgagggcgctagccagcagccgaggcacaggggacaaaacagggacgcaccgcagccatatgaactcaacactgctattaactgcagagacgaagttgtttcaccactgcctagcgccctgcaaggcccaagcggcagtttatccgcccctcctgcagcaagcgttatcagtgcgcccccttctagtagctcacgacatcgtaaaaggcgccggacttctagtaaaagcgaagcaggtgctcgcggaggcggtcagggcagtaaagaaaaaggccggggcagctggggcgggagacaccaccaccaccatccgttgccagcagccggcttcaaaaagcagcagcgcaaatttcagtacgggaactactgcaagtactacgggtaccggaatccttcttgcgaggatggacgccttagggtgttgaagccagagtggtttagaggtcgggatgtcctcgacctgggctgcaatgtgggacacctgacactaagcatcgcttgtaaatggggcccttcacggatggtggggcttgatatcgacagccggctcattcattctgctcggcagaacattaggcactatctaagtgaagaactgcggctccccccccagacactggaaggagacccaggcgctgagggggaggaaggcaccacaactgtgcggaaaagatcatgtttccccgcctcattgacggccagtcgcggccctatcgcagccccacaggtgcccttggacggggctgatacatcagttttccctaataacgttgtgtttgttactggcaactacgtgctggatcgggatgatctagtcgaagcgcagactcccgaatatgacgtcgtgctgtgtctctcattaaccaaatgggtacatctcaactggggtgatgaaggcctcaaaagaatgttcaggagaatctatcgccatttacggcccggggggattctcgttctggaaccccaaccctggtcttcttacggcaagcggaagacgcttacagagaccatctataaaaattattatcgaatacagctaaaacctgaacagtttagtagctatctgaccagtcccgacgtggggtttagctcgtatgagctcgtggccacaccacataatacctcaaagggtttccaacggccagtttatctgtttcacaaggctcgttctcccagtcactag

SEQ ID NO: 194994 - DNA, 663 bp, synthetic construct
  misc_feature 1..663: note = Description of Artificial Sequence: Synthetic coding sequence
  source 1..663: mol_type = other DNA
atggtgggcctggacatcgacagccggctgatccacagcgcccggcagaacataaggcattatttaagcgaagaactaagactgccgcctcagactctggagggagaccctggagctgaaggagaggaaggcaccaccaccgtgaggaagcggtcttgtttccctgcatcgctgaccgctagcaggggcccaatagctgcgcctcaggtcccgctagatggcgctgatacctcagtgttccccaataatgtggtctttgtgacaggcaactacgttttggatcgcgatgacttagtggaagcccagacaccagaatacgatgtggttctgtgcctgtcactaactaaatgggtccacttaaattggggggacgagggcctgaaacgcatgttccgccggatctaccggcacctgaggccaggcggcatcttggtcttggaaccacaaccctggagctcctacggaaagcggaagactttgactgagacaatttataagaactactataggatccagttaaagccagagcaattctctagctacctgacctcccccgatgttggcttctccagctacgagctggtggcaactccccataatacatcgaaaggtttccagagacccgtttacctgtttcacaaggcgcggtctccgtctcactag

SEQ ID NO: 194995 - DNA, 852 bp, synthetic construct
  misc_feature 1..852: note = Description of Artificial Sequence: Synthetic coding sequence
  source 1..852: mol_type = other DNA
atggccagcggcaccaccaccaccgccgtgaagatcggcatcatcggcggcacaggcctagatgatcctgagattttggaggggagaaccgagaaatatgtggatactccatttggaaagccttccgacgctctgatcctcggtaagattaaaaatgtggattgcgtgctacttgctcggcacggaaggcagcatacgatcatgcccagtaaggtgaattaccaagcaaatatctgggcattaaaggaggagggctgcactcatgtgattgtcaccactgcgtgtggcagcctgcgtgaggagatccaacctggtgacattgtcattatcgaccagtttatcgataggaccaccatgaggccccagagtttctatgacgggtcccactcgtgcgcacgcggcgtgtgtcatattccgatggccgaacccttttgcccgaaaacacgagaggtactgattgagacagcgaagaaactgggtctgcggtgccatagcaagggaactatggtgactatcgagggcccacggttcagttcaagggcggaaagctttatgttccgaacctggggcgctgatgtcattaatatgactaccgtgccagaggtcgtactagcaaaagaggcagggatttgttacgcatctatcgcaatggcgacggattacgattgctggaaagagcatgaagaggcagtgagcgttgaccgcgtactaaagaccctgaaggaaaacgcgaataaggccaagagtcttctgctgaccacaattccacagatagggagtacggagtggagtgagactctccacaacctcaaaaacatggctcaatttagcgtgctgttgccccgtcactag

SEQ ID NO: 194996 - DNA, 468 bp, synthetic construct
  misc_feature 1..468: note = Description of Artificial Sequence: Synthetic coding sequence
  source 1..468: mol_type = other DNA
atggccgccgagacccggaacgtggccggcgccgaggccccccccccccagaagagatactaccggcagcgggcacactccaatcctatggcagatcatacactgagataccctgtcaagcccgaagagatggattggtccgagctgtatcccgagtttttcgcaccattaactcagaatcagagccacgatgatccaaaggacaaaaaggagaagcgagcacaggcccaggtggaattcgcagacatcggctgtggatatggcgggctgcttgccgacaaggatgttctgcctctcccacgccccacatttcaggcagacaaggcccaggtagcaaatcatcagtcacacccagcctcacggatttgtctacgtgctaaatcctggggggccggcgtttatcacaaccgttgtgcaggagccaccagactggatgtacatagtttccgtagggcccccacagtctag

SEQ ID NO: 194997 - DNA, 831 bp, synthetic construct
  misc_feature 1..831: note = Description of Artificial Sequence: Synthetic coding sequence
  source 1..831: mol_type = other DNA
atggccgccgagacccggaacgtggccggcgccgaggccccccccccccagaagaggtactaccggcagagagcacattccaacccgatggctgaccacacactccgctaccctgtgaaaccggaagaaatggattggtccgagctgtaccctgagttttttgcccctctgacgcagaatcagagccatgatgaccctaaagacaagaaagagaaaagagcacaggcccaagtagaattcgctgatatcggttgcggatacggaggccttcttgtggagctttcacccttgttcccagatacattgatcctcggactagagataagagtgaaagtgagcgattatgtgcaggacagaatacgtgcactgcgtgcagctcccgcaggaggattccaaaacatcgcttgtctgaggtctaacgctatgaaacacctgcctaacttcttttacaagggacagctgacaaagatgttctttctatttcctgacccccacttcaagaggacaaagcataaatggcgcatcatctctccaacactgctggctgaatacgcttacgtcttaagggtgggcggccttgtttacacaatcaccgacgtgctggagcttcacgactggatgtgtactcatttcgaggaacaccctctgtttgagagggtccctctggaggatctgagtgaagatccggtcgttgggcacctggggacctctaccgaggagggaaagaaagtactgcggaatggcggcaaaaacttccctgcgattttccgccgtattcaggaccccgtgctccaagctgtaacgagccagaccagcctgcctgggcactag

SEQ ID NO: 194998 - DNA, 2274 bp, synthetic construct
  misc_feature 1..2274: note = Description of Artificial Sequence: Synthetic coding sequence
  source 1..2274: mol_type = other DNA
atggccgaggtgggccggaccggcatcagctaccccggcgccctgctgccccaaggcttctgggctgcagtggaggtgtggcttgagagaccccaggttgccaataaacgtctgtgcggggctcggcttgaggcacggtggtccgctgccctcccctgcgcggaagccagggggccaggcacatccgcaggctctgagcaaaaagagcgcggacctggccctggacaggggtctcctggcggaggtcccggcccaagaagtttgtccggacccgagcagggcacagcgtgctgcgaacttgaagaagcgcagggccagtgccagcaggaggaggcccagagggaagccgccagcgtgcctctgcgcgactctgggcaccctggccacgctgaagggcgagagggggacttccctgcagccgaccttgacagtctctgggaggattttagtcagtccttagctagaggaaactctgagctgttggccttcctcacaagtagtggggccggatcacaacctgaggcgcagagagaactcgacgtggttctgcgtacagtgattccaaaaactagcccccattgccctctcacaactccgcgacgcgaaattgtcgttcaggacgtactgaatgggaccataacttttctgccgttggaggaagacgatgagggtaatctaaaagtgaagatgtcaaatgtatatcagatacagctgtcgcattccaaggaggaatggttcatttccgtgctcatcttttgcccggagcgttggcatagcgatgggattgtctaccccaagcctacttggctaggcgaggagctgctggctaaactggccaagtggtcagttgaaaataagaagagcgattttaaatccacgctctcgctgatctcaataatgaaatactcaaaagcataccaggaactcaaggaaaagtacaaagagatggtaaaggtttggccagaagtcacggatcctgagaagtttgtgtacgaggatgtcgcaatcgcagcctacctgcttatcctgtgggaagaagagcgcgccgaacggaggctaacagcccgccagagctttgtggacttggggtgtggaaacggactcctggttcatatattgtcttcagaaggccaccctggaagggggatcgacgtgagacgccgcaaaatttgggacatgtatggtcctcagacccaactcgaggaagacgccatcactccaaacgataaaacactgttcccagacgttgattggttgatcggcaaccacagcgacgaactcacgccatggatacctgttattgcagcgaggtcctcatataactgtaggttcttcgttctcccttgctgcttcttcgacttcataggtcgctacagcagacgccagagtaagaaaacacaatatagggaatacctagactttattaaagaagtgggctttacctgtgggtttcacgttgacgaggattgtttgagaattccttccaccaagcgggtttgcctggtaggaaaatcaaggacgtatccgtcttcaagggaagccagtgtcgacgagaaacgcacacagtacatcaaatcacgcagggggtgtccagtgagcccacctgggtgggaattatctcctagccctaggtgggttgccgccggtagtgctggccactgtgatggccagcaagctctggatgctcgcgtcgggtgcgtgacacgagcctgggcggcggaacatggcgccggacctcaagctgagggaccgtggctcccgggatttcacccccgggagaaagccgaaagagtccgcaactgtgctgccttgcctagggatttcatcgatcaggtcgttctgcaagtggccaacttgttgttggggggtaagcagcttaatacccgaagttcccgcaatggctcactcaagacctggaatggcggtgagagcctgagcctagccgaggtcgctaatgaactggacacggagaccttaaggcggcttaaacgggaatgtggtggccttcagaccctcctccggaactctcaccaggttttccaggtcgtgaatggtcgggtgcacattagagattggcgggaggaaacgttgtggaagactaaacaacccgaagccaaacaaaggctgttatccgaggcctgtaagactaggttgtgctggttcttcatgcatcatcccgatggttgcgccttaagcacagattgttgtccctttgcccacggcccagcagagctgaggccaccacgcacaacgccacgcaagaaaataagctag

SEQ ID NO: 194999 - DNA, 1236 bp, synthetic construct
  misc_feature 1..1236: note = Description of Artificial Sequence: Synthetic coding sequence
  source 1..1236: mol_type = other DNA
atgtgcatcaagttcagcagcgtgatcgccaagaagaacgagcggtggcacagcgatgggattgtgtatccgaagcctacttggcttggtgaggagctgctagcaaagctggctaagtggtcagttgaaaataagaaatccgattttaagtctacattgagcctcatctccatcatgaagtatagtaaagcttaccaagaactgaaggagaaatataaggaaatggtcaaagtatggcctgaggtgaccgacccagaaaagtttgtttatgaggacgtggcaattgcagcatacctgttgatcctctgggaagaggagcgcgcggagcgcaggttgacagcccgccagagctttgtggatctgggctgtggtaatggcctgctcgtgcatatactcagttctgaaggacacccagggcgcggaattgatgtgaggcgacgcaagatctgggatatgtacggcccacagactcaactcgaagaagatgccataacaccaaacgacaaaacgctgtttcccgatgtggactggctgatcggtaaccactctgatgagctgaccccctggattcccgttattgctgccagaagctcctacaactgtagattttttgtgttaccttgctgcttctttgacttcatcggtaggtactcccgaaggcagagcaagaaaactcaatacagagagtacctcgatttcatcaaagaggtcggctttacctgcgggtttcacgtcgatgaagattgtctgcgcatccctagtaccaaacgggtgtgtctggttggcaagtcgcgaacttatccctcctccagggaagcaagcgtcgacgagaaaaggacacagtacataaagtctcggaggggttgtccagtgtcaccccctggctgggagctgagcccctctccacggtgggtcgctgccgggtccgcaggacattgtgacggacagcaggcacttgatgcccgcgtaggttgtgtgaccagggcatgggcagccgagcacggggccgggcctcaggctgagggcccatggctccctggcttccatcccagggagaaggccgagcgcgtcaggaactgcgcagctttacctcgagacttcatcgaccaggtggtattgcaggtggcgaacctgctgctaggcggaaaacagctgaatactagatcctcaagaaatggttcactgaaaacttggaatgggggagggaagctttctaccatcttaggcagaggctag

SEQ ID NO: 195000 - DNA, 1743 bp, synthetic construct
  misc_feature 1..1743: note = Description of Artificial Sequence: Synthetic coding sequence
  source 1..1743: mol_type = other DNA
atgagcgacacctggagcagcatccaggcccacaagaagcagctggattcactacgcgagaggttgcagcggcgcaggaagcaggattctggacatctcgatctgcggaaccccgaggccgctctgtctccgacattcaggtctgacagccctgtgcctactgctccaacctctgggggacctaaaccaagcacagccagcgccgtgccagaactcgctactgacccagaactagagaagaagcttctgcatcatctttcggatctggcgctaacacttccaactgacgccgtgtccatctgtttggccatcagcactccagatgcacccgctacccaagacggcgtcgagtctctgttacaaaaattcgcagctcaggaactcatcgaagtgaaaaggggcctgcttcaagacgacgctcatcccactcttgtcacctatgccgatcattctaagctgtctgcaatgatgggagctgttgccgaaaaaaaaggacccggcgaagtggccggcactgtgacaggccaaaagaggcgagctgagcaggacagtaccacggtggctgcctttgcgtcgtctctcgtctccgggttaaattcatctgcctccgagcctgccaaggaacccgcgaaaaagtctcgcaaacacgcagccagcgacgtggacttagagatcgaatcactgctgaaccagcagagtactaaagagcaacagtccaagaaagtgagccaggagatcctggaactcctgaacaccacaaccgccaaggagcagtccatagttgaaaagtttagaagtagaggacgggcccaggttcaggaattttgtgactacggcactaaggaggaatgcatgaaagccagcgacgccgatagaccatgcagaaaactccattttcggcgaattattaacaaacacactgacgaaagccttggagattgctctttcttaaacacttgctttcatatggacacttgcaagtacgtccactacgaaattgatgcgtgcatggattcagaagcaccaggcagcaaagatcacactccaagccaagaactggcactgacccagagcgtcggaggggatagttcagccgacagattgtttcctccgcaatggatatgctgcgacatcagatatctggacgttagcatattgggcaagttcgccgtggtgatggcggacccaccgtgggatatccatatggaacttccttatggaaccctgacagacgacgagatgagacggctcaatatccccgtcctgcaggatgacggctttttgtttttgtgggtcactggtagagccatggagttaggaagagagtgcctgaatctgtggggatatgagagagtcgacgagataatttgggtcaagacgaaccaactgcagagaattatccgaactggtagaaccgggcattggctgaatcatggcaaggaacactgtctggtaggcgtcaagggtaatcctcagggattcaaccagggactggattgcgacgttattgtggccgaagttcgatctacctcccacaagccagacgaaatctatgggatgattgagcgcctctctccaggaacaaggaagatcgagctgttcgggcggcctcacaacgtacagcccaactggatcacccttggcaatcaattggacgggattcatttgctggatccggatgttgtcgcccgattcaaacaaaggtatccagacggcataatatccaaacctaagaacttgtag

SEQ ID NO: 195001 - DNA, 492 bp, synthetic construct
  misc_feature 1..492: note = Description of Artificial Sequence: Synthetic coding sequence
  source 1..492: mol_type = other DNA
atgagcgacacctggagcagcatccaggcccacaagaagcagctggactccctccgggagaggttgcagcgcagaagaaagcaggactctgggcacctcgacctgcggaatcccgaggcagcgctgagcccgacatttcgatcagatagccccgtgccaaccgcacccaccagcgggggacctaaaccttccaccgcatccgccgtgcctgagcttgccacagaccccgaactggagaaaaagcttctacaccacctgtcagatctcgcccttaccctgccgacagatgctgtctctatctgtctggcaatctccacgccagatgcccccgccacccaagacggggtggaaagtctgctacaaaaattcgccgcccaagaactaatcgaagtcaagcgcgggctgctccaggatgacgctcatcccaccctggttacttatgccgaccactctaagctgtcggccatgatgggcgctgttgccgagaaatag

SEQ ID NO: 195002 - DNA, 462 bp, synthetic construct
  misc_feature 1..462: note = Description of Artificial Sequence: Synthetic coding sequence
  source 1..462: mol_type = other DNA
atgagcgacacctggagcagcatccaggcccacaagaagcagctggacagcttaagggagcgccttcagaggcgacgcaagcaggactccgggcacttggatttgcgcaatccggaagctgcattatcacccacttttcgcagcgactcccctgttcccacagccccaaccagtggtgggccaaagcccagcacggcaagtgcagtgccagaactagccactgaccctgagctcgagaaaaaactgctccaccacttgagtgacctggctctcaccctccctactgacgctgtgtccatctgtcttgccataagcactcctgatgcaccagcgactcaggacggcgtggaaagtttgctgcagaagttcgccgctcaggagctgattgaacacagaaaccaacaaaggtctcagccacgcaaccagggcaacatgttaccccagatgcttatctggcgttag

SEQ ID NO: 195003 - DNA, 879 bp, synthetic construct
  misc_feature 1..879: note = Description of Artificial Sequence: Synthetic coding sequence
  source 1..879: mol_type = other DNA
atgctgggcgcctgggccgtggagggcaccgccgtggccctgctgaggttgcttctcctgttgttgccccctgcaattcgcgggcccggcctgggcgtggccggcgtggctggagcagccggcgccgggctgcctgagtctgttatttgggccgttaacgcggggggagaagcccacgttgatgtgcacggcattcattttcggaaggatcctctcgaaggaagagtgggaagggcaagcgactacggtatgaaactgccgatcctgcgctctaatcctgaagatcagattctgtaccagacggaacggtacaacgaggagacattcggctacgaggtacccattaaggaggagggtgactacgttttagtacttaaatttgcggaggtctatttcgcccagagccaacaaaaagtcttcgacgttagattaaacgggcatgtagtggtgaaggatctggacatattcgatagagtggggcattctactgcacacgatgagattattcctatgagtataaggaaagggaaactgtcagttcagggagaggtctctactttcacaggtaagctctatattgagttcgtaaaagggtactacgataatcccaaggtgtgtgccctctatatcatggccggcactgtagacgacgttcccaagttgcagccgcacccaggactggagaagaaggaagaagaggaagaggaggaagaatacgacgagggcagtaatttgaaaaagcaaaccaacaagaatcgcgtgcagtccggacccaggacccccaacccctacgcatcggataactcttccttaatgttccccattctcgtggcatttggcgtcttcatacccacactgttctgcctatgtagactctag

SEQ ID NO: 195004 - DNA, 1035 bp, synthetic construct
  misc_feature 1..1035: note = Description of Artificial Sequence: Synthetic coding sequence
  source 1..1035: mol_type = other DNA
atgctgagcgaggtgctgctggtgagcgcccccggcaaggtgatcctccatggggagcacgccgtagttcatgggaaagtagccctggctgtctccctgaacctccgtacctttttaaggctccagccacactccaacggaaaggtagacttgagccttccaaatattggtattaagcgggcctgggatgtggctcggttgcagtcactggacacttcttttctcgagcagggtgatgtgacgacccccacttcagagcaagtcgaaaagctgaaagaggtggccggtctgccggacgattgtgccgtgactgagaggctcgcagttctcgccttcctgtacctatacttgagtatctgccggaagcagcgctggacgaaagaggatctggagcttataaataaatgggctttccaaggggaacgtatgattcatggtaatcctagtggcgtggataatgccgtgagcacttggggtggggctctcagatatcaccaaggaaaaattagttcattgaagagaagccctgcactccagattttgctgactaacacaaaagtgcccagaaacacaagggcccttgtggctggtgtccggaaccgcttactgaaattcccagagattgtggcaccactgctgaccagcattgacgctatctcgctggagtgcgagcgggtgctaggagagatgggtgaagccccagcgcccgagcagtatttagttctggaggaactgatcgatatgaatcagcaccatctgaacgcactgggtgtgggacatgcttctctcgatcagttatgtcaagtaaccagagccagaggtctgcattccaagttgacgggtgccggtggcggcgggtgcggaatcactttacttaaacccggacttgagcagccagaagtggaagcaaccaagcaagcactgacctcatgtgggttcgactgcctggagacgagcatcggcgcgccaggagtctcaatccactcagccaccagcttggacagccgggtccagcaggccttggatggtctgtag

SEQ ID NO: 195005 - DNA, 516 bp, synthetic construct
  misc_feature 1..516: note = Description of Artificial Sequence: Synthetic coding sequence
  source 1..516: mol_type = other DNA
atgctgagcgaggtgctgctggtgagcgcccccggcaaggtgatcttgcatggagagcacgctgtcgttcatggcaaagtggcgttggccgtgagcctgaacctgagaactttcttgcggttgcagccccatagcaacggaaaagtggatttgagcctcccaaatattgggataaagcgcgcttgggatgtcgcccggctccagtctctagacacttcattcctggaacagggtgatgtaacaacacctacgtctgagcaagtagaaaagttaaaggaggtagctggactgccagacgattgcgcagtaacagagcgactggctgtgcttgctttcctgtacctctatctatctatctgcagaaagcagagggccctacccagcctggacatcgttgtgtggtccgaactgcctcctggggctgggctgggatctagtgccgcttactctgtgtgcctagccgccgccctgctgacagtttgtgaggaaattcccaatcctttgaaggacggttag

SEQ ID NO: 195006 - DNA, 1035 bp, synthetic construct
  misc_feature 1..1035: note = Description of Artificial Sequence: Synthetic coding sequence
  source 1..1035: mol_type = other DNA
atgctgagcgaggtgctgctggtgagcgcccccggcaaggtgatcctgcatggagagcacgctgtggtgcacggcaaggtagccctagccgtaagcctcaaccttcgcactttcctgcgtctgcagccccattccaatggaaaggtggacctgtctctgccgaacataggaataaaaagagcctgggatgttgctaggctacagagtctcgacacatcatttctcgagcaaggtgatgttaccacacccacatcggagcaggtggagaagcttaaagaagtagccgggcttccagacgactgtgctgtgacggagcgcttagctgttctggccttcctgtacctctatttatcaatctgcaggaagcagcgctggacaaaagaagatctggaactcatcaacaagtgggcctttcagggagagcgcatgattcacgggaacccatcaggtgttgataatgccgtgagcacctggggcggagctctgaggtaccatcagggtaaaatctccagtctgaaacgcagtcccgccctccagatcctcctgaccaacactaaagtgccacgaaacactcgggctctcgttgcgggcgtacggaatcgactgttgaagttcccggaaattgtggctcctctcttgacctcaattgacgcaatttcgctagagtgcgaacgggtgctcggagagatgggtgaggcccccgcgcctgaacagtaccttgttctggaggagctgatagatatgaatcaacaccatctcaatgccttaggcgtcgggcacgcctcactggaccagctctgccaggtgaccagggctaggggactccactccaaactcactggcgccggcggcggtggatgtgggattacactccttaagccaggtctggagcagcccgaagtcgaggccactaagcaggcactaacatcctgcggctttgattgcctcgagacttcaattggggctcctggcgttagtattcactccgctacatccctcgacagcagagtgcagcaggctcttgatggtttatag

SEQ ID NO: 195007 - DNA, 609 bp, synthetic construct
  misc_feature 1..609: note = Description of Artificial Sequence: Synthetic coding sequence
  source 1..609: mol_type = other DNA
atgatccacggcaaccccagcggcgtggacaacgccgtgagcacctgggggggggctctcaggtaccatcaaggcaagataagctctcttaagcgaagccctgcgctgcagatcttgctgacaaacactaaagtgcccaggaacactcgtgccctggtggcgggtgtcagaaatagacttttgaagttccctgaaattgtggctcctcttctgacaagtatcgacgccatatccctggaatgcgagcgagtccttggggaaatgggagaggcacctgcccctgaacagtacctagtgctcgaggagttgatagacatgaaccagcatcacctgaatgcgctcggggtaggtcatgcatcgttggaccagctgtgccaggtcacaagagcccgaggcctacactccaagctgaccggagccggtggcggaggctgcggcataacccttcttaagcctggcctggagcagcccgaggtcgaagcgacgaaacaggccctgacctcttgcggcttcgattgtctggagacatccattggagctccaggggtgagcatccattccgccaccagcctggacagccgcgtgcagcaggcacttgatggactttag

SEQ ID NO: 195008 - DNA, 606 bp, synthetic construct
  misc_feature 1..606: note = Description of Artificial Sequence: Synthetic coding sequence
  source 1..606: mol_type = other DNA
atgctgagcgaggtgctgctggtgagcgcccccggcaaggtgatcctgcacggggagcatgcagtggtgcatgggaaggttgcccttgctgtctccctgaacctccggaccttcctccgcctccaaccgcacagcaacggcaaggtcgacttgtccctcccaaatattggtatcaagagagcatgggatgtggccagactgcagagtctggacacttcctttctagagcagggggacgtaaccacccccacatcggagcaggtcgagaaattgaaagaggttgccgggctgccagacgactgtgccgtcacggaacgactggctgtgctggcctttttgtatctctatctgagcatttgcaggaagcagcgggcactccctagcctagatatcgtggtctggtccgagcttcctcctggagccgggctaggctcaagcgccgcatatagtgtgtgcctggcagctgccctcctcacagtgtgtgaggagattccgaatcctctcaaggacggcgactgcgtaaacaggtggacaaaagaggatttggaactgattaacaagtgggcttttcagggggagcgtatgatccatggaaatccttcttag

SEQ ID NO: 195009 - DNA, 1563 bp, synthetic construct
  misc_feature 1..1563: note = Description of Artificial Sequence: Synthetic coding sequence
  source 1..1563: mol_type = other DNA
atgcccagcctggtggtgagcggcatcatggagcggaacggcggctttggtgagctgggttgtttcggcggctccgccaaggacagaggtctgctggaggacgaaagggctctacagctcgcacttgaccagttgtgtctcctaggcctgggcgaacctccagcacccacagccggtgaggacggtggaggaggaggagggggtgcacctgcccagccggccgcaccccctcagcccgcaccacccccaccaccagcggccccacccgcagcacctacagctgcgccagccgcccagacgcctcagcctcctaccgccccaaaaggggccagcgacgctaagctgtgtgccctgtataaggaagctgagctacgcctgaaaggctcctcgaataccaccgaatgcgtcccagtcccaactagcgagcacgtcgctgagatcgtgggccggcagggttgcaaaataaaggcactgcgtgctaaaaccaatacctacattaagacgcccgtccgcggagaagaacctgtgtttatggtgaccggcaggcgagaggatgtggctacggcgagacgggagattatctcagccgcagagcacttctctatgatccgggcttcccgcaacaagtcaggagctgctttcggcgtggctccggccttaccaggtcaagtgaccatccgggtaagagtcccttaccgcgtggtgggccttgtagttggccctaaaggtgctactatcaaacgtattcagcagcagacaaatacctatatcatcaccccaagccgggacagggatcccgtcttcgaaatcacaggggcccctggaaacgtcgaacgggcccgggaagagattgaaacccacatagccgtaagaaccgggaagattctcgaatacaacaacgaaaatgattttttggccggatctcctgacgctgccattgattccagatattcagacgcctggcgagtacaccagcctggatgtaaacctctcagcacctttcgccagaacagcctcgggtgcattggggagtgcggcgtggattctggatttgaggcccccagactgggggagcagggtggtgattttgggtacgggggctacctctttccaggctacggtgttggcaaacaggatgtgtattatggcgtggccgagactagccccccactctgggccgggcaggagaatgctacccccacctctgtgctgtttagttctgccagcagctcctcttcgagttccgccaaagcccgagctgggccgccgggggcccatagatcacctgctaccagtgcaggaccagaacttgctggcctcccacggcgaccacccggcgagccgttgcagggattcagtaaactcggtgggggaggcttgcgaagccctggcggcggtagagattgcatggtgtgctttgagtcagaggtgaccgcagccctggtaccctgcggacataatctgttctgtatggaatgtgccgtccggatttgcgagaggaccgaccccgagtgccccgtctgtcacattacagccacccaggccattaggattttctcctag

SEQ ID NO: 195010 - DNA, 1710 bp, synthetic construct
  misc_feature 1..1710: note = Description of Artificial Sequence: Synthetic coding sequence
  source 1..1710: mol_type = other DNA
atgcccagcagcctgttcgccgacctggagcggaacggcagcggcgggggtggaggagggtcctctggagggggtgaaacactggacgatcaacgagctctgcagttggccctggaccagttgtcactcctggggcttgattcggacgagggcgcaagtctgtatgactcggaacccaggaaaaaatctgtgaatatgactgaatgcgttcccgtgccatcttccgagcatgtggctgaaattgtcgggaggcagggatgcaaaatcaaagctctgcgggcaaaaacaaacacttacataaaaaccccagttcggggagaagagccagtgttcgtggtgaccgggcggaaggaggacgtggcaatggctcgcagagagattatctctgctgccgaacacttctccatgatacgcgcctcccggaataaaaacaccgcactgaatggggctgtcccaggccccccaaacctacctggccaaactacgatccaggtcagagttccctacagagtcgtgggacttgttgtcggccctaagggagctaccataaaaaggatccagcagcagacccacacctacatcgtcactcctagcagagacaaggagcctgttttcgaagtgaccggaatgcctgaaaacgtggatagggcaagagaagagatcgaggcccatattgctttgagaacagggggaatcattgaactcacagacgaaaacgatttccacgccaatgggactgacgtaggctttgatctacatcatgggagcgggggctctggcccgggcagcctctggtctaaacctacgccatccatcacccccactcctggacgtaagcccttttctagttataggaacgacagttcaagttctctcgggtccgccagcactgactcctatttcggtggaggcacgtcatccagtgccgcagccacgcagagacttgcggattactcacctcccagtccggcactttctttcgcccacaacggaaacaacaataataacgggaacggatatacgtatactgctggaggggaggccagcgttcctagcccagacggctgtccagaacttcagcccaccttcgacccagctccggccccccccccgggcgcacctttaatctgggcccagttcgaacgcagccctggcggtggcccggcagcacccgtgtctagttcctgttcgtcaagcgcatcgtccagcgcctccagcagtagcgtcgtcttccccggcggaggggcaagcgccccttccaacgccaatctgggcttgctcgtgcaccgccggctacatcccggaacatcctgtccccggctctccccaccactgcacatggctcccggggccggagagcaccacctcgcgcgaagagttaggagcgatcccgggggcggagggttggcctacgccgcctacgctaatggcttaggagctcaattgcctggattgcagccatctgacacctccggcagttccagctctagttcatcgagcagcagctctagttcatcaagctccggtctccgccggaagggctccagagactgctctgtgtgctttgaatctgaggtaatcgctgcattggttccttgcggtcacaatttattttgcatggagtgtgcaaataggatttgtgaaaaaagcgagcccgagtgcccagtctgccacaccgccgtgacccaggccattcggatcttttcctag

SEQ ID NO: 195011 - DNA, 1980 bp, synthetic construct
  misc_feature 1..1980: note = Description of Artificial Sequence: Synthetic coding sequence
  source 1..1980: mol_type = other DNA
atgcccagcggcagcagcgccgccctggccctggccgccgcccccgcccccttaccgcagcctccacccccccctcctcctccacctcctcccttacctccaccatctggcggaccagaattggagggcgatggcctcctgttacgcgagcgcctcgccgctctggggctggacgacccatcacccgctgagcccggcgcccctgccttacgggccccagccgctgctgcccagggccaagcaaggcgggccgcagaactgtcaccagaggagcgagctccgccagggcggccaggtgctcccgaagccgctgagctcgaactggaggaagacgaggaagaaggggaggaggccgagttggacggcgacctgctcgaagaagaagaacttgaagaggctgaggaggaagacaggagctctttgctcttgttgtctcccccggccgcgactgcttcacagacccagcaaatccctggaggcagtcttggctccgtgttacttcccgctgcccggttcgatgctagggaagccgctgccgctgccgccgccgccggggtgctgtacgggggagacgacgcccagggaatgatggccgccatgctgtcacatgcttacggcccgggaggctgcggcgcagcagccgctgctctgaacggtgagcaggccgccttgctgcggcggaagagtgtaaatacaacagaatgtgtcccagtaccctccagcgaacatgtggctgagatcgtcggcagacagggctgtaaaattaaagcactgcgtgcgaaaaccaatacttatatcaagaccccagtgcgcggggaggaacccatttttgtagtgaccgggagaaaagaggatgtcgcgatggctaaacgcgagatcttgagtgccgccgaacacttctcgatgatccgggcttctcggaataagaatggacccgccctgggcgggctgtcctgtagtccaaacctgcctggacaaacaacagtgcaggtccgggtgccttatagagtagtcggcctggtggtcggaccaaagggcgcgacaatcaagagaattcaacaacagacccatacttatattgtaacacccagtagggataaagaacccgtgttcgaagttaccggaatgcctgaaaatgtggatagggcacgagaggaaattgagatgcatatcgccatgcgcacaggtaattatatagagctcaatgaggagaatgactttcactacaacggcaccgacgtgagctttgaaggtgggactttgggatcggcctggctcagtagtaaccccgtgccaccttctagggctcggatgatttctaattataggaacgactcttcatcgtccctcgggagtggtagcacggattcatatttcggtagcaatagactcgcagacttctctccgaccagccctttctccacaggcaatttctggttcggagacacccttccttctgttggctcggaagatctggctgtcgacagcccagcattcgactcgctaccaaccagcgctcagactatatggacccctttcgagcccgtcaatcctttgtcaggtttcgggtcagacccgagcgggaatatgaagactcaacgccggggctcacaaccgtcaacacccaggctttctcctacctttccagaatccatcgagcatcccttggctcggagagtacgcagtgaccctccatccactggaaaccatgtcgggttgccgatctacattccggctttctctaacggcactaattcctacagcagctctaacggcggctcgacatcatcttctccacctgagtccagacggaaacacgattgcgtgatatgttttgaaaacgaggtgatagccgcacttgtgccctgtggccataacttattttgcatggaatgtgctaataagatttgcgaaaagaggaccccaagctgcccagtgtgtcagacggccgtcacccaggcgatccaaattcacagctag

SEQ ID NO: 195012 - DNA, 498 bp, synthetic construct
  misc_feature 1..498: note = Description of Artificial Sequence: Synthetic coding sequence
  source 1..498: mol_type = other DNA
tggcggtggaccagctgccggcggagcggctggggcgccctggccaccaggacgaggaggggccggccaggcacaccccctcccccaagaccctctccgcccgacgtatttgcaggttttgccccacacccagctgctctgggacctcctactttactggcagatcagatgtcggtgatagggtccaggaaaaagagtgtgaacatgacagaatgcgtcccagtaccctccagcgagcatgtggcagaaattgttggcaggcaggggtgtaagattaaggctcttagggccaaaacaaatacatacattaaaacgccggtgcggggggaggaacctgtctttatagttactgggaggaaggaggatgtcgagatggcaaaacgtgaaatcttaagtgctgctgagcacttcagtatcattcgtgctaccagatctaaagctggtggccttccaggggcagctcagggacctcccaatctgccaggccagacaacatag

SEQ ID NO: 195013 - DNA, 2001 bp, synthetic construct
  misc_feature 1..2001: note = Description of Artificial Sequence: Synthetic coding sequence
  source 1..2001: mol_type = other DNA
atgcccagcagcctgggccagcccgacggcggcggcggcggcggcggcgggggtggaggagtaggggccgctggggaagatccagggcctggccccgctcccccgcctgagggcgcccaagaagctgctccagcgcctcgccccccacctgaacccgacgacgccgctgctgcactgagattagctctagaccagttgtccgctctgggcctgggcggagcaggggacacagacgaggaaggtgccgccggggatggcgccgcagcagctggcggcgcagatggcggagctgcccccgaaccagttccccccgatgggcctgaagcgggtgcccctcctactctggcccccgctgttgccccagggtctctgcccctgctggacccaaatgcgagtcctccccctcccccccctcccagaccctctcctccagatgtgtttgccggattcgccccccaccctgcggccctgggacccccaactctactggccgaccaaatgagcgtaattggctcacgaaaaaagtccgtgaacatgaccgaatgcgtgccggttccctcatcagagcatgttgccgagatcgtaggacggcagggctgtaaaattaaagccctgagggcaaaaacgaacacctatatcaaaacaccggtcagaggtgaagagcctgtcttcatcgtgaccggtcggaaagaagacgtggaaatggctaagagggaaatcctgagtgccgcggagcatttcagcattattagggctacccggtcaaaggcaggtgggttaccaggagcagcccaggggcccccaaatttgccaggccagacaaccatccaggtgcgggttccatatcgggtagtgggtctagtggtggggcctaaaggggctacaataaaacgtattcagcaacgtacccacacatacatcgtaacacctggcagagacaaagagccggtgtttgctgttacaggcatgccggagaatgttgacagggctagggaagagattgaggcccacataactctacggacaggcgccttcacagatgccgggcctgatagcgacttccatgctaacggaactgacgtgtgccttgatctgttaggtgcagccgcatccctctgggcaaagacaccgaaccagggccgccgaccgcccacggcaacagcaggactgagaggcgacactgccctgggtgccccttccgcccccgaagcgttctatgcaggtagccggggcggccccagcgtgcccgatcccgggcccgcatctccctacagtggatctgggaatggcggattcgcttttggcgctgaaggtcccggggcacccgtaggaacagctgccccagatgattgcgattttggattcgactttgacttcttagccctggatctcactgtgcctgctgctgctacaatttgggcacctttcgaaagggcagcacccctgccagccttttccgggtgctcgaccgtgaatggagcaccaggtcccccggctgctggagcccggagaagcagcggcgcaggtactcctcgccattcaccgacactgcctgagcctgggggactgcgccttgagctcccactttcaaggcgcggagccccagaccccgtgggagccctctcatggcggcccccgcagggtccagtgtccttccctggcggagccgccttttcaaccgctacgagcctgccatcatccccagccgccgcagcttgcgctccgctggattccggggcttcagaaaactctcgaaagcctcccagcgccagtagtgcccccgccctcgccagagagtgtgtggtctgcgccgagggtgaagttatggccgcactggtcccttgtggtcacaatctgttttgtatggattgtgccgtgcgaatttgcggaaaaagcgaacctgagtgcccagcatgccggaccccagctacccaagcgatccgtgtcgagacagagaccccccagcctggaggcgccagtgcattgcaacgccagtactag

SEQ ID NO: 195014 - DNA, 1956 bp, synthetic construct
  misc_feature 1..1956: note = Description of Artificial Sequence: Synthetic coding sequence
  source 1..1956: mol_type = other DNA
atgcccagcagcctgggccagcccgacggcggcggcggcggcggcggcggaggaggcggtgtgggtgctgcgggggaggaccctggccctgggccagcgccgccaccggaaggcgcacaggaagccgctccagcgccacgtcctccacccgaaccagacgatgccgccgctgcactgcggttggcgctagatcagttgtccgcactagggctgggcggcgccggcgatacggacgaggagggtgccgctggtgatggcgcggctgctgccgggggagcagacgggggagccgccccggagccagtgcctcccgacgggcctgaagccggggccccccccacccttgcacctgcagttgcaccaggaagtctccctctgctggatcccaacgccagcccacctccacctccccccccccgcccttcccctcccgacgtgttcgcaggatttgcccctcacccagccgctttgggtcccccgacccttctggccgaccaaatgagcgtgattggctcgcgaaaaaagtccgtgaatatgaccgagtgtgttcccgtgcctagttccgagcacgttgccgagattgtgggcaggcaaggttgcaagatcaaagcccttcgggccaagaccaacacctatatcaaaacccccgtgagaggtgaggagccggtgttcattgtgaccggacggaaagaggatgtagaaatggcaaaaagagaaatcttgtccgcggcagaacacttctccatcatacgggctacgcgtagtaaggccggtggccttccaggcgctgctcaggggcctccaaacctgcccggtcagacaactattcaagtgcgcgtgccctacagagttgttggattggtggtcggaccgaaaggagcaacgattaagcggatccagcagcggacacacacatacattgtgacaccagggcgtgacaaggagccggtcttcgccgttaccggtatgccagagaatgtggacagggccagagaagaaatcgaggcccacatcacattacgcaccggtgctttcacagacgctgggcccgattcggattttcatgccaatggtactgatgtgtgcctcgacttgctcggtgccgccgcgtctctctgggcaaaaactcctaatcagggcaggcgtccaccaactgcaaccgctggtctgcggggtgatacagcattgggcgccccttccgccccggaggcgttttacgcaggttccaggggaggcccgtctgtaccggatcccggcccagccagcccctactcaggatcaggaaacggtggctttgccttcggcgccgagggtcccggagctcctgtcggcaccgcagcccccgacgattgtgactttggcttcgattttgactttctggctctggacctgaccgtacccgctgctgctaccatttgggcaccttttgagagggccgctccgcttccagctttctcgggctgcagcacagttaatggtgcccctggaccccccgccgcgggggctcggcgttcaagcggcgccggcactcctcggcattcacccaccctgccggaacccggtgggttaaggctggaacttcctctgtcacgaagaggtgctccagatccagtgggagccctctcatggagacccccccagggacccgtttctttccctggcggcgccgcattctccaccgccacctcactgccgtcttctcccgcagcagcagcctgtgctcccctcgactccggagcatccgagaattctcgaaagcctccaagtgccagctcagccccagccttggcccgtgaatgcgtagtgtgcgcagaaggagaggtgatggccgcactggtgccctgtggccataacctgttttgcatggattgcgccgttcgaatttgtggcaaaagcgaaccagagtgcccagcttgcaggacccccgccacccaggcgattcacattttctcctag

SEQ ID NO: 195015 - DNA, 966 bp, synthetic construct
  misc_feature 1..966: note = Description of Artificial Sequence: Synthetic coding sequence
  source 1..966: mol_type = other DNA
atgcagtgccggctgccccggggcctggccggcgccctgctgacccttctgtgcatgggtctcttatgtctgcggtatcacctcaatcttagcccgcaaagagtgcaaggcacaccggaactgtctcagcctaatccgggccctccgaagctccagctccacgatgtgttcatcgccgtgaaaaccacccgggccttccaccgactgcggttggaactgctcctggacacctgggtctctaggactagagagcagacattcgtcttcacagactcaccagataaaggacttcaggagaggctgggctctcatctggtggttactaactgtagtgctgagcacagtcaccccgccctgagctgcaaaatggcagcggaatttgataccttcctcgcttccggtctgcgctggttttgtcatgttgacgatgacaattacgtaaatcccagagccctgctgcaacttttgcgcgcctttccactagcgagggacgtttatgttggccgcccgtcattgaacagacccattcacgccagcgaacctcaacctcacaaccgcactcgacttgtgcaattttggttcgcgacgggaggagctggattctgtatcaatagaaagctggctctcaagatggcgccctgggccagtggttccagatttatggatacgagtgccctgatccgtctgccagacgattgtactatgggctatattatcgagtgcaaactgggggggaggttgcagcctagcccgctttttcatagccatctcgagaccttgcaattgttgcgcaccgctcagctgcccgaacaagttacactgagctacggtgtgttcgagggcaaactaaacgtgatcaagcttcaggggccgttttcccccgaggaggacccaagtcggtttcggagcctccactgtctgctgtatcccgataccccctggtgcccccagttgggtgctagatag

SEQ ID NO: 195016 - DNA, 924 bp, synthetic construct
  misc_feature 1..924: note = Description of Artificial Sequence: Synthetic coding sequence
  source 1..924: mol_type = other DNA
atgcagtgccggctgccccggggcctggccggcgccctgctgaccctgctatgcatggggctcctttgtctacgctaccacctcaacctcagcccacagagggtccagggaaccccggagctgtcccagccaaatccaggccctccaaagctccagctccatgacgtgttcatagccgtgaagaccacgcgggcgtttcatagattgagacttgagctcttactggatacatgggtctcacgaacccgcgagcaggtcacccgctcccacctggttgtgactaactgctccgcggagcatagccaccctgcactgagctgtaaaatggccgccgagttcgatactttcctcgcctccggattacgctggttctgtcatgtggatgacgacaattatgttaatccccgagccctgttacagttgctcagggccttcccactggccagagatgtctatgtcggtcgccctagcctgaaccggcctatacatgcttcggagcctcaacctcacaatcggactagattggtacaattttggtttgccactggcggcgcaggattttgtatcaaccgcaagctcgccctcaaaatggctccttgggctagcggctctcgatttatggacacatccgccttgattcgcctgcccgatgactgcaccatgggctacatcattgaatgtaaactcggcggcaggttgcagccgagtcccctgtttcatagtcaccttgagaccttgcagttgctgcgcaccgcgcagctcccagaacaagtaaccctgagttatggtgttttcgagggaaagttgaatgttattaaactacagggtcctttcagtcctgaggaggatccctccaggtttcgaagcctccactgcctcttatacccagacacgccgtggtgcccacaactgggcgccaggtag

SEQ ID NO: 195017 - DNA, 357 bp, synthetic construct
  misc_feature 1..357: note = Description of Artificial Sequence: Synthetic coding sequence
  source 1..357: mol_type = other DNA
atgcagtgccggctgccccggggcctggccggcgccctgctgaccctactgtgtatgggtctcctgtgcttgcggtatcatctaaatctttctccccagcgggtacaaggcactcccgagctttcccagcccaacccaggccctcccaaattacagcttcacgatgtctttattgccgtgaagactactagggcatttcatcgactgaggctggagttattactggacacatgggtgagccggactcgcgagcagacttttgtctttactgactctccggacaaggggctccaggaacggttaggaagccccgacagttcttctctcctgcagggccctaccttatggagtccttag

SEQ ID NO: 195018 - DNA, 399 bp, synthetic construct
  misc_feature 1..399: note = Description of Artificial Sequence: Synthetic coding sequence
  source 1..399: mol_type = other DNA
atggccgccgagttcgacaccttcctggccagcggcctgcggtggttttgtcatgtggacgacgataattacgttaaccctcgcgccctgctgcagcttctccgggccttcccgttagctagggacgtctatgtgggtaggccgtccctcaatcgccctatccacgctagcgaaccccagccccacaataggacgaggctggtccagttctggttcgctacaggtggagccgggttctgtatcaaccgaaagctagcgctgaagatggccccttgggcctccggctcacggttcatggatacttctgcactaattcgcttacctgacgactgcactatgggctatattatagagtgcaagctcggtggacgcctgcaaccatctcccctcttccactag

SEQ ID NO: 195019 - DNA, 132 bp, synthetic construct
  misc_feature 1..132: note = Description of Artificial Sequence: Synthetic coding sequence
  source 1..132: mol_type = other DNA
atggccgccgagttcgacaccttcctggccagcggcctgcggtggttttgtcacgtggacgatgataactatgtgaacccccgcgcactgctgcagctcctccgagcattccccctagctagagatgtctag

SEQ ID NO: 195020 - DNA, 264 bp, synthetic construct
  misc_feature 1..264: note = Description of Artificial Sequence: Synthetic coding sequence
  source 1..264: mol_type = other DNA
tgaagccacctggagaccctgcagctgctgcggaccgcccagctgcctgagcagattagtctccctcctctctccgccctgtcgagatatactcttgtgtcaccggctggttgccccatgaacccagagctgctcggaaaggggtgggctgaaacgtccggttgcgctctggcaccgaaggtggccctgtgggttccagggaaatgcctcgttatcggctctccttggcagggactaagagtggttggcaaaccaagaatctag

SEQ ID NO: 195021 - DNA, 999 bp, synthetic construct
  misc_feature 1..999: note = Description of Artificial Sequence: Synthetic coding sequence
  source 1..999: mol_type = other DNA
atgggcctgggccccgtgttcctgctgctggccggcatcttcccctttgcaccaccaggcgcagctgctgagccccacagtctacggtacaatctgacagtgctcagctgggatgggagcgtgcagtctggtttcctcgcagaggtccatttggatggacaaccattcctgcggtacgaccgtcagaagtgtcgagctaaaccacaaggccaatgggccgaagacgtgctggggaacaaaacctgggaccgggagacccgggatttaacggggaacggcaaggaccttagaatgacgctggcccatatcaaagaccagaaggaggggctgcactctcttcaagaaatccgcgtatgcgagatccacgaggacaactcaactcggtcatcacaacacttctactacgatggagagcttttcctgagccagaatctggagacggaagaatggaccgtgccccagtcaagcagagcccagactcttgccatgaatgtccgcaatttcttgaaagaagacgccatgaagaccaaaacccattaccacgcaatgcacgctgattgcctgcaagaacttcgacgatacctcgagagtggagtcgtgttgcggagaaccgtcccaccaatggtcaacgtgacacggagtgaggcatcagaggggaacattacagtgacttgccgggctagttctttctaccctcgcaacataattctgacctggagacaggacggcgtgagtctcagccacgatacacagcagtggggcgacgttctacccgacggaaatggcacctatcagacatgggtggcaacaaggatttgcagaggtgaagagcagagatttacttgctacatggaacactccgggaatcacagtacacaccctgtgccctcagggaaggtgctggtcctacagtctcattggcaaaccttccatgtgtccgcggttgcagcagggtgctgttacttctgttactactacttcctgtgccctctgttgtag

SEQ ID NO: 195022 - DNA, 585 bp, synthetic construct
  misc_feature 1..585: note = Description of Artificial Sequence: Synthetic coding sequence
  source 1..585: mol_type = other DNA
atgggccagcgggaccagggcctggaccgggagcggaagggcccccaagacgaccccggctcttatcagggacccgagagaaggaattttctgaaggaggatgctatgaagaccaaaacacactatcatgccatgcacgctgactgtttacaggagctccgccgatatcttgaaagcggagtggtccttagaaggactgttccccccatggtgaacgtgacccgcagcgaggcaagcgaaggaaatatcaccgtgacatgcagagcatcgagcttctacccgcgaaacataatacttacgtggcggcaggatggagtgtcactgtcacacgatacccaacagtggggcgacgttctgcctgacgggaacggtacatatcagacatgggttgcaacaagaatttgcagaggggaggaacaaaggttcacctgttatatggaacatagcggaaaccacagtacccaccccgtgccctcaggcaaggtgctcgtcctgcagtcccactggcagacattccatgtttccgcggtcgcagcagggtgttgttatttctgttattactacttcctatgtccgttactttag

SEQ ID NO: 195023 - DNA, 870 bp, synthetic construct
  misc_feature 1..870: note = Description of Artificial Sequence: Synthetic coding sequence
  source 1..870: mol_type = other DNA
atgggcctgggccccgtgttcctgctgctggccggcatcttccccttcgccccccccggcgccgccgcagagccccatagtcttagatataatttaactgtcttgagttgggacggaagcgtgcaatctggatttctcgctgaagtccacctggatggtcaaccatttctaaggtatgaccgacagaagtgtagagcaaagccacagggccagtgggcagaggacgtgctggggaacaagacttgggatagagaaactcgagatctcacaggcaatgggaaggatctgcgcatgaccttggctcatatcaaggaccagaaagaggtaccacagtcctcgagagcccagacgcttgcaatgaatgtaaggaattttttaaaggaagatgccatgaagactaaaacccactaccacgctatgcacgctgactgcctgcaggaactcagacggtacctggaaagtggcgtggtgctgagacgcaccgtcccacccatggtgaatgtgacacgctctgaagcttctgaaggaaatattacggtgacctgccgtgcctcgtccttctaccctcgcaacatcatcctcacttggcggcaggacggagtctccctctcgcatgatactcagcagtggggagatgttctgcctgacggaaacgggacatatcagacatgggtagccaccaggatctgtcgcggggaggagcagaggtttacatgttacatggagcatagtggaaaccactccactcatccggtcccgtctggtaaggttctggttctgcagtcccattggcagacattccatgttagtgcagtggctgcggggtgctgttatttctgctactattactttctttgtccactcctttag

SEQ ID NO: 195024 - DNA, 738 bp, synthetic construct
  misc_feature 1..738: note = Description of Artificial Sequence: Synthetic coding sequence
  source 1..738: mol_type = other DNA
atgggccagcgggaccagcggctggaccgggagcggaagggcccccaagatgatcccggcagctaccagggaccagaaaggagaaacttcctgaaggaagatgctatgaagaccaaaacccattatcatgctatgcatgccgattgcctgcaggaattaagaagatacctcaaatccggcgtggtgttaaggagaaccgttcctccaatggtgaacgtgacacgctctgaggcctctgaaggcaacatcaccgtaacatgtcgggccagcggtttctatccatggaacatcactctttcctggcggcaagacggagtgagccttagccatgacactcagcaatggggcgatgtattgcctgacggtaacggaacgtatcagacctgggtggcgacgagaatttgccaaggagaggagcagagattcacttgctacatggaacactctggcaatcacagcacccaccccgtgccctcaggcaaggtgctcgtccttcaatctcactggcagacgtttcacgtatcagccgttgcggcagctgctatcttcgtgatcatcattttctatgtcagatgttgtaagaagaaaacaagcgccgccgaaggcccagaactggtgagtctccaagtgctggatcagcatccagtgggcacgagtgaccaccgtgatgccacgcagctcggctttcagcccctgatgagtgacttgggaagtacaggctccactgaaggggcctag

SEQ ID NO: 195025 - DNA, 1152 bp, synthetic construct
  misc_feature 1..1152: note = Description of Artificial Sequence: Synthetic coding sequence
  source 1..1152: mol_type = other DNA
atgggcctgggccccgtgttcctgctgctggccggcatcttccccttcgctccacctggtgccgctgccgagccccattcccttcgttacaatctgaccgtgctgagttgggatggctccgtgcagtctgggttcctgacggaagttcacctggacggtcagccatttctgcgatgcgacaggcagaaatgtcgagcgaagccacagggccagtgggctgaggacgtcctgggcaacaaaacctgggaccgtgagacaagggatctgacagggaacggcaaggacctgagaatgacattggcacacatcaaagatcaaaaggagggcttgcacagtttgcaagagatacgtgtgtgcgaaatacatgaggataactccacccgcagctcccagcacttctactacgatggcgagctgtttttgagtcagaatcttgagaccaaggagtggaccatgcctcaatcatctagggcccagacactagctatgaatgtgagaaactttctgaaagaagacgctatgaaaactaaaacacattaccacgctatgcacgcggattgcttacaagagctccggcggtatctgaaatcgggcgtggtgctccggcggaccgtccccccaatggtcaatgttactaggagtgaggcctccgagggtaacataactgtgacttgtcgggcctccggcttctacccttggaatataaccctgtcctggcgccaggacggggttagcctcagccacgatacccagcaatggggggacgtgcttccagacgggaatggtacctatcagacatgggtggcaacccggatttgccaaggagaggagcaaagatttacttgctacatggagcactcaggcaatcactccacccaccccgtgcctagtgggaaggtgctggtgctgcagagccactggcagaccttccatgtgtcagcggtggcagcggcagcaatcttcgttatcattatcttttacgtgagatgttgtaagaaaaaaacttccgccgcagaaggaccagaacttgtgagtctgcaggtcttggatcagcaccctgtcggaacctccgaccatcgggatgccactcagctaggattccaacccctgatgtctgatctgggaagcacaggctccacagagggcgcatag

SEQ ID NO: 195026 - DNA, 870 bp, synthetic construct
  misc_feature 1..870: note = Description of Artificial Sequence: Synthetic coding sequence
  source 1..870: mol_type = other DNA
atgggcctgggccccgtgttcctgctgctggccggcatcttcccctttgctcctcccggcgctgccgcggagccacacagtcttaggtacaatctgacagtcctgtcttgggatggctcagtacagtccggctttctggccgaagtgcatctagatggccaacccttcctgagatatgaccggcagaagtgtcgcgccaagcctcagggccagtgggcagaggatgtgctcggcaacaaaacctgggatagggaaacccgggacctgactggaaacggaaaagatctgagaatgaccttggcgcacatcaaagatcagaaggaagttccacaatcttcccgggcacagacactggccatgaatgtcagaaactttcttaaagaagatgccatgaagactaagacccattatcacgctatgcacgctgattgtctgcaagagctgcgccggtacctggagagcggtgtggtgctgagaaggactgtgccaccaatggtaaatgtgaccagatctgaggcctcggagggaaatattactgtcacatgcagagcctcgagcttttacccgcgcaatatcattctcacatggcggcaggacggcgtgagcctgtctcacgatacacagcagtggggcgatgtgctccccgatggaaatgggacctaccaaacgtgggttgcgactcggatttgcagaggagaggagcagaggtttacctgctacatggaacatagcggcaatcactccactcatccagtgccaagtggcaaggtcctcgtcctgcaaagtcactggcagacttttcacgtgtcggcggtggccgccggatgttgctatttttgctactattatttcctgtgtcctcttctgtag

SEQ ID NO: 195027 - DNA, 999 bp, synthetic construct
  misc_feature 1..999: note = Description of Artificial Sequence: Synthetic coding sequence
  source 1..999: mol_type = other DNA
atgggcctgggccccgtgttcctgctgctggccggcatcttccccttcgcgccaccaggggctgccgccgaaccccactccttgaggtacaatctgaccgtgctcagctgggacggtagcgtacaaagcggcttcctggctgaggtgcatttggacggccagcctttcctcagatatgaccgccagaagtgccgggccaagccacagggccagtgggccgaggacgtgctggggaataagacatgggatcgagagactcgggacctgacaggtaatgggaaggacttgagaatgacactggcccacattaaagaccagaaggaaggcctacatagccttcaggaaatccgggtctgcgaaattcacgaggacaatagcacccgcagttcccagcatttctattatgacggcgagctctttttgtcacaaaacttggagactgaggagtggactgtgcctcaatcctccagagcacaaaccttggctatgaacgttcggaactttctcaaggaggatgcgatgaaaaccaaaacacattatcacgccatgcacgccgattgtctacaggaactcaggagatacctggagtctggcgtagtcctgagacggaccgtgccacctatggttaatgtcacccgatcagaagcatccgaggggaatattaccgtcacatgccgggcatcatcgttttatcccagaaatattatcctgacatggcgccaggatggtgtgagcctgtctcacgacacacaacagtggggcgatgtcttgcccgatggtaacggaacataccagacatgggtagctactcggatctgtaggggggaagaacaacggttcacatgttacatggagcattctggtaaccattctacacaccctgttccatctggcaaagttctggtgttgcagagccactggcagactttccacgtatccgccgtagcagcaggttgttgttacttctgttattattacttcttgtgccctctgttgtag

SEQ ID NO: 195028 - DNA, 585 bp, synthetic construct
  misc_feature 1..585: note = Description of Artificial Sequence: Synthetic coding sequence
  source 1..585: mol_type = other DNA
atgggccagcgggaccagggcctggaccgggagcggaagggcccccaagacgaccctgggtcgtaccaggggcccgagagacgcaacttcttaaaggaagatgccatgaaaaccaaaacacattatcatgcaatgcacgctgactgtctgcaggagctcagaaggtacctagagtccggtgtggtgctgcggagaaccgtccccccgatggtcaacgtcacaagaagtgaagctagtgagggaaacattactgtgacatgcagggccagttcattttaccctcgaaatataatactaacctggaggcaggatggggtgtctcttagtcacgatactcagcaatggggggacgtcctgcctgacggtaacggaacataccagacttgggtcgccaccaggatttgcaggggagaggagcagcgattcacctgctatatggagcattccgggaatcatagcacccacccagtcccatctggaaaggtgttggtgttgcaatcgcactggcagaccttccatgtaagcgccgttgccgccggatgctgctatttctgttattattacttcctgtgcccactgctatag

SEQ ID NO: 195029 - DNA, 831 bp, synthetic construct
  misc_feature 1..831: note = Description of Artificial Sequence: Synthetic coding sequence
  source 1..831: mol_type = other DNA
ttccccttcgccccccccggcgccgccgccgagccccacagcctgaggtacaacttgacagtgttatcatgggacggcagcgtgcagagcggcttcctagccgaggtgcacttggacggtcagccattcctccgatacgaccgccagaaatgccgggcgaagccacaggggcagtgggctgaagacgtcctgggtaacaagacttgggaccgggagacaagggacctaactggtaacgggaaggaccttcgcatgacactggcacacatcaaagatcagaaagaggtaccccctatggtgaacgtgaccagatccgaagcctccgaaggaaacatcacagtaacttgccgcgcgtcctccttctaccctcgtaacatcactttaacttggagacaagatggggtttcactcagtcacgatacccagcagtggggggacgtgttgccagacggtaatggtacataccagacatgggtagctaccaggatctgccagggagaggagcaaagatttacctgttacatggagcactcgggcaatcacagtactcacccggttccatcaggaaaggttctggtccttcagtctcattggcagacctttcacgtgtccgccgttgcggccgcagcagctgccatctttgtgattatcatattctatgtgagatgctgcaaaaagaagacaagtgccgctgaaggccccgaattagtcagtcttcaagtcctcgatcagcatcccgtcggcacctccgaccaccgggacgccacccaactaggatttcagcccctcatgagtgccctgggaagtaccggttcaactgaaggtgcttag

SEQ ID NO: 195030 - DNA, 1158 bp, synthetic construct
  misc_feature 1..1158: note = Description of Artificial Sequence: Synthetic coding sequence
  source 1..1158: mol_type = other DNA
atgggcctgggccccgtgttcctgctgctggccggcatcttcccctttgctcctcccggtgcggcagccgagccgcatagtctgcgctataatctaaccgtgctgtcctgggacgggtctgtgcagagcggtttcctggcagaagttcaccttgacggtcaaccctttttacgatatgaccgacagaaatgtcgggccaaaccccagggccagtgggccgaggatgtcctaggtaacaaaacctgggaccgggagacccgggatctgactggaaatggaaaagatcttaggatgactttggcacatattaaggatcagaaagagggtctgcactctctgcaagaaattagagtttgtgaaatccatgaggacaactcaactagaagcagccagcacttctactacgacggggagttatttctatcacagaacgtggaaaccgaggaatggaccgtcccacagtccagcagggcacagacactggctatgaatgtgcgaaattttctgaaggaagacgctatgaaaacaaaaacccactaccatgcgatgcatgcggattgccttcaagaactgagacggtacttggagagctccgtggtgctgagacgccgcgtgcctcccatggtgaatgtcacacgatcagaagcctccgagggcaatatcactgtcacatgcagggcctcaagtttttatccacgcaatattacgctgacatggcggcaagacggcgtgagcctgtcccacgacactcagcagtggggagacgtgttacctgacggcaatggtacttatcagacttgggttgcgaccagaatttgccagggggaagagcagcgatttacctgttacatggagcatagtggcaatcattcaacccaccctgtgccttctggcaaggtgttggtgctccaatcgcattggcagacatttcacgtgagcgctgtagctgctgcggcagctgctattttcgtgattataatattttacgtcaggtgctgcaagaagaagacatctgcagccgaaggacccgagctggttagtctgcaggttttggaccagcatccggtgggaactagcgaccaccgagacgccactcagcttggctttcaacctttgatgtcagccctcggatccacagggtcgaccgagggcgcatag

SEQ ID NO: 195031 - DNA, 744 bp, synthetic construct
  misc_feature 1..744: note = Description of Artificial Sequence: Synthetic coding sequence
  source 1..744: mol_type = other DNA
atgggccagcgggaccagggcctggaccgggagcggaagggcccccaggacgatcctggcagttatcagggacctgagcgcaggaatttcctcaaggaagatgccatgaaaaccaagacgcattaccacgcgatgcacgctgactgtctccaggagctgcgcagatatcttgagagctctgtcgttctacgccggagagtcccaccaatggtgaatgtcactcggagcgaagccagcgaaggcaatattacagtgacgtgccgcgcctcaagtttctacccacgcaatatcacgttgacttggagacaggacggtgttagcctgtctcatgatacacagcagtggggcgacgtccttccagacggcaatggaacatatcaaacctgggttgcaaccaggatatgtcagggcgaagagcagcggttcacctgttatatggagcactcaggcaaccactccacccatccggtccctagtggcaaagtcttggtgctgcagagccactggcaaacgttccatgtcagtgccgtggcggccgctgccgcagctattttcgttatcattatattctacgtgagatgttgcaagaaaaagacctccgccgctgagggccccgagctcgtaagcctccaggttctcgatcagcatcctgttggcacatctgatcaccgggacgcaacccaactgggattccagcctctgatgtcggcactgggctccacaggatcaacagagggtgcctag

SEQ ID NO: 195032 - DNA, 672 bp, synthetic construct
  misc_feature 1..672: note = Description of Artificial Sequence: Synthetic coding sequence
  source 1..672: mol_type = other DNA
ttccccttcgccccccccggcgccgccgccgagccccacagcctgcggtataacttaacagtcctgagctgggatgggtctgtccagtccggcttcttagccgaagtgcatctggacgggcagccattcctccgttacgatcgccagaagtgccgggcaaaaccccagggtcagtgggccgaggatgtcctgggaaacaaaacctgggaccgagaaactagggacctgactggcaatggtaaagacctgaggatgactcttgcgcacatcaaggatcaaaaggaagtcccgcccatggtaaacgtcactagaagcgaggcaagtgaaggaaacatcacagtgacatgtagagcaagttcattttacccacgcaacatcatcctgacctggcgacaggacggtgtgtcactatctcacgatacccagcagtggggggacgtcttgcctgatggcaatggcacttatcagacttgggttgcaacccgaatttgcagaggcgaggagcaacgtttcacttgctacatggagcattcgggcaatcacagtacgcacccagtccctagcggcaaagtgttggtgctccagagccattggcagacattccacgttagtgccgttgccgccggatgttgttacttctgttactactactttctgtgccccttgctgtag

SEQ ID NO: 195033 - DNA, 672 bp, synthetic construct
  misc_feature 1..672: note = Description of Artificial Sequence: Synthetic coding sequence
  source 1..672: mol_type = other DNA
ttccccttcgccccccccggcgccgccgccgagccccacagcctgcgttacaatctgaccgttttaagttgggatggatcagtgcaatcaggtttccttgccgaggtgcacttggatggacagccgtttttacgatacgatagacagaagtgtcgcgctaaaccccaggggcagtgggcggaggacgtgttgggtaataaaacctgggatcgcgagacgagggatttaacgggcaatggtaaagatctgaggatgacattggcgcacattaaagatcagaaggaggtgccaccaatggtgaacgttactcgcagtgaggcctccgagggcaatattactgtgacatgtcgcgcgagtagcttttaccctcgaaatatcatcctgacctggagacaggatggcgtgtctctatcccacgatactcagcagtggggggatgtcctccctgatgggaacggcacatatcagacttgggtagctacaaggatttgtcgaggagaggaacaacgcttcacttgctatatggaacacagtggtaaccactccacccatccagtaccctcaggtaaagtgctggtgttacaatctcactggcagaccttccatgtcagtgccgtcgccgcaggttgctgctacttctgctattactactttttatgccccctgctttag

SEQ ID NO: 195034 - DNA, 672 bp, synthetic construct
  misc_feature 1..672: note = Description of Artificial Sequence: Synthetic coding sequence
  source 1..672: mol_type = other DNA
ttccccttcgccccccccggcgccgccgccgagccccacagcctgaggtacaatctgaccgttctatcttgggacggctccgtacagtctggcttcctcgcagaagtccacctggacgggcagcccttcctgagatacgacaggcaaaaatgccgcgccaagcctcagggccagtgggctgaggacgtgcttggtaacaagacatgggacagagagactagagatcttactggcaatggtaaagatctgcggatgacactggcacatattaaggaccagaaagaggtcccccccatggtaaacgtcacaagatccgaggctagtgagggaaacattacagtgacctgccgagcctcttcattctacccaagaaacatcattttaacatggcggcaagacggggtgagcctgtcgcatgatacgcaacaatggggggatgtgctcccagatggaaacggcacttaccaaacttgggtggctacgagaatttgtcgtggagaggaacagcgttttacttgttacatggaacacagcgggaaccactccacacatcctgtcccctcaggcaaggtactcgtgctgcagagtcattggcagactttccacgtcagcgccgtggccgcaggatgctgttatttttgctattattatttcttgtgccccctcttatag

SEQ ID NO: 195035 - DNA, 999 bp, synthetic construct
  misc_feature 1..999: note = Description of Artificial Sequence: Synthetic coding sequence
  source 1..999: mol_type = other DNA
atgggcctgggccccgtgttcctgctgctggccggcatcttccccttcgcacctccgggggccgcggctgagccgcactcgttgcgctacaatttaacagtgctatcctgggacgggagtgtccagtcaggttttcttgctgaggtgcacctggacggccagccttttcttagatatgatagacaaaagtgcagagctaagcctcaaggccaatgggctgaggatgtgctgggaaacaagacttgggaccgggaaacacgagacctaacgggaaacggaaaggatctgcgcatgacactcgcacatataaaggatcagaaagaaggcctacactcactccaggaaatccgggtttgtgagatccacgaggataactccactcgcagctcacagcacttttactatgacggcgaactgtttctctcacagaatctggaaacagaggaatggaccgtgcctcaaagttcaagagcgcaaaccctggcgatgaatgtgagaaatttcctcaaagaagacgctatgaagacgaagacccactatcatgccatgcacgccgactgccttcaggagctgcgccgatacctggaatcaggcgttgtcctgcgcagaaccgttcccccgatggtcaatgtgactcggagcgaggccagcgagggcaatatcactgtgacttgccgcgcttccagcttctatccccgtaacataattctgacatggcgtcaggatggtgtctcgctctcccacgacacgcagcagtggggggatgttctgcctgatggcaatgggacgtaccagacctgggttgctactagaatctgccggggagaggaacagaggttcacctgttacatggagcattcgggaaaccactctactcaccccgtgccgagcgggaaggttttggtgttacagtctcattggcaaacctttcatgtgtcagccgttgccgccgggtgttgctacttttgttactattattttctgtgccccctgctttag

SEQ ID NO: 195036 - DNA, 1029 bp, synthetic construct
  misc_feature 1..1029: note = Description of Artificial Sequence: Synthetic coding sequence
  source 1..1029: mol_type = other DNA
atgggcctgggccccgtgttcctgctgctggccggcatcttcccctttgcccccccgggggcagctgctgaacctcactctctgaggtataatttgaccgtgcttagctgggatgggagcgtgcagtcagggttcctggcggaagtgcaccttgacggccagccattcctccgctatgaccggcagaagtgtcgggctaagccacaggggcagtgggccgaagacgtgcttggcaataagacatgggatagagagacccgcgacctaacaggcaacgggaaagatcttagaatgaccctggcacacatcaaggatcagaaagaggtcccccaaagtagtcgagctcaaactctggccatgaacgtaaggaacttcctgaaggaagacgctatgaaaacaaaaacccattaccacgcgatgcacgctgattgcctgcaggagctccgacgctacctagaatcgtctgtggttctgcggcgcagggtccctcccatggtgaatgtcacccgctcagaagcatccgagggcaacatcacggtgacgtgcagagcctcttccttttaccctagaaatatcacactgacatggaggcaagatggggtgtcgttatcccacgatacacagcagtggggggatgtgctccccgatggcaacgggacttatcagacgtgggtggcaacaaggatatgtcagggcgaagaacagcgctttacctgttatatggaacattcgggaaaccatagcactcaccctgtcccgagtgggaaggtgctggtactgcagtctcactggcaaactttccatgtcagcgcggtggccgccgcggcagccgccatcttcgtaatcatcatcttttatgtgcgatgttgcaagaagaagactagtgcggcagaaggccctgaactggtgtccttacaggtcctggatcaacatccagtgggcactagcgatcatcgcgatgccactcaactgggtttccagccactgatgagtgccctgggctccacaggatcaacggagggcgcatag

SEQ ID NO: 195037 - DNA, 825 bp, synthetic construct
  misc_feature 1..825: note = Description of Artificial Sequence: Synthetic coding sequence
  source 1..825: mol_type = other DNA
ttccccttcgccccccccggcgccgccgccgagccccacagcctgcgttataatttaaccgttctttcttgggatggctccgtgcagtcgggcttcctgacagaggtgcacttagatggtcagcccttcttgcggtgtgacaggcagaaatgcagggccaagccacagggacagtgggcagaggacgtgctaggaaacaagacttgggatcgggagacgcgggacctaaccggcaatggtaaggacctgcgaatgaccttagcccatattaaggatcagaaagaagtgccccccatggttaatgtcacaaggtccgaagcctctgaagggaacattacagtaacatgtcgtgcctcaggattctacccttggaacattactttaagctggagacaagacggagtgagtctgagtcacgatactcagcagtggggcgacgttttgccggatggcaatggaacctatcagacatgggtagctacccgaatttgtcagggagaggagcagcgcttcacatgctatatggaacactccggaaaccatagcactcatccagttccgagcggcaaggtgttagtactccagtctcattggcaaaccttccatgtttccgcggtggcggccgcagctatctttgtgatcattattttctatgtacgctgttgcaagaagaagacttctgcagcagagggacccgagctagtctccttacaggttctagaccagcaccctgtaggcaccagcgaccatcgggatgcaacccagcttggtttccagccgcttatgtctgatttaggatctacaggttccacggaaggggcctag

SEQ ID NO: 195038 - DNA, 585 bp, synthetic construct
  misc_feature 1..585: note = Description of Artificial Sequence: Synthetic coding sequence
  source 1..585: mol_type = other DNA
atgggccagcgggaccagggcctggaccgggagcggaagggcccccaggacgatccgggtagttaccaagggccagaaaggaggaactttttgaaagaggatgccatgaagaccaagactcattatcacgcgatgcacgccgattgcctgcaggagttaagaaggtacctcgaaagcggagtggtgctcagacgaacggtgccgccgatggtgaatgtgaccaggagcgaagcatcagagggcaatattacagtgacgtgcagggccagctcgttctaccctagaaacatcatactaacatggcgtcaggacggtgttagtctgtcccacgacacacaacagtggggagacgtgttgccagacgggaacggcacatatcagacttgggtggcaaccaggatttgtaggggtgaggagcaacgctttacatgctatatggaacattccggaaaccactccacacaccctgttccatcaggtaaggtactcgtgttgcaatcccactggcaaacctttcatgtgtccgccgtggctgcaggatgttgctatttctgttattattactttctatgccccctgttatag

SEQ ID NO: 195039 - DNA, 870 bp, synthetic construct
  misc_feature 1..870: note = Description of Artificial Sequence: Synthetic coding sequence
  source 1..870: mol_type = other DNA
atgggcctgggccccgtgttcctgctgctggccggcatcttccccttcgcccctcctggcgcagcagccgagcctcattcactgcgctataatttgactgtgttgtcctgggacggtagcgtccagagcggatttcttgctgaagtgcacctggacggacagccttttctgaggtatgatcgccagaagtgccgggcaaagccacagggtcagtgggctgaggatgtgctgggcaacaagacctgggaccgggaaacaagggacctgacaggcaatggaaaagacctgcgaatgacactggcccatattaaggatcagaaagaggttccacagtcaagtagagctcagacactggcaatgaacgttcgaaactttctaaaagaagatgccatgaagacaaagacacactatcacgccatgcacgccgactgtctgcaagaactgagaagatacctggagagcggggtggttttgagacgaacagtgcctccaatggttaatgtaaccaggtcagaggccagcgaagggaatataacagtgacttgtagggcctcctccttctatcctaggaacatcattttgacctggcgtcaagatggagtgtcattgtcccatgatactcaacagtggggggacgtgctaccagacggcaatggcacttatcagacctgggtggcgacgaggatttgtagaggggaggagcagcgctttacctgctacatggagcatagcggaaaccactctacccatcccgtcccctctggcaaggtcctggtactccagagccactggcagacattccacgtgtctgcggtggccgccggatgctgctatttctgttattactacttcctgtgtcccctgctttag

SEQ ID NO: 195040 - DNA, 999 bp, synthetic construct
  misc_feature 1..999: note = Description of Artificial Sequence: Synthetic coding sequence
  source 1..999: mol_type = other DNA
atgggcctgggccccgtgttcctgctgctggccggcatcttcccctttgcccctcctggcgccgccgctgagccgcatagcctgaggtataacctgaccgtgctctcatgggacggctctgtacaatctggcttcctggctgaggtgcatctggacggacaaccattcctccgctatgataggcaaaaatgcagggccaagccacaagggcagtgggcggaggatgtgttgggaaacaagacctgggacagggagacaagagatttgacgggtaatgggaaggacctccgcatgaccctcgcccacattaaggaccagaaagaaggcctccactccttacaggagatcagagtctgcgagatccacgaggacaatagtacccggtcaagccagcatttttattacgatggcgagctgtttttaagccagaacctggagaccgaagaatggacggtgccccagtcaagccgcgctcaaacacttgccatgaatgtcagaaacttcctgaaagaagatgccatgaaaaccaagacccattatcatgcaatgcatgccgattgtctgcaggaactccggcggtacctcgagtccggcgtcgtattgagacgaaccgtgccaccaatggtaaacgtcacacggagtgaggcttctgaagggaacatcaccgtgacctgcagagcttcaagtttctatcctcggaatattattctcacttggcgccaagatggggtcagtctgtcacatgacacacagcagtggggggacgtgctgccagatgggaacgggacctatcagacttgggtcgccacgagaatttgtcggggagaagagcagcgctttacatgctatatggagcattcaggcaatcactcaacccatcctgtgccaagtgggaaggtgctggtccttcaatcccactggcaaacattccacgtgtctgcagtggctgcggggtgctgctacttctgttattactactttttgtgccctttgttgtag

SEQ ID NO: 195041 - DNA, 999 bp, synthetic construct
  misc_feature 1..999: note = Description of Artificial Sequence: Synthetic coding sequence
  source 1..999: mol_type = other DNA
atgggcctgggccccgtgttcctgctgctggccggcatcttccccttcgctcctccaggggccgcggctgaaccgcattccctgagatacaatctgacagtgctatcttgggatggctcggtccaatccgggtttctggccgaagtgcacctggacggacaacccttcctgcggtatgatcgacaaaaatgcagagccaaacctcaggggcaatgggccgaagatgtgctgggaaacaagacgtgggacagggaaacaagggatctgaccgggaacggtaaggacttgagaatgaccctggcacacattaaggaccagaaagagggattacactctctgcaggagatcagagtgtgtgagattcatgaggataacagtacccggtccagtcagcatttttactacgacggggagctgttcctgagtcaaaatctcgagacggaggaatggacagtgcctcaatcgagccgagctcaaaccctcgcaatgaatgtgcgaaatttccttaaggaggatgccatgaagaccaagacccactatcacgccatgcatgctgactgtcttcaagaactccggaggtacctggagagtggcgttgttcttcgaagaactgtgcctccaatggtcaacgtgacgaggagtgaggcatctgagggtaacataactgtcacttgcagagcatccagcttctatccacgaaatatcatcctcacatggaggcaggatggcgtcagtctctcacatgacacccaacagtggggcgacgtgctccccgacggcaacggcacctaccagacatgggtggctactcggatctgtagaggagaagagcaaaggttcacttgttatatggaacattccggaaatcattcgacccaccccgtgccctccggaaaggttctcgtgctgcaatcacattggcagacctttcatgtttctgctgtcgcagccggatgttgctacttctgctactactattttctgtgcccactgctatag

SEQ ID NO: 195042 - DNA, 1152 bp, synthetic construct
  misc_feature 1..1152: note = Description of Artificial Sequence: Synthetic coding sequence
  source 1..1152: mol_type = other DNA
atgggcctgggccccgtgttcctgctgctggccggcatcttccccttcgcacctcctggggccgccgcggagcctcattctctcaggtataacttaaccgtgctttcttgggacggaagcgtgcagtccggatttctgacagaggtgcacctggatggacagccattcctgagatgcgacagacagaaatgtcgtgctaaaccccagggacagtgggccgaagacgtactcgggaacaaaacttgggacagagagacgagagatctgacagggaatggaaaggacctcagaatgacgctggctcacattaaggaccaaaaagagggcctgcattctctccaggagattcgtgtgtgcgagatacatgaggataacagtaccaggtcatctcaacacttttattacgacggagagctgttcctttcgcagaacctcgagacaaaggagtggaccatgccacagtcgagtagagcccagaccctggcgatgaacgtgcgaaattttctaaaggaagacgccatgaagaccaagacgcattaccacgccatgcatgccgactgtctgcaagagctcaggaggtaccttaaatccggggtggtcctgagaagaacggtcccgcctatggtgaacgttaccaggagtgaggcaagcgaaggcaacatcactgtaacttgcagggctagtggcttctatccttggaacattacactgtcctggaggcaggacggggtgagcctaagtcacgatacccagcagtggggcgacgttttgcccgacggcaatggaacatatcagacctgggtagccactagaatttgtcagggcgaagaacagaggtttacctgctatatggagcattctggcaaccactctacccatccagtaccatccgggaaagtcctggttctccagtctcattggcaaacctttcatgtctcagcggttgccgccgcagccatctttgtgataatcattttttatgtgcgatgttgtaaaaaaaagacctcagcagccgagggaccggaactcgtgagtcttcaggtcctggaccaacaccccgtggggaccagcgaccaccgcgacgcaactcaactgggattccagcctttgatgtctgacctgggtagcacaggctcaaccgagggagcctag

SEQ ID NO: 195043 - DNA, 999 bp, synthetic construct
  misc_feature 1..999: note = Description of Artificial Sequence: Synthetic coding sequence
  source 1..999: mol_type = other DNA
atgggcctgggccccgtgttcctgctgctggccggcatcttcccctttgcgccgccaggggccgctgccgagcctcatagtttgcgctacaatctgactgttctgagttgggacggctccgtacagagcgggttcctggccgaagtccacctcgacgggcagccctttctaaggtacgacaggcaaaaatgccgggccaaacctcagggacaatgggctgaagatgtactcggcaataaaacttgggatcgcgaaacacgcgacctgaccggaaatggaaaagatctacgcatgaccctagctcacatcaaggaccaaaaagagggattgcacagcctccaggaaatcagggtgtgtgaaatacatgaagataactccactagaagttctcagcatttctactatgatggcgaattgttcttatcacagaacctcgagaccgaagagtggacagtgccgcagtctagcagggcacagacgctggccatgaacgtgcggaacttcttgaaagaagatgcgatgaaaacaaaaacccattaccacgcgatgcacgctgattgcctgcaggaattgcgccgctaccttgagtcaggggtggtactgagaagaacagtgcccccgatggtgaatgtcacaaggtccgaagccagtgagggaaacatcaccgtgacttgtcgggcctccagtttttacccacgcaatatcatcctgacgtggcgccaggacggtgtctctctgagccacgatacacagcaatggggtgacgttctgcccgacggcaacgggacgtatcagacatgggttgcaactcgcatctgcaggggtgaggaacagagattcacctgctatatggagcacagcggcaaccatagcactcaccccgtgccgagcggaaaggttcttgttcttcaatctcattggcagacctttcacgtatcagctgtcgccgctggctgttgttacttttgttattattacttcctgtgccctctgctctag

SEQ ID NO: 195044 - DNA, 999 bp, synthetic construct
  misc_feature 1..999: note = Description of Artificial Sequence: Synthetic coding sequence
  source 1..999: mol_type = other DNA
atgggcctgggccccgtgttcctgctgctggccggcatcttccccttcgccccgccaggagccgccgccgagcctcactctctgaggtacaatctcactgtgttgtcctgggacggctccgtgcagtcaggctttctggcagaggtgcacctggatggccagcctttccttcgatacgatcgacagaaatgtagagccaaacctcagggacagtgggcagaggatgtccttggcaataagacctgggatagggaaacaagggatctgacgggcaacggtaaggatcttcggatgacgctcgcccatattaaggaccagaaggagggcctgcactccctgcaggaaattcgggtctgcgaaattcacgaagacaacagcacccgtagcagtcagcacttctattacgacggcgaactgtttctgagccagaacgtcgagacagaggaatggaccgttccacagtcaagccgggcgcagaccctggcaatgaacgtacgcaacttcctgaaggaggatgctatgaagacgaaaacacattatcacgctatgcatgccgactgccttcaggaattgaggcgctatctggaaagcagcgtcgttcttcggagacgggtgcccccgatggttaatgttacaagaagtgaggcctcagaggggaacattactgtgacatgccgggcatcatctttctaccccaggaacatcacccttacctggaggcaggacggggtctcactcagccacgatacccagcagtggggtgacgtgctccctgacgggaacgggacctaccagacctgggtcgccactcggatctgtcagggggaggaacaaaggtttacatgttacatggagcactccggcaatcacagcacacatccggtacctagtggaaaagtgctggtactgcaatcccattggcagacatttcacgtcagtgctgtcgcagcatgctgttgctacttttgctactactatttcctgtgccctcttctgtag

SEQ ID NO: 195045 - DNA, 1152 bp, synthetic construct
  misc_feature 1..1152: note = Description of Artificial Sequence: Synthetic coding sequence
  source 1..1152: mol_type = other DNA
atgggcctgggccgggtgctgctgttcctggccgtggccttccccttcgctccgcctgccgccgccgccgagcctcactctcttagatacaacctgatggtcctatctcaagatggcagcgtacagagcggattcctcgcagaaggacatctcgacggccagcccttcctgaggtacgatcgccagaaacgtagagccaaaccacaaggacagtgggccgaaaacgtgttgggagcgaaaacctgggacactgaaactgaagacctgactgagaatgggcaggatctcaggagaaccctcacacacatcaaggaccaaaagggaggtctacactcactccaggagattcgggtctgtgaaattcacgaagattcaagcaccagaggctcaaggcacttttattacgatggtgagctctttcttagccagaacttggaaacgcaggagtctactgtgccacaatcttccagagcccaaacgctggctatgaatgtcacaaacttctggaaggaggatgctatgaagactaagactcattacagagctatgcaggcggactgccttcagaagctgcaacgatacctgaagagtggcgtggcaattaggaggacagtacctccaatggtgaacgtcacctgcagcgaggtgagcgaagggaacattactgtcacttgtcgtgcctcctccttctacccaaggaacattaccttaacctggcgacaggatggagtgtccctgtcacataacactcaacagtggggtgacgtcctgcccgacgggaatggtacttatcagacctgggtggctactcgcatcaggcaaggagaggagcagcggttcacatgttatatggaacattccggtaaccatgggacccaccctgtgcccagcggcaaggccttggtactccaatcacagcgtacagattttccatacgtctccgccgccatgccctgcttcgtgattattataatcttgtgtgtcccatgctgtaaaaaaaagacctctgcagccgaaggtccagaactcgtgtctctgcaagtccttgaccaacaccctgtagggactggagatcaccgggatgctgcgcagcttggcttccagccgctaatgtccgccaccggaagcacagggtccacagaaggaacatag

SEQ ID NO: 195046 - DNA, 1152 bp, synthetic construct
  misc_feature 1..1152: note = Description of Artificial Sequence: Synthetic coding sequence
  source 1..1152: mol_type = other DNA
atgggcctgggccgggtgctgctgttcctggccgtggccttcccctttgcaccacctgctgctgctgccgagccccacagcctaaggtataacctgatggtgctgtcacaggatggttcagtgcagagcggtttcctcgctgaggggcatttggatggtcaaccgttcctccgttacgatcgccagaagcggcgggcgaaaccacaaggtcagtgggcggaggacgtgctcggcgcaaagacctgggacacagagactgaggatctaactgaaaacggacaggacctgcggaggaccttgactcacattaaagatcagaaaggcgggctccactccctccaggagatcagggtgtgtgaaatccacgaagattctagcacacgcggatcacggcacttctattacgatggggaactctttctgagtcagaatcttgagacacaggaatctactgttccgcaatcgtcacgggcccagacactcgcaatgaatgtgaccaatttctggaaggaggacgctatgaagactaagactcactatcgcgccatgcaggcagactgcctgcagaagctgcagcgctatctgaaaagcggcgttgccatacgaagaaccgtccctccaatggttaacgtaatttgtagcgaggtgtccgagggcaatatcaccgtaacttgcagagcttcctcattctatccacgcaatatcactctcacctggcgccaggacggggtgtccctgtcccacaacacacagcagtggggcgacgtgctgcccgatggcaatgggacttatcaaacatgggttgctacacgaattcgccaaggtgaagaacagcggttcacctgttatatggagcacagcggcaaccacggaacccaccctgtccccagcgggaaggcactggtgttacaaagccagcgaactgactttccttacgtgtcagccgcaatgccgtgttttgtgattattatcatactatgcgtgccttgctgcaagaagaagacatctgccgccgaaggtcctgagctggtttcccttcaggtccttgaccagcaccctgttggaaccggtgatcatagagacgccgcccaactcggctttcagcctctaatgtcggctaccggttcgacaggatccaccgaaggaacgtag

SEQ ID NO: 195047 - DNA, 1023 bp, synthetic construct
  misc_feature 1..1023: note = Description of Artificial Sequence: Synthetic coding sequence
  source 1..1023: mol_type = other DNA
atgggcctgggccgggtgctgctgttcctggccgtggccttcccctttgcccctccagccgcggcagccgaacctcattcgttaagatataatttaatggtgctgtcgcaggatggcagtgtgcagtccggctttctagcggaaggccacctggacgggcagccatttttgcggtatgaccggcagaaacgacgcgccaagccacagggacaatgggctgagaatgtgctcggcgctaagacttgggacaccgagaccgaggatttgacagaaaacggtcaagacctccggcgaactctcacacacatcaaagaccagaagggagtccctcaatcttccagagcccagacactggctatgaacgtgacaaacttctggaaggaggatgcgatgaagactaaaactcactatagagctatgcaggccgactgtctgcagaaattgcagcggtacctgaaaagtggggtcgctattagacgcaccgttcctcctatggtgaacgtcacctgctccgaggtgtccgagggaaacataaccgttacgtgccgcgcctcctctttttacccgaggaacattacgctgacgtggcgccaggatggggtgtcacttagccataacacccagcagtggggagatgttctgccggatgggaacggaacgtaccaaacctgggtcgccaccaggatccggcaaggggaggaacagaggttcacttgctacatggaacactctggtaaccacggtacccacccagtgccaagtggtaaagcactcgttctacaatcacagcgcacggacttcccttatgtgtccgctgcaatgccctgtttcgtgataatcattatcctctgtgtgccctgctgcaaaaagaaaactagtgccgctgaggggcccgagttggttagcttacaggtgctggatcaacaccccgtcgggacaggggaccatcgggacgcagctcagctcggctttcagcctttgatgagtgctaccgggtcaacaggttctacagaaggcacctag

SEQ ID NO: 195048 - DNA, 1023 bp, synthetic construct
  misc_feature 1..1023: note = Description of Artificial Sequence: Synthetic coding sequence
  source 1..1023: mol_type = other DNA
atgggcctgggccgggtgctgctgttcctggccgtggccttcccctttgcgcccccagcagctgccgccgaaccccacagcctgcggtacaaccttatggtcctgagtcaggacggatccgtgcagagtggatttttagcagaggggcatctggatggacagccgttcctgcgctacgatcgccagaaaagacgagctaagccacaggggcaatgggcggaggatgtgttgggggctaagacttgggacaccgagacagaggacctgacagagaacggccaggacctgagaagaaccctaactcacattaaggaccagaaaggggtccctcagtcatcgcgggcccagactctggcaatgaatgtgactaacttttggaaagaagatgctatgaagactaagacccattacagagcgatgcaagccgactgcctgcagaaacttcagcgctatctgaagagcggggtggccatccgccgtaccgtgcctcccatggttaacgttacctgtagcgaggtatccgagggcaatatcacagtgacctgccgcgcgtcaagcttctacccgagaaatatcaccctgacatggcgacaggacggagtttctctgagtcacaacactcagcagtggggcgacgtcctgcctgacggcaatggaacctaccagacttgggttgctacacgaattcgtcagggcgaagaacagcgcttcacttgctacatggagcacagtggaaatcacggaacacaccccgttccctcaggcaaagctctggtgctccagagtcagcgaactgatttcccatacgtttcagctgcgatgccctgttttgtgatcattatcattctgtgcgtaccctgctgtaaaaagaagaccagtgcagctgaggggcctgaacttgtctcgctgcaggtgttggaccagcacccagtgggcacaggcgatcatcgcgacgccgctcagctcggatttcagcccctgatgtcagccacgggctctactggaagcacagagggggcttag

SEQ ID NO: 195049 - DNA, 126 bp, synthetic construct
  misc_feature 1..126: note = Description of Artificial Sequence: Synthetic coding sequence
  source 1..126: mol_type = other DNA
atgggcctgggccgggtgctgctgttcctggccgtggccttcccctttgcacccccggccgcagccgcggtggagatgggatttcaccgggtgtcccaggatggtttggacctgctcaccagctag

SEQ ID NO: 195050 - DNA, 1083 bp, synthetic construct
  misc_feature 1..1083: note = Description of Artificial Sequence: Synthetic coding sequence
  source 1..1083: mol_type = other DNA
tgaccccacagcctgcggtacaacctgatggtgctgagccaggacggctcagtacagagcgggtttctcgccgaggggcacctggacggtcagccttttctcaggtatgaccgtcagaagcgaagggccaaaccccagggccagtgggccgaagacgtgctcggcgccaaaacttgggatacggaaacagaggacctgaccgaaaacggccaggacttgaggcgtactcttacgcatattaaggaccagaagggggggctgcactccctccaagagatccgggtctgcgagatccatgaagattcatcgacacgtggaagcaggcatttctattatgacggagagttgttcttgagccagaacctggaaacacaggaatctactgtgccccagagcagtcgagcccagacactcgctatgaatgtgacaaatttttggaaggaagatgctatgaaaaccaaaactcattaccgcgctatgcaggcagactgcctacagaaactccagagatacttaaaatctggcgtcgccatcaggaggacggtccctccaatggtgaacgttacctgttctgaggtgtccgaaggtaacatcactgttacgtgtagggccagctctttctatcctagaaacatcacactgacgtggcgacaggacggcgtttcactgtcccataatacacagcaatggggggacgtgttgccagatggcaacggcacgtaccaaacttgggtggcaacacgcataaggcagggcgaagagcaaagattcacatgttacatggagcactccggcaaccacggaactcatcccgttcccagcggcaaggctctcgtactgcaatcacaacggactgacttcccctatgtcagcgcagccatgccttgcttcgtcattattattatactgtgtgtgccttgctgcaagaaaaaaacttccgccgcagaggggccagagctcgtatctttgcaagtgttggaccagcaccctgtcgggacaggggaccatcgggacgcagcacagttaggcttccagcctcttatgtctgctacaggatccacgggcagcaccgagggcgcctag

SEQ ID NO: 195051 - DNA, 1152 bp, synthetic construct
  misc_feature 1..1152: note = Description of Artificial Sequence: Synthetic coding sequence
  source 1..1152: mol_type = other DNA
atgggcctgggccgggtgctgctgttcctggccgtggccttcccctttgccccaccggcggctgccgcggagcctcacagcctccgatataatttgatggtgctgtcccaggacggtagcgtgcagagtggtttcctggcggagggccacctggacggacaaccctttttgcgatatgatcgacagaagaggcgcgccaagcctcagggtcaatgggcggaagatgtactgggcgcgaaaacctgggacacagagactgaggacctgacagaaaacgggcaggaccttaggagaactctgacccacattaaagaccagaagggagggcttcattccttacaggaaatcagggtatgtgagatccacgaggactcttccacccgcggctcccgccatttctattatgacggcgaactttttctctcgcaaaatctggagactcaagagagcaccgtccctcagtcatctagggcccaaacacttgcaatgaatgttacaaatttttggaaggaggacgccatgaagacaaagacgcattaccgagcgatgcaggctgactgcctgcagaagctccagagatatctgaagtccggcgtggccattagacgcacagtgcccccaatggtcaatgtcacatgttccgaagtctccgaaggaaacatcactgtgacttgtcgcgcctcttcattctatcctcgaaacattacacttacctggaggcaggacggagtgtctctgtctcacaatactcagcagtggggcgatgtcttaccagatggaaacggaacttaccagacctgggtagccacccgcatccgacaaggcgaggaacaacggttcacctgctatatggagcactccgggaaccatggcacacatcccgtcccgtctggtaaagccctggtgctgcagtctcaacgcacagactttccttacgtttcagccgcaatgccttgtttcgttattattattatcttgtgtgtcccttgctgcaagaagaagacgtctgcagctgagggccctgagctcgtgtccctccaggtcctggatcagcaccccgtgggcactggggaccacagggacgcagctcagctgggttttcagccacttatgtcggccacagggtcgacaggctctacggaaggagcctag

SEQ ID NO: 195052 - DNA, 1023 bp, synthetic construct
  misc_feature 1..1023: note = Description of Artificial Sequence: Synthetic coding sequence
  source 1..1023: mol_type = other DNA
atgggcctgggccgggtgctgctgttcctggccgtggccttcccctttgctcctccagctgctgccgcagagccgcatagcctgcggtacaacctcatggtgctgagccaggacggctccgtgcagagcggcttcctggctgagggccacctggacggtcaaccctttttgagatatgaccgccagaaacggcgagctaagccgcagggccagtgggccgaggacgtcctgggcgcagaaacctgggatactgaaactgaggatctgacggagaatgggcaggacctgaggaggacacttacccacatcaaggaccaaaagggagtgccgcaatcttcccgtgcacagacgctggcaatgaacgtcacaaatttttggaaagaggatgcaatgaagaccaagacacattaccgcgcaatgcaagccgactgtctgcagaaactccaacgatacctcaaatcaggagtggctatacgacgtacggtgccacccatggtcaacgtgacttgctctgaggtgtcggagggaaatatcaccgtgacttgtagagcttcctccttttatccgcggaacatcacattgacttggagacaggacggcgtctccctgtctcacaacactcaacagtggggcgatgtgcttcccgacggcaacggaacgtatcaaacttgggttgccactcgcatcaggcagggtgaggaacagcggtttacgtgttacatggaacactccggaaaccatgggacccaccctgtgccatctggaaaggccctggtgctccagtctcagcgcacagatttcccttatgtctctgctgccatgccatgctttgtcattatcataatcctttgtgtaccgtgttgtaagaagaaaactagcgctgctgagggccctgagctggtgtcattacaggtgctggatcagcacccagtgggtactggcgaccatagagatgctgcgcagctcggctttcaaccactcatgtcagcgaccggaagcaccgggagtacggaaggtgcatag

SEQ ID NO: 195053 - DNA, 1152 bp, synthetic construct
  misc_feature 1..1152: note = Description of Artificial Sequence: Synthetic coding sequence
  source 1..1152: mol_type = other DNA
atgggcctgggccgggtgctgctgttcctggccgtggccttccccttcgccccccctgcagcggccgccgaaccccactcactgcggtacaacctcatggttctgagtcaggacggctccgttcagtcaggtttcctggcagaagggcatctggatggacagcctttcctccgttatgaccggcagaagcggcgcgctaagccgcaaggacaatgggcagaggacgtcctgggagccgaaacttgggacactgaaactgaagatctcacagagaatgggcaggacttgagaaggacactgacgcacatcaaggatcagaaaggaggtctccactctctccaggagattcgagtgtgtgagatacatgaagatagctcgacccggggcagccggcacttctattataatggcgagctgtttctctcccaaaacctggaaacccaggagagcaccgtgccgcagtctagtcgcgctcagacactggccatgaatgtcactaacttctggaaggaagacgctatgaagacaaagacgcactaccgcgccatgcaagccgattgcctccaaaagctgcagagatacctcaaaagtggcgttgctatcaggcgtacagtccctccaatggtcaacgtgacctgttccgaggtctcagaagggaacatcacagtgacttgtagggcctcttccttctaccctaggaacatcaccctgacctggcgacaagacggcgtttctctctcgcacaacacacagcagtggggtgacgtgctccccgacggaaatggcacatatcagacctgggtggctacacggatacgccagggagaagaacagaggttcacctgttatatggagcattccgggaaccatggcactcatccagtccctagtggtaaagccctggtattacaaagccaaaggacagacttcccttacgtctcagcagccatgccgtgcttcgtgattatcattatcttgtgcgttccatgctgcaagaagaaaacttccgccgccgaagggccagagctggttagcctacaggtgctggatcagcacccggtcggaaccggggatcaccgggatgctgcccagctcggatttcaaccactcatgagcgctacagggagtactggaagcacagagggcgcttag

SEQ ID NO: 195054 - DNA, 1023 bp, synthetic construct
  misc_feature 1..1023: note = Description of Artificial Sequence: Synthetic coding sequence
  source 1..1023: mol_type = other DNA
atgggcctgggccgggtgctgctgttcctggccgtggccttcccctttgcaccccccgcagctgccgccgaaccacatagtttaaggtacaatctcatggttctgagccaggacggcagtgtgcagagcggctttctggcggagggccatttggatgggcaaccatttttgagatacgatcggcaaaaacgaagggcaaaaccccagggccagtgggcagaggacgtacttggagcgaagacgtgggacacagaaactgaagacctaaccgaaaatggtcaggacttgcgacgaacccttacgcatataaaagatcaaaaaggcgtgccccagagcagcagagctcaaaccctcgccatgaatgttaccaatttttggaaggaggacgccatgaaaaccaaaacacactacagagctatgcaggccgactgccttcaaaagctccagaggtacctcaaaagtggtgttgcgatccgccgcacggtaccgccaatggttaacgtaatttgcagcgaggtgtcagagggaaatattacggtcacatgccgcgcctcaagcttttacccgagaaatatcactttgacctggagacaagacggggtctccctgtcacataatacccagcagtggggcgacgttctccctgatgggaacggcacctaccagacttgggtggcaacaaggatacgtcagggcgaagagcagcgtttcacctgttatatggaacacagtggcaatcacggcacgcatccagttccttccggcaaagccttggtgttacaatcacagcgcacagactttccgtatgtgagcgctgcaatgccctgtttcgttattatcatcatcctctgcgttccctgttgcaagaagaaaacttcagccgccgagggtccagaacttgtgtctcttcaagtcctcgatcagcaccccgtggggacaggcgatcatcgagacgccgcgcagctggggtttcagccacttatgtctgctactggctcaactggaagcactgaggggacctag

SEQ ID NO: 195055 - DNA, 1023 bp, synthetic construct
  misc_feature 1..1023: note = Description of Artificial Sequence: Synthetic coding sequence
  source 1..1023: mol_type = other DNA
atgggcctgggccgggtgctgctgttcctggccgtggccttcccctttgccccaccggcagccgcagctgagccgcacagcctgcgttacaatctgatggtgctaagtcaggacggttcggtgcagagcggattcttggcagaaggtcatctcgacggccagccattcctcaggtacgacaggcagaagaggcgggccaagccccaaggccagtgggctgaggatgtcttaggcgccgagacatgggataccgagacggaagacctcaccgaaaacgggcaggaccttaggcggacactgacgcatatcaaggaccagaaaggcgtaccccagtcctcgcgagcccagaccctggcgatgaacgtgacaaacttttggaaggaggacgcaatgaagacaaaaacacactacagggcaatgcaggctgactgtcttcagaaactgcagcgttatctgaagagtggcgttgcaattcgtcgcaccgtacctcccatggtgaacgtaacatgcagcgaagtgagcgaggggaacattactgtcacatgcagagctagcagcttttacccaagaaacatcacccttacctggagacaggacggagtttccctaagccacaatacacaacagtggggggatgtgcttcccgatggcaatggtacttaccagacttgggtggccactcgaatccggcagggtgaagaacagaggtttacctgctacatggagcatagcggaaaccatgggacgcacccagttccatccggcaaggctttagtcctccaaagtcagaggaccgactttccatacgttagtgccgcaatgccctgttttgttatcatcatcatactgtgtgtcccgtgctgcaagaaaaaaacttctgccgcagagggtcctgagctcgtaagcctgcaagtgttagatcagcaccccgtggggactggtgatcatcgtgacgctgcacagcttgggttccagcccctgatgtccgctacaggttcaacagggagtacagaaggtgcctag

SEQ ID NO: 195056 - DNA, 1023 bp, synthetic construct
  misc_feature 1..1023: note = Description of Artificial Sequence: Synthetic coding sequence
  source 1..1023: mol_type = other DNA
atgggcctgggccgggtgctgctgttcctggccgtggccttccccttcgccccccccgcagcagccgcagaaccccactctctccgttacaatttaatggtcctgtcccaggatgggtctgttcagagcgggtttcttgcagaaggacatctggacggacaaccatttcttagatacgaccgacaaaagagaagagccaaaccacagggacagtgggcagagaatgtcctcggcgccaagacatgggatactgagacagaggacttgaccgagaacggacaagatctgcgtaggactttgacgcacattaaggatcagaaaggggtcccccagagttcaagggcccagacgctagccatgaatgtcacgaatttctggaaagaggatgcaatgaagaccaagacccattatcgcgcaatgcaggccgactgcctgcagaagttacagcggtatctcaagtctggcgtcgccataagacgcaccgtgccccccatggtgaacgtaacctgctcagaggtgtcggagggaaatataacggtgacctgcagggcctcgtctttttatcctagaaacataactctcacatggcgtcaggatggcgtaagcctgtcacacaatacacaacagtggggcgatgtactgcctgatggcaatgggacatatcaaacctgggtggcaacaagaatcagacaaggtgaggagcaacggttcacttgctacatggagcattctggaaatcacgggacgcacccggtcccctccgggaaggctctcgttttgcagtcccagagaacggacttcccgtacgtcagcgctgccatgccttgttttgtgataatcataatcctgtgcgtgccatgttgcaaaaagaaaacctccgcagcagaaggcccagagctggtgtcactccaagtcctagaccagcatcccgttggcaccggtgatcacagagatgccgcccagcttggttttcaaccacttatgtctgcaaccggatccactggtagtaccgaaggtacttag

SEQ ID NO: 195057 - DNA, 1152 bp, synthetic construct
  misc_feature 1..1152: note = Description of Artificial Sequence: Synthetic coding sequence
  source 1..1152: mol_type = other DNA
atgggcctgggccgggtgctgctgttcctggccgtggccttcccctttgcgcccccagccgcggcggccgaaccccattccctccgttataatctcatggtgctgagccaggacggaagcgtacagagtggttttcttgctgagggccacctggatggtcagcctttcctacgctatgatcggcagaaacgtcgagcaaagccacagggacagtgggccgaggacgtactgggagccaagacatgggacaccgagaccgaggacttgaccgagaacggtcaggacctgcgtcgcacactcacccatatcaaggaccagaagggaggccttcactcactacaggaaatccgggtttgcgaaatccatgaggacagcagcactaggggatcccgccacttttactacgatggcgaattgtttttgagccagaacctggaaactcaggaaagtaccgttccacagtctagcagagcacagacattggcaatgaacgtgacaaacttctggaaggaggatgctatgaaaaccaagacccattatcgggccatgcaggctgactgcttgcagaaactgcagcggtacctgaagagcggtgtcgccatacgtcgcacggtgcctcccatggtcaatgtcacatgcagcgaagtctccgagggcaacataaccgtaacctgtcgagcaagttcattctacccacggaacattaccctgacctggcggcaggacggtgtgtctcttagtcacaatacacagcagtggggcgacgtacttcctgacggtaatggaacataccagacttgggtggccactcgaattcgtcaaggcgaagaacagagattcacttgctacatggaacactcaggcaaccatggaacgcaccctgttccgtccgggaaagccctcgtgctacaatcgcagcgcaccgactttccctacgtatctgccgccatgccctgttttgtgattatcataatcctgtgcgtgccatgttgtaagaagaagacctcagcggccgaggggcctgagctagtttcattacaggtgttagaccagcacccggtaggaactggagatcacagggacgctgcgcagctgggcttccaacctttaatgtctgctacaggatcaactggatccaccgaaggggcctag

SEQ ID NO: 195058 - DNA, 1152 bp, synthetic construct
  misc_feature 1..1152: note = Description of Artificial Sequence: Synthetic coding sequence
  source 1..1152: mol_type = other DNA
atgggcctgggccgggtgctgctgttcctggccgtggccttcccctttgcccccccagctgcagccgcagaaccccattcacttagatacaatctcatggtgctgtcacaggacggctcagttcagagcggctttttggcagaggggcacctggacgggcaacccttcctccggtatgatcgccaaaagagaagagccaagcctcagggtcagtgggctgagaatgtgttgggggccaagacatgggatacggaaacggaagacctgacagagaacgggcaggacctccgcaggactctgactcacatcaaagatcaaaagggggggctccactctctgcaggagattcgggtctgcgagattcacgaagacagcagtacacgcgggagccggcatttttattatgacggtgagctttttctcagccagaatctagaaacacaggagtccaccgtgcctcagagctccagggctcagactctagctatgaacgtgactaatttctggaaggaggacgcaatgaaaaccaaaacccactatcgggcaatgcaggcagactgtctgcagaagctacagaggtatcttaaatccggcgtcgctatccggagaaccgtaccacctatggtcaacgtcacgtgcagcgaagttagtgagggcaacattactgtgacctgcagggcttcgagcttctatccgagaaatataaccctgacctggaggcaggacggggtttcactgtctcacaacacacagcagtggggcgatgtgctacctgacggaaacgggacctaccaaacatgggtggctaccaggattcgccagggcgaagaacagcggtttacatgctatatggagcattccggtaatcacggtacacaccccgtgccatccggcaaagcgctagtgctacaaagccagaggacggattttccctacgtgtccgcagccatgccctgcttcgtgatcataatcattttgtgtgtaccctgctgcaagaaaaagacatcagccgccgaaggtcctgagcttgtgtctttacaggtgttggatcaacatccggttggaaccggagatcaccgcgatgccgcccagctgggcttccagccattaatgtccgccaccggatcgaccggcagtactgagggcacttag

SEQ ID NO: 195059 - DNA, 1023 bp, synthetic construct
  misc_feature 1..1023: note = Description of Artificial Sequence: Synthetic coding sequence
  source 1..1023: mol_type = other DNA
atgggcctgggccgggtgctgctgttcctggccgtggccttcccctttgcgccacccgctgccgccgctgaacctcattctctgcgctacaacctgatggtgctgtctcaagatggttcagtacagagcggtttcctcgctgaaggccatctggacggacaacccttcctcagatatgatcgccagaagcgaagagccaagccgcagggtcagtgggctgaggacgtgctcggagccaaaacctgggatactgaaacggaagatctaacagaaaatgggcaagatctgcggaggaccttgacgcatatcaaggatcagaagggggtgccgcagtcctcccgggcccaaacgctggccatgaatgtcaccaacttttggaaggaagacgctatgaagactaaaacccactacagggcaatgcaagcagattgcctccagaaactgcagcgatatctcaagtctggagtggcaataaggagaaccgtgccacccatggtaaacgtcacctgttctgaagtgagcgaggggaacatcaccgttacttgccgagcctcttcattctatccccgaaacattacactgacgtggcggcaggatggggttagcctgtcgcacaatactcaacagtggggagacgtcttgccagatgggaatggcacttatcagacctgggtcgctacaaggatcagacaaggcgaggaacagcgctttacatgctacatggaacacagcgggaatcacgggacacatccagtgccctccggtaaagcactggtgctccagagccagaggaccgacttcccatacgtgtcagcagccatgccttgctttgtgattatcatcatcctctgcgtgccatgctgcaaaaaaaagacttccgcagcagaaggtcccgaactcgtatctctgcaggtgctcgaccaacaccccgtgggaacaggggaccaccgtgatgccgcacagttaggttttcagccactgatgtccgctaccggtagcaccggatcgacggagggcgcgtag

SEQ ID NO: 195060 - DNA, 954 bp, synthetic construct
  misc_feature 1..954: note = Description of Artificial Sequence: Synthetic coding sequence
  source 1..954: mol_type = other DNA
tgaccccacagcctgcggtacaacctgatggtgctgagccaggacgggtccgtgcagagcgggttcctcgctgaagggcacctagacggccagccgttcttgcggtacgatagacaaaaaagacgagcaaagccacagggccagtgggcggaagatgttctgggcgctaagacttgggacaccgagacggaagacctgactgaaaatggacaagatctgagacggactttgacccacattaaggaccaaaagggagtgccccagagtagcagagcacaaaccctagccatgaacgttacaaatttctggaaggaggatgcgatgaagacgaagacccactatagggccatgcaggcagattgtttgcaaaagcttcagagatacctgaaaagtggggtggcgatccgccggaccgtcccaccaatggtcaacgtgacttgttctgaggtgtcagagggaaatatcacggtgacttgtcgggcaagctccttctatcctcggaatataacactgacatggcggcaggacggagtgtccttatcccataatacacagcagtggggagacgttttgcccgatggcaacggcacgtaccagacatgggtcgcgacacgtatacgccagggcgaagagcaacgcttcacttgctacatggagcattccgggaatcacggaactcatcccgtgccatccggtaaagctttagtgttgcagtctcagcggacagattttccctatgtctctgccgcaatgccatgcttcgtgataattatcatcctctgcgtgccttgctgcaaaaaaaagacctctgctgcggagggccccgagctggtctctttacaagttctagaccaacatcctgtgggaactggggaccacagggatgctgctcagttaggctttcagccactgatgagtgccaccggttcgacaggatccactgagggcgcctag

SEQ ID NO: 195061 - DNA, 1152 bp, synthetic construct
  misc_feature 1..1152: note = Description of Artificial Sequence: Synthetic coding sequence
  source 1..1152: mol_type = other DNA
atgggcctgggccgggtgctgctgttcctggccgtggccttccccttcgctcccccagccgccgctgcggagcctcattctttgcgctacaatctgatggtgttgagccaggacggtagcgtccaatctgggttcctggcggaaggccacttagacggccaacccttcttaagatatgacaggcagaaaagacgagctaaaccacagggccaatgggccgaggacgtcctgggcgccgagacctgggacaccgagaccgaagacctcaccgaaaatggccaggaccttcggcgcactctaactcatatcaaagatcaaaagggggggttgcattctttacaggaaattcgggtgtgcgaaatgcacgaagatagctctacacgaggtagtaggcacttctattataacggcgagctcttcctgagccagaacctggaaactcaggaatccacagtgcctcagagttcaagggcccagacactggctatgaacgtcacaaacttctggaaggaagatgctatgaaaaccaagacccactatagggcaatgcaagctgattgtttgcagaagctgcagcgttacttgaaaagcggcgtggctattaggcgaactgtgccccccatggtaaatgtgacttgtagcgaggtgtccgagggaaacataactgtgacatgtcgcgcgagcagtttttatccccggaacataaccctaacgtggcgacaggacggggtatctctctcacacaatacccaacagtggggtgacgtgctgcctgatggaaatggaacatatcagacctgggtggcaaccaggatccgccagggagaggaacagcgctttacatgctatatggaacactccgggaaccatggaacccatcctgttcccagtggaaaagctctcgtgttgcagtctcagagaactgacttcccttatgtctctgcggcaatgccgtgctttgtgatcattatcatcctttgtgtgccttgctgcaagaaaaaaaccagtgctgccgagggtcctgagttagtcagcctgcaggtcctggaccagcacccggtgggaactggtgaccatagggacgctgcacaactcgggttccaaccactgatgtccgccaccggttctacaggatcaacagagggcgcttag

SEQ ID NO: 195062 - DNA, 1056 bp, synthetic construct
  misc_feature 1..1056: note = Description of Artificial Sequence: Synthetic coding sequence
  source 1..1056: mol_type = other DNA
atggtgctgagccaggacggcagcgtgcagagcggcttcctggccgagggccacttagatgggcaacctttccttcgatatgatcggcagaagagacgtgcaaagccacagggacaatgggccgagaacgtcctaggtgctaaaacgtgggacacagagaccgaagacctcacagaaaacggacaggatttaagaagaacattaacacatattaaagaccagaagggcgggttgcacagcctgcaggagattagagtatgcgaaattcatgaggacagttctactcgcggatcaaggcatttttattatgacggcgaattgttcctcagtcagaacctagaaactcaggaaagtacagtgccccaatcctctagggcacagactctggcgatgaatgtcactaatttttggaaggaggacgctatgaaaacaaagacccactacagggccatgcaggccgactgtcttcagaaactgcagcgctacctcaagagtggagttgctatcaggcgaactgtgcctcccatggtgaatgtcacatgttcagaagtgtctgagggtaatattaccgtcacctgcagggcatcttcattttaccctaggaacattactttgacctggcgacaggatggggtgagtctgtcacataacactcagcaatggggcgacgtcctgcccgacggcaacggaacgtatcaaacctgggtggccacgcggatcaggcagggagaagaacaaagatttacctgttatatggagcattctgggaaccacggcacccaccccgtgccttccggcaaagccctggtgttgcagtcgcaacgaaccgatttcccatatgtctctgccgccatgccatgcttcgttatcatcatcattctctgcgtcccatgttgcaagaaaaagacctctgcagccgaaggcccagaactcgtgagcctccaggtgctggaccaacatccggttgggaccggggaccatcgagatgcagcacaactcggatttcagcccctcatgagcgccacgggttcgactggcagcaccgagggtacctag

SEQ ID NO: 195063 - DNA, 126 bp, synthetic construct
  misc_feature 1..126: note = Description of Artificial Sequence: Synthetic coding sequence
  source 1..126: mol_type = other DNA
atgggcctgggccgggtgctgctgttcctggccgtggccttcccctttgccccacccgccgccgccgccgtggaaatgggctttcatcgcgtatctcaggatgggctagatctgcttacaagctag

SEQ ID NO: 195064 - DNA, 126 bp, synthetic construct
  misc_feature 1..126: note = Description of Artificial Sequence: Synthetic coding sequence
  source 1..126: mol_type = other DNA
atgggcctgggccgggtgctgctgttcctggccgtggccttccccttcgcgcctccagccgccgcagctgtcgagatgggctttcatcgtgtatctcaggacggtttggatctgttgacctcctag

SEQ ID NO: 195065 - DNA, 1056 bp, synthetic construct
  misc_feature 1..1056: note = Description of Artificial Sequence: Synthetic coding sequence
  source 1..1056: mol_type = other DNA
atggtgctgagccaggacggcagcgtgcagagcggcttcctggccgagggccacctagacggtcagccattcctacggtacgatcgacagaagcggagagccaaacctcaaggccagtgggcagaagatgtgctcggggctgagacctgggacaccgagacagaagaccttactgagaatggacaagacctaagacggacactgactcacatcaaggatcaaaagggcgggctacactcattgcaggagattagggtgtgcgagatgcatgaagatagttccaccagaggctctcgacatttctactataatggagagctgtttctctctcagaatctggagacccaggaaagcacagtaccgcaatcttccagggcacaaactctggctatgaacgtcaccaatttctggaaagaggatgcgatgaagaccaaaacacactatcgcgccatgcaggccgactgcctgcagaagctccagcgctatctgaagtcaggggtggccatccgccgtactgtcccccctatggtgaacgtcacttgtagcgaggtgtccgagggcaatattaccgtgacgtgccgggcatccagcttttacccaagaaatattacgctgacatggcgccaagatggcgtcagtctgagccacaacacccagcagtggggcgacgtgctccccgacggaaatggtacttatcagacgtgggtggcaacacggataaggcaaggcgaggagcaacgatttacctgctatatggagcacagcggaaatcacggaacccacccagtgccaagcggcaaagctctcgttctgcagtcccagagaacagactttccctatgtgtctgcagcgatgccttgtttcgtcattatcatcatattgtgtgtgccctgttgtaaaaagaaaacatcagccgcagagggacctgagctcgtgtctctccaggtgctggatcagcacccagtgggaaccggagaccaccgcgatgccgcacaactgggcttccagcctttgatgagtgccacgggcagtacaggcagcactgaaggagcatag

SEQ ID NO: 195066 - DNA, 1056 bp, synthetic construct
  misc_feature 1..1056: note = Description of Artificial Sequence: Synthetic coding sequence
  source 1..1056: mol_type = other DNA
atggtgctgagccaggacggcagcgtgcagagcggcttcctggccgaggggcatctggatggccagcctttcctgcgctatgaccgacagaagcggcgagccaaacctcagggtcagtgggcggaggatgtgctcggagccaaaacctgggacaccgaaacggaagatctcaccgagaacggccaggatctgcgccgaacgctaacccacattaaggaccagaaagggggattacatagtctgcaggagatccgcgtgtgcgaaatacatgaggactcctccacaagaggaagtagacacttctactatgacggcgagttatttctgagccagaatctcgaaacccaggagagtaccgtcccacagtcttctagagcccagactctcgctatgaatgtgacaaacttttggaaagaggatgctatgaaaaccaagacacattacagggccatgcaggccgactgtctacaaaagctgcagagatacctgaagagcggagtggctataagacgaacagtcccacccatggtcaatgtgatatgcagcgaggtgagcgaaggtaatatcacagtgacctgccgcgcatccagcttttacccaaggaacatcactctaacttggcgacaagatggggtttcccttagccataacactcagcaatggggcgacgtgctgcccgacggcaatggcacctatcaaacatgggtagctacacggattagacagggcgaggaacaacggtttacatgctatatggaacattctggaaaccacggcacccacccagtcccaagcggcaaagccctggtgcttcaatcccagcggaccgatttcccttatgtgtctgcggccatgccttgcttcgtgatcattattattctgtgtgtgccctgctgcaaaaagaagacttccgcagcagagggtcccgagctggtctcactgcaggttttggaccaacatcccgtcggtactggagatcatcgggatgcggctcaattgggcttccagccccttatgagtgccacaggctccaccgggtcaaccgagggtacctag

SEQ ID NO: 195067 - DNA, 126 bp, synthetic construct
  misc_feature 1..126: note = Description of Artificial Sequence: Synthetic coding sequence
  source 1..126: mol_type = other DNA
atgggcctgggccgggtgctgctgttcctggccgtggccttcccctttgcccccccagcagccgctgccgtagagatgggtttccaccgggtcagccaggatggtttggatctacttacatcttag

SEQ ID NO: 195068 - DNA, 126 bp, synthetic construct
  misc_feature 1..126: note = Description of Artificial Sequence: Synthetic coding sequence
  source 1..126: mol_type = other DNA
atgggcctgggccgggtgctgctgttcctggccgtggccttcccctttgcaccccctgctgccgctgccgtcgagatggggttccaccgcgtttcccaggatggactcgacctcctcactagctag

SEQ ID NO: 195069 - DNA, 1056 bp, synthetic construct
  misc_feature 1..1056: note = Description of Artificial Sequence: Synthetic coding sequence
  source 1..1056: mol_type = other DNA
atggtgctgagccaggacggcagcgtgcagagcggcttcctggccgaggggcacctcgacgggcagccctttctgcggtatgatcgccagaaaagacgagccaaaccacagggacagtgggcggaaaatgtcctgggcgcgaaaacgtgggatacagaaaccgaagatctgacggagaacggccaggacttgcgacgtactttgacccacattaaggaccagaagggaggactgcatagcctacaggaaatccgcgtgtgcgagatccacgaagactccagcaccaggggtagtcgtcatttttattacgatggcgagctgtttctatcacagaatctggaaacccaagagagtactgtgccacagtccagccgagcacagaccctggccatgaatgttactaacttttggaaggaagacgcgatgaagacaaagacccactaccgtgcaatgcaggctgattgccttcagaagttacagaggtacttgaaaagtggagtggcgattaggagaactgtgccccctatggtgaacgtgacatgttctgaagtttccgaagggaacatcacagtcacctgccgggcctcgagcttctaccccaggaatattacacttacatggcggcaggacggagtttcattaagtcataatactcagcagtggggtgacgtgttgccggatggcaacggaacctaccagacttgggtggcaacccggatccgccaaggagaagagcaaagatttacctgctatatggagcattctgggaaccacggaacacacccggtcccaagtggcaaagctttagtcctccagagccagcgtactgattttccatatgtaagcgccgcgatgccatgttttgtaatcatcatcatcttgtgcgtgccttgctgcaaaaagaagacatccgcagctgaagggcctgagctggtttcacttcaagtcctggaccaacatcctgttggcactggcgatcaccgggatgctgcacagttgggcttccagcccctgatgtccgctactggttcgactggttcgaccgaggggacttag

SEQ ID NO: 195070 - DNA, 126 bp, synthetic construct
  misc_feature 1..126: note = Description of Artificial Sequence: Synthetic coding sequence
  source 1..126: mol_type = other DNA
atgggcctgggccgggtgctgctgttcctggccgtggccttccccttcgcacctcctgcagctgctgctgtcgagatgggattccatcgcgtttcacaagatgggctagatctgctcacatcctag

SEQ ID NO: 195071 - DNA, 126 bp, synthetic construct
  misc_feature 1..126: note = Description of Artificial Sequence: Synthetic coding sequence
  source 1..126: mol_type = other DNA
atgggcctgggccgggtgctgctgttcctggccgtggccttcccctttgccccccccgcagctgccgccgtggaaatgggtttccatcgcgtatcccaggacgggttggacctgctcacgtcctag

SEQ ID NO: 195072 - DNA, 1056 bp, synthetic construct
  misc_feature 1..1056: note = Description of Artificial Sequence: Synthetic coding sequence
  source 1..1056: mol_type = other DNA
atggtgctgagccaggacggcagcgtgcagagcggcttcctggccgaaggacacttagatgggcagccttttctgcggtacgatagacaaaagagacgcgccaaacctcagggccagtgggcagaggatgtgctcggagccgagacatgggataccgagactgaggacctgaccgagaacgggcaggacttgcgaagaactctgacccacataaaagaccaaaagggggggctgcatagccttcaggaaattcgtgtgtgtgagattcatgaagacagtagcactcgcggttcccgccacttctactataacggcgagctgttcctgagccagaacctcgagacccaggaaagcacagtgccccagtcttcccgggcacagactttagctatgaatgtgactaatttctggaaggaggatgccatgaaaaccaagactcactatcgggccatgcaggccgactgcctccagaaactgcagaggtacctaaaatccggggtcgctatccggaggactgtgcctccaatggtgaatgtgacctgcagcgaggtgtccgagggcaacatcacagtcacctgcagagcctcctctttttatcctcgtaatattaccctcacctggagacaggatggagtgagcctgagccataacactcagcagtggggtgacgtactgcctgatggaaacggcacatatcaaacgtgggtggctacacgcattcggcaaggtgaagaacagcggttcacgtgttacatggaacatagcggaaaccacggcactcacccagtgcccagtggcaaggccctggtacttcagtcacagcgtactgattttccctatgtgagtgcagctatgccctgttttgtcatcatcataatattatgcgtgccttgttgcaaaaagaagacctcagctgcagaggggcctgagcttgtgtccctccaggtcctggatcagcatccagttggcacgggagaccacagagatgctgctcagctcgggttccagccgctaatgtccgctaccggcagcaccggttccaccgaaggtgcctag

SEQ ID NO: 195073 - DNA, 2088 bp, synthetic construct
  misc_feature 1..2088: note = Description of Artificial Sequence: Synthetic coding sequence
  source 1..2088: mol_type = other DNA
atgagcccccccaaggaccccagccccagcctgcccctgcccagcagttcgtcacacagtagcagccctccttctagcagctccacctcagtgagtggcaacgcgccggatggcagctctccaccccagatgacagcatccgaaccattgtctcaggtctcaaggggtcatccaagtcccccgacacctaatttcaggcgtcgcgccgttgcacagggggccccacgggaaatacccctatacctcccccaccacccgaagccagaatgggccgagtattgtctggtcagcccaggggaggatggcctttccgatccagctgagatgacaagcgacgaatgtcagcctgccgaagcccccctgggggacattgggagtaatcaccgcgatccccatccgatttggggcaaggaccgctcgtggaccggccaggaactgtcgccactagctggtgaggatcgggagaagggaagtaccggtgctcggaaagaagaagaaggcggaccagtgctggtgaaagagaagctcggtctgaaaaagctggttctgactcaagagcagaagaccatgttattagactggaatgacagcattccagaatcagtgcatctgaaagccggagagcggatctcacaaaaatccgctgaaaatgggcggggtgggcgcgtacttaagccagtgaggccgctattgcttccacgcgctgcaggggagcctctgcccactcagcgtggcgcacaggaaaagatgggcacaccggcagaacaggcacagggtgagcggaacgtaccccccccaaagtcaccacttcgtcttatcgccaacgcaatcaggaggagcctggagccgttgctgtctaacagtgagggaggcaaaaaggcttgggctaaacaggaaagtaaaacacttcccgcccaggcatgcactcggtccttttccctgcgcaaaaccaactccaataaggacggcgaccagcacagtccaggccgcaaccagagctcggccttctcccctccagacccggcgctgaggacacactccttacccaatcgcccgagcaaggtgtttcccgcgcttaggagtcctccatgctccaagattgaggatgtgccaacattgctggaaaaagtttctttacaagaaaatttccccgacgcctccaagccaccaaaaaaaaggatatctctgttttcaagtctgagactgaaggacaaaagctttgagtcatttctgcaggaatccaggcagcggaaagatattagggacctgttcggcagccccaagagaaaggttttgccagaggactctgcacaggcgctagagaagctgctgcagccattcaagagcacatcactgagacaggccgccccgccgccgccacccccgcctccacctcctccgcctccccccacggcggggggtgcagattccaaaaattttcctctgagagcccaggtaaccgaagccagctcatctgcctcttctactagctctagctctgccgatgaggagttcgatccccagctttctctccagctcaaagaaaagaagacattgcgccgtagaaagaaactcgaaaaagcgatgaagcagctcgtgaaacaggaggagctgaagaggttatacaaggcgcaagcgatccaaagacaactcgaagaagtggaggagcgacagcgagcctctgagattcagggggttcggctggaaaaggccctgcgaggtgaggctgacagtggcacccaggacgaagcccagttgctgcaggaatggttcaagctggtcctggagaagaataaactaatgaggtatgagagcgaattgctgattatggcacaggagctggaactggaggatcaccaatctaggctggaacagaagttgcgcgaaaagatgctcaaagaagaaagtcagaaggatgagaaggatcttaacgaggagcaggaggtgttcaccgagctaatgcaggtgatagagcagcgcgacaagttggtcgactccctggaggagcagagaatcagagagaaagccgaggaccaacactttgaatctttcgttttttctaggggttgccagctctcgaggacttag

SEQ ID NO: 195074 - DNA, 90 bp, synthetic construct
  misc_feature 1..90: note = Description of Artificial Sequence: Synthetic coding sequence
  source 1..90: mol_type = other DNA
atgagcccccccaaggaccccagccccagcctgcccctgcccagcagctcttctcactcttcttctcctccctcctcgagtagcacatag

SEQ ID NO: 195075 - DNA, 522 bp, synthetic construct
  misc_feature 1..522: note = Description of Artificial Sequence: Synthetic coding sequence
  source 1..522: mol_type = other DNA
atgagcctgctgggccccaaggtgctgctgttcctggccgccttcatcattacttcagattggattcctctgggcgtgaacagccaaaggggagatgatgtaacccaggctactcctgaaaccttcaccgaggatccaaaccttgtgaatgaccctgctaccgacgagaccgttctggctgtgctcgctgatattgccccatcaactgacgatctggccagtctgagtgaaaaaaacaccacagctgaatgctgggacgagaaattcacttgtacgcgactgtactctgtccatcgccccgtgaaacaatgcattcatcaactctgttttactagcctccggcggatgtacatcgtgaacaaagaaatatgtagcagacttgtctgtaaggaacatgaggcaatgaaggacgaattatgtagacagatggccggactcccaccgcggcgccttcgacgcagcaattacttccgtctgcccccgtgtgaaaatgtggacctgcagagacccaacggcctctag

SEQ ID NO: 195076 - DNA, 492 bp, synthetic construct
  misc_feature 1..492: note = Description of Artificial Sequence: Synthetic coding sequence
  source 1..492: mol_type = other DNA
atgagcctgctgggccccaaggtgctgctgttcctggccgccttcataataacctccgattggatccctctgggtgtcaactcccagcgcggcgacgacgtcacacaagccaccccagaaacttttacagaagatcctaacctggtaaatgacccggcaaccgatgaaactgtcctagctgtattagctgacatcgctccatctacagatgacctggagtgctgggacgaaaaatttacatgtactcggctctactcagtccatcgaccagttaagcagtgtattcatcagctctgtttcacatccctgcgccggatgtatatcgtcaacaaggagatttgttcccggttggtctgtaaggaacacgaggctatgaaagacgaactgtgtcgccagatggcagggctgccgcctagacgtttgaggcggtctaactactttaggctgcccccctgcgaaaacgtggacttacagaggcctaatggtctctag

SEQ ID NO: 195077 - DNA, 447 bp, synthetic construct
  misc_feature 1..447: note = Description of Artificial Sequence: Synthetic coding sequence
  source 1..447: mol_type = other DNA
atgagcctgctgggccccaaggtgctgctgttcctggccgccttcatcatcaccagcgattggattcctctgggagtgaactctcagcgcggcgacgacgtgacacaagcaacacccgagacctttacagaggatcctaacctcgttaacgaccctgccactgacgaaacagaatgctgggacgaaaagtttacctgcactcgattatacagcgtacacaggcccgtaaagcagtgcatccaccagttgtgtttcaccagccttagaaggatgtacatcgtgaacaaagagatttgcagccgcctggtctgtaaggaacatgaggccatgaaagatgagttgtgcagacagatggctggtttgccaccaaggcgcttgcgacgttcaaactactttcgcctgccaccgtgtgagaatgttgatctccagaggcccaacgggttgtag

SEQ ID NO: 195078 - DNA, 492 bp, synthetic construct
  misc_feature 1..492: note = Description of Artificial Sequence: Synthetic coding sequence
  source 1..492: mol_type = other DNA
atgagcctgctgggccccaaggtgctgctgttcctggccgccttcattattaccagcgattggattccactgggtgtgaacagtcagcggggtgacgacgtgacccaggccaccccagagactttcacagaagaccccaatctcgttaacgaccccgctaccgatgagaccgttctagcggtcctggccgacattgcacccagcacggatgacttagaatgttgggacgagaaatttacatgtactcggctgtacagcgttcaccggcccgtcaagcagtgcattcaccaactctgctttacctccttgcggcgcatgtacatcgtgaacaaggagatctgcagccggttagtctgcaaagagcacgaggcaatgaaagacgaattgtgtcgtcagatggctggactgcctccacggcggctgaggcggtctaattattttcgactgccaccttgtgagaacgtggacctgcaaaggcctaacggactgtag

SEQ ID NO: 195079 - DNA, 276 bp, synthetic construct
  misc_feature 1..276: note = Description of Artificial Sequence: Synthetic coding sequence
  source 1..276: mol_type = other DNA
atgagcctgctgggccccaaggtgctgctgttcctggccgccttcataattactagtgattggatccctctcggcgtaaatagtcagaggggggacgacgtgacacaggccacccccgagacttttacagaagatcctaatctagtcaacgatcccgcgacagacgagaccgtcctggccgtgttggctgacatcgccccaagcactgatgatctagcctccctctccgaaaaaaacaccacggccgaatgttgggacgaaaagttcacatgctag

SEQ ID NO: 195080 - DNA, 1320 bp, synthetic construct
  misc_feature 1..1320: note = Description of Artificial Sequence: Synthetic coding sequence
  source 1..1320: mol_type = other DNA
atgagcgtgcccagcgccctgatgaagcagccccccatccagagcaccgctggtgctgttcctgtcagaaacgagaaaggggagataagcatggaaaaggtaaaggtgaagagatatgtgtctggcaagcggcctgactacgcccccatggagtcctccgatgaagaggacgaggaattccagtttatcaagaaggccaaggaacaggaagccgaacctgaagaacaggaagaagactccagctccgaccccagactgaggaggcttcagaacaggatctctgaagatgtcgaagagagacttgccagacaccgaaaaatcgtagagccagaggtcgtaggtgaatcggattcagaggtggagggagatgcctggcgcatggagagagaggattccagcgaagaggaagaggaggagatagatgatgaagaaatcgagcgtagacgcgggatgatgcgccagagggcccaggagaggaagaatgaagagatggaagtgatggaagtcgaagacgaaggacgctcaggcgaagagtccgagtctgagagcgagtatgaggagtacactgattccgaggacgaaatggagccacgtcttaagcccgtcttcattcgaaagaaagatcgggttactgtacaggaaagggaggccgaggccctgaagcagaaggagctcgagcaggaagccaaaagaatggcagaggaaagaagaaagtataccctgaagatcgtagaggaggaaaccaagaaggagttagaagaaaacaaacgctctttggccgcattagacgcactgaatacagatgacgaaaatgatgaggaagagtatgaagcctggaaggttagagaactgaaaagaatcaaacgtgatcgggaagaccgagaggccctggagaaagaaaaagcagagatcgagcggatgcgcaacctgaccgaggaagagagaagggccgaactgcgcgcaaatgggaaggtcattacgaataaagccgtgaaaggaaagtacaagtttctacagaagtactaccatcgcggtgccttttttatggacgaagacgaagaagtgtacaaacgcgacttcagtgcccctactctcgaggatcacttcaataagactatcttgccaaaagtgatgcaagtgaagaattttggcaggtctggcaggaccaagtatacgcatctggtggaccaggacactacttctttcgactcggcctgggggcaagagtcagcgcagaacaccaagttcttcaaacaaaaagctgctggggtccgggatgtttttgaacggccttccgccaaaaagagaaagaccacctag

SEQ ID NO: 195081 - DNA, 549 bp, synthetic construct
  misc_feature 1..549: note = Description of Artificial Sequence: Synthetic coding sequence
  source 1..549: mol_type = other DNA
atgcgggccgcctacctgttcctgctgttcctgcccggcctgctggcacaaggtcagtatgatctcgaccccctgcccccgttccctgatcacgtccaatacacccattacagcgaccagatcgataatccagactattacgattaccaagaggtgaccccacggccatctgaggaacagtttcaattccagagccaacagcaagtacagcaggaagtgatccccgcccccacacctgaaccggggaacgcagagctcgagcccaccgaaccaggacccctcgattgccgggaagaacagtatccgtgcactaggctgtactctatccacagaccctgtaaacaatgcctgaacgaggtttgcttctactctttaagacgagtatatgtcatcaacaaggaaatttgcgtgaggactgtgtgtgctcatgaggaactcttgagggccgacctctgcagagataaattcagcaagtgcggcgtgatggcatctagcgggctgtgccaaagtgtggcggcatcctgtgccaggtcatgcggttcatgttag

SEQ ID NO: 195082 - DNA, 552 bp, synthetic construct
  misc_feature 1..552: note = Description of Artificial Sequence: Synthetic coding sequence
  source 1..552: mol_type = other DNA
atgcgggccgcctacctgttcctgctgttcctgcccgccggcctgctcgctcagggccagtatgacttagacccgctccctccttttcccgaccacgtgcagtatacgcattatagcgaccaaattgataacccagattattatgattaccaggaggtgacccccagaccgagcgaggagcagtttcagtttcagtcccaacagcaggtgcagcaggaggtgatccccgcccctacccctgagccaggcaacgctgagctcgagcccaccgagccaggaccccttgattgtagagaggaacagtatccatgtacgaggttgtattctattcacagaccatgcaagcagtgcctgaatgaggtttgcttctattccctccgccgggtctatgtgataaacaaagaaatatgcgtcagaacagtttgtgcacacgaagagttgctccgagcggatctatgtcgggacaaatttagcaagtgcggggtgatggcatcctcagggctctgtcagagtgtggctgcaagctgtgcccggtcctgcggctcttgctag

SEQ ID NO: 195083 - DNA, 549 bp, synthetic construct
  misc_feature 1..549: note = Description of Artificial Sequence: Synthetic coding sequence
  source 1..549: mol_type = other DNA
atgcgggccgcctacctgttcctgctgttcctgcccggcctgctggcacaggggcaatatgatctggaccctctgccaccgttccccgatcatgtgcagtatacacattatagcgatcaaatcgataatcctgattactatgattaccaagaggtgactccgaggccgagtgaagagcagtttcagttccagagccagcaacaggttcaacaggaggttatccccgccccaacgcccgaaccaggcaacgcggaactcgaacccaccgagcctggccctttagattgtcgagaagagcagtacccttgtacacgactttatagcattcataggccttgtaaacaatgcctgaatgaagtgtgcttttatagcctcaggcgcgtgtatgtgattaacaaggagatctgcgttcggaccgtttgcgcacatgaagaattattgcgcgccgacctttgcagagacaagttctctaaatgtggcgtgatggcttcctccggtctctgccagtccgtggccgcctcatgcgctcggtcatgtggaagttgttag

SEQ ID NO: 195084 - DNA, 1089 bp, synthetic construct
  misc_feature 1..1089: note = Description of Artificial Sequence: Synthetic coding sequence
  source 1..1089: mol_type = other DNA
atgaagctgcactgctgcctgttcaccctggtggccagcatcatcgtgcccgcggctttcgtgctggaggatgtggattttgaccagatggtgtctctcgaagctaaccgcagttcctataacgcctcttttccttccagcttcgaactctccgcgtcatcacattcagatgacgatgtcattattgccaaggagggaactagtgtgagcatcgagtgcttgctaaccgcctcccactacgaggacgtacactggcataacagtaaaggtcaacagctcgatggccgctctcggggaggaaagtggctggtttctgataactttcttaatatcacaaacgtggcctttgacgatcggggcctttatacttgcttcgtgaccagcccaatcagagcttcttactccgtgacactgcgcgttatatttacatccggcgacatgagcgtgtactatatgatcgtctgtctgattgcctttacaattactttgattctgaacgttactcgtctgtgcatgatgtctagccatctgagaaaaacagagaaggctatcaatgaattctttcggacggaaggtgccgaaaaactgcagaaggcatttgagatagccaagaggatccccatcataacatcagcgaagactcttgaactggctaaggtcacacagtttaaaaccatggaatttgcccgttacatagaggagctggctcgttccgttcctctgccgccactcatcttgaactgtcgtgctttcgttgaagaaatgtttgaggcggtaagagttgatgaccctgacgacttaggagaacggattaaggagaggccagcccttaatgctcaaggcgggatttacgtgataaatcctgagatgggaagatccaattctcccggtggtgatagcgatgatggctccttgaatgagcaaggacaggaaatcgcagtccaggtctcagtccacctccagtctgagaccaagagcatcgacacagagtcccagggttcatctcatttttcccctcccgatgatattggcagcgcagagtctaactgtaactacaaagacggggcatacgagaattgccagttatag

SEQ ID NO: 195085 - DNA, 1089 bp, synthetic construct
  misc_feature 1..1089: note = Description of Artificial Sequence: Synthetic coding sequence
  source 1..1089: mol_type = other DNA
atgaagctgcactgctgcctgttcaccctggtggccagcatcatcgttcccgcagctttcgttcttgaggacgttgatttcgaccagatggtctccttagaagcaaaccgaagctcttacaatgcatctttccccagtagttttgagctcagcgcatcctcgcactccgatgacgatgttatcatcgcaaaagagggtacttccgttagtattgaatgtcttttaacagccagccattatgaggatgtgcattggcacaacagcaaaggacagcaactggatggcaggtctagaggtggcaagtggctggtgagcgataactttctgaatatcactaatgtcgcttttgacgataggggattgtatacatgcttcgttacatccccaattcgcgccagctacagcgtcacattacgcgtcatttttaccagcggagacatgtcggtctattacatgatcgtctgtctgatcgccttcacaattacgctgattttaaacgtgaccaggctctgcatgatgagcagtcatctcaggaaaactgagaaggcgataaacgaatttttccgtacagagggggcagagaagctccagaaggcctttgaaatcgccaagcgcattcctataatcacctctgctaaaacgctcgagcttgctaaggtgactcaattcaaaacaatggagtttgcgagatacatcgaggagctggcacgttcagtgcctctcccccccctgatactgaattgtcgggctttcgtagaagagatgtttgaagctgtgcgggtggacgatcctgatgacctcggggagcggatcaaggaacggcccgccctcaatgcacagggaggcatatatgtgattaatccagaaatgggccgatccaactcccccggaggcgattccgacgatggtagcttgaatgaacaagggcaggaaattgcagtgcaagtctctgtacatttgcaatctgagacaaagagtatcgataccgaaagccagggctcttcacacttctcccctcctgatgatattgggagtgccgagtcaaactgcaactataaagacggagcctacgaaaactgccagctctag

SEQ ID NO: 195086 - DNA, 651 bp, synthetic construct
  misc_feature 1..651: note = Description of Artificial Sequence: Synthetic coding sequence
  source 1..651: mol_type = other DNA
atgagcgtgtactacatgatcgtgtgcctgatcgccttcaccatcactcttattcttaacgttaccaggctgtgcatgatgagtagccacctgcgaaagacagaaaaagctatcaatgaattttttagaacagagggagccgaaaagctgcagaaagcgttcgaaattgccaagcggatacccattatcacctcagctaagaccctggagctcgcgaaggtcacccagtttaaaaccatggaatttgcaagatacatcgaagaacttgcccgatcagtgcccctacccccgctgattttgaactgtagagcctttgttgaggagatgttcgaagctgtgcgggtggacgacccagacgaccttggtgagcgaattaaggagcggcctgccctgaatgctcagggcggtatctacgttattaacccagagatgggacggagcaattcacccggcggggactctgatgacggctccctcaacgagcagggacaggagattgcagtgcaagtctcggtgcacctgcagagcgagaccaaatctatagatacagagagccaaggctcttcccattttagtccacccgacgatatcgggagtgccgagtctaattgcaactacaaggatggcgcctacgagaactgccagctgtag

SEQ ID NO: 195087 - DNA, 54 bp, synthetic construct
  misc_feature 1..54: note = Description of Artificial Sequence: Synthetic coding sequence
  source 1..54: mol_type = other DNA
atgaagctgcactgctgcctgttcaccctggtggccagcatcatcgtcccctag

SEQ ID NO: 195088 - DNA, 330 bp, synthetic construct
  misc_feature 1..330: note = Description of Artificial Sequence: Synthetic coding sequence
  source 1..330: mol_type = other DNA
atgaagctgcactgctgcctgttcaccctggtggccagcatcatcgtgccagcagctttcgttcttgaggacgtcgactttgaccaaatggtaagcttggaggccaatagatcatcctataacgcgtcctttcccagcagttttgagctctcagcttcatctcactcagacgacgatgttattatagctaaggagggaaccagtgtaagcatcgaatgtctgctcacagcctctcactacgaggatgtgcattggcataacagcaagggccagcagctggatggcaggagccgtggaggaaaatggcttgtatcggacaattttctctag

SEQ ID NO: 195089 - DNA, 372 bp, synthetic construct
  misc_feature 1..372: note = Description of Artificial Sequence: Synthetic coding sequence
  source 1..372: mol_type = other DNA
atgaagctgcactgctgcctgttcaccctggtggccagcatcatcgtcccagccgccttcgtgctggaggacgtggacttcgatcagatggtgtctttagaagccaacagatcgtcatacaatgcctcttttccgagctctttcgaactctccgcctctagccatagcgacgacgatgtgataatcgccaaagaaggtacatctgtgtctattgagtgcctcctgactgctagccactacgaagacgtacattggcataattccaaaggccaacagctggatgggaggtctcgcggcggcaaatggctggtgtctgataacttcctcaatataactaacgtggcatttgatgaccggggtctctacacttag

SEQ ID NO: 195090 - DNA, 768 bp, synthetic construct
  misc_feature 1..768: note = Description of Artificial Sequence: Synthetic coding sequence
  source 1..768: mol_type = other DNA
atgaaggccctgctggccctgcccctgctgctgctgctgagcacccctccatgtgcgcctcaggtgtctggaattcgaggggacgctcttgagaggttctgcctgcagcagcctctggattgcgacgacatctatgcccagggttatcagtcggatggcgtgtatctcatatacccctccggaccctcagtcccagtaccagtattttgtgacatgacaactgaaggcggtaaatggacagtttttcagaagagatttaacgggagtgttagtttctttcgtggatggaacgattacaaattggggtttggaagggctgatggcgagtattggctgggcttgcagaacatgcacctacttactctcaaacagaagtatgaactgcgggtcgatcttgaggattttgaaaacaacacagcctatgccaagtacgccgatttttcaatctctcccaacgctgtcagcgccgaagaggacgggtacactctcttcgttgccggatttgaggacggaggcgctggggattcgttgtcctatcatagtggtcagaagttctcaacgttcgatcgcgaccaggatctgtttgtccagaattgtgccgccctatcttctggagcattctggttcagatcctgccacttcgctaatctcaacggtttttacctgggcggctctcacttgtcttacgcgaatggaattaattgggcccagtggaaaggcttttattacagtctgaagcggaccgagatgaagattcggagggcgtag

SEQ ID NO: 195091 - DNA, 840 bp, synthetic construct
  misc_feature 1..840: note = Description of Artificial Sequence: Synthetic coding sequence
  source 1..840: mol_type = other DNA
atgggcgagctgagccccctgcagcggcccctggccaccgagggcactatgaaagcccagggtgttttgctaaaattggcgctgttagctctgcctctgctccttttgttgtccacccccccttgcgcaccccaggtgagcggaatccgcggagacgcgctggaacgcttttgtctccagcagcctctggactgcgacgatatctacgcacagggctaccagtctgatggagtctacctgatctacccaagcggcccctccgtcccagtaccagtcttctgcgatatgaccacggagggggggaagtggaccgtgttccagaaacgctttaacggctccgtctctttctttcgcggctggaatgactataagttgggatttggaagagcagacggtgagtattggttggggctgcagaacatgcacttactgacattaaagcagaaatatgagctccgtgtggatctcgaggatttcgagaacaacaccgcctatgcgaagtacgcagactttagtatcagccctaatgccgtgtcagccgaagaggacggctacacactcttcgtggcgggtttcgaggacggcggggctggagatagcttgagttaccacagcggacagaagttctccacatttgatcgcgatcaggatctgtttgtgcagaactgcgctgccctgagctctggcgctttttggtttcgcagctgtcacttcgccaatcttaatggattctatctggggggcagtcacctctcatacgccaacggtattaattgggcccagtggaaaggattctattactcactcaagcgcactgagatgaagatacggcgtgcctag

SEQ ID NO: 195092 - DNA, 468 bp, synthetic construct
  misc_feature 1..468: note = Description of Artificial Sequence: Synthetic coding sequence
  source 1..468: mol_type = other DNA
atggtggacctgacccaggtgatggacgacgaggtgttcatggccttcgcctcctacgctacgatcattttgtctaagatgatgttaatgagcacagcaactgcgttttatcgcctcacccgcaaggttttcgccaatccggaagattgcgtagcctttggcaaaggcgagaatgcaaaaaaatacttacgcactgacgaccgagttgaaagagttaggcgggcccacttgaatgacctggagaatataattcctttcctgggcatcggactgctctattctctcagcggaccagatcctagcacagctatacttcatttcagactctttgtgggagctagaatttaccacacaatagcttatttgacacctttgccacagcccaatcgggctttatctttctttgttggctatggcgtgaccctgtcaatggcctacaggctgctcaaatcaaagctgtacctttag

SEQ ID NO: 195093 - DNA, 468 bp, synthetic construct
  misc_feature 1..468: note = Description of Artificial Sequence: Synthetic coding sequence
  source 1..468: mol_type = other DNA
atggtggacctgacccaggtgatggacgacgaggtgttcatggccttcgccagttacgctacgattatcctgagcaaaatgatgctgatgagcactgcaaccgcattctacaggcttacccgcaaggtgttcgctaaccctgaggattgcgtcgcttttggcaaaggggagaacgccaagaagtatctgcgcactgacgaccgggtagaacgtgttagaagagctcacctgaatgaccttgagaacataatccccttcctgggcatagggctgctctattctctaagtggtccagatccgtcaaccgccatattacattttaggcttttcgtaggcgcacgaatttaccacaccatagcttacctcacacccttgccccagccaaatcgagctttgtcctttttcgtggggtacggagtcacccttagcatggcctaccgtctgctaaaaagcaaactgtacctgtag

SEQ ID NO: 195094 - DNA, 468 bp, synthetic construct
  misc_feature 1..468: note = Description of Artificial Sequence: Synthetic coding sequence
  source 1..468: mol_type = other DNA
atggtggacctgacccaggtgatggacgacgaggtgttcatggccttcgcgagttatgcgactattatccttagcaaaatgatgctgatgagtaccgctactgccttctaccggctcaccaggaaagtgttcgcaaaccccgaggattgcgtggcttttggaaagggtgagaatgccaagaaatacctgcgcacggatgatcgcgtggagcgggtaagacgggctcacttgaacgatctggagaatatcatcccttttctgggaatcggactcctgtacagtttgagcgggcctgacccctccaccgccatattgcatttccgtctgtttgtcggcgcccggatctatcacacaatcgcttacctgacccctctgccgcagccaaatcgggcattgagcttttttgttgggtatggagttaccctgtctatggcctatcgcctgttaaagagtaagttgtatctgtag

SEQ ID NO: 195095 - DNA, 468 bp, synthetic construct
  misc_feature 1..468: note = Description of Artificial Sequence: Synthetic coding sequence
  source 1..468: mol_type = other DNA
atggtggacctgacccaggtgatggacgacgaggtgttcatggccttcgctagctacgcaaccatcattttatcaaaaatgatgctgatgagtacagcgacagccttctaccgtctcacacggaaggtgtttgcaaatccggaagactgtgtggcatttgggaaaggcgagaatgccaagaagtatcttcggactgacgatcgggtggaacgcgttcgaagagctcacctgaacgacctggagaacataattcctttcctgggcatcggtttgctgtactctctctccggcccagacccaagcaccgccatcttacattttaggctgttcgtgggggccaggatttatcacactatcgcttacctgactcccctgcctcagcctaacagagcgctctcctttttcgtggggtacggcgtgactctgtccatggcttaccgactcctcaagagcaaactatacctgtag

SEQ ID NO: 195096 - DNA, 234 bp, synthetic construct
  misc_feature 1..234: note = Description of Artificial Sequence: Synthetic coding sequence
  source 1..234: mol_type = other DNA
atggtggacctgacccaggtgatggacgacgaggtgttcatggccttcgcaagttatgccacgattatcctgtcaaaaatgatgctgatgagtacggccacggccttctaccgtctaacccgaaaggtgttcgccaatccggaagactgtgttgccttcggcaaaggagaaaatgccaagaagtacttgaggaccgatgatcgcgtggagcgcgtccgaagagcacacctgtag

SEQ ID NO: 195097 - DNA, 129 bp, synthetic construct
  misc_feature 1..129: note = Description of Artificial Sequence: Synthetic coding sequence
  source 1..129: mol_type = other DNA
atggtggacctgacccaggtgatggacgacgaggtgttcatggcctttgctagttatgcgacgattatcctgtcgaagatgatgcttatgtcgacggccactgccttctatcggctgactaggaagtag

SEQ ID NO: 195098 - DNA, 243 bp, synthetic construct
  misc_feature 1..243: note = Description of Artificial Sequence: Synthetic coding sequence
  source 1..243: mol_type = other DNA
atggtggacctgacccaggtgatggacgacgaggtgttcatggcctttgccagctacgcgaccataatcttgtccaagatgatgctcatgtccactgctacggcattctatcgcttgaccagaaaggtgttcgccaatcccgaagattgcgtcgcattcgggaaaggggagaacgcaaaaaaatacctccgtaccgatgaccgagttgaacgagtgcggagggcccatctcaacgacctttag

SEQ ID NO: 195099 - DNA, 264 bp, synthetic construct
  misc_feature 1..264: note = Description of Artificial Sequence: Synthetic coding sequence
  source 1..264: mol_type = other DNA
atggtggacctgacccaggtgatggacgacgaggtgttcatggccttcgccagctacgccaccatcatcctgagtaagatgatgttgatgtccaccgccacggccttctatcgattgacccggaaagtctttgctaaccctgaagactgtgtggccttcggaaagggcgaaaatgctaaaaagtacttgaggaccgacgaccgagtggagcgagtgcgccgcattaagcaaacactgtctatttatctcgccagcagcatatag

SEQ ID NO: 195100 - DNA, 444 bp, synthetic construct
  misc_feature 1..444: note = Description of Artificial Sequence: Synthetic coding sequence
  source 1..444: mol_type = other DNA
atggccggcaacagcatcctgctggccgccgtgagcatcctgagcgcttgtcagcagagttactttgccctacaggtgggcaaggcacgcctgaaatacaaggtgacaccgcctgcggtaactggtagccctgaattcgagagggtcttccgcgcacagcaaaattgtgtggagttttaccctatcttcatcataacgctgtggatggccggttggtacttcaatcaggtatttgcaacctgcctggggctagtgtatatttacggtagacatctgtacttctggggttattctgaagcagcgaaaaaaagaatcacggggtttcggctatccttgggaatccttgctttgctgactctactaggcgccctggggattgcgaactcattcctcgacgagtacctcgacctcaatatcgccaagaagttgagaaggcagttttag

SEQ ID NO: 195101 - DNA, 444 bp, synthetic construct
  misc_feature 1..444: note = Description of Artificial Sequence: Synthetic coding sequence
  source 1..444: mol_type = other DNA
atggccggcaacagcatcctgctggccgccgtgagcatcctgagcgcgtgtcagcagtcctatttcgcccttcaggtcggaaaagccagattaaaatacaaggtgactccccccgccgtgaccggcagcccagaatttgagagagtgttccgcgcccagcagaactgtgtcgagttctaccccatcttcataatcacgctctggatggccggatggtacttcaatcaggtgttcgccacttgcctgggactggtttacatctacgggcggcatttatacttctgggggtacagtgaggcagccaagaagagaatcactgggttccgactgagcctggggatcctggcactgctcacactgctcggcgccctgggtattgccaattctttcttggacgagtatctcgatctaaatatcgcaaagaagctgcgacgacaattctag

SEQ ID NO: 195102 - DNA, 234 bp, synthetic construct
  misc_feature 1..234: note = Description of Artificial Sequence: Synthetic coding sequence
  source 1..234: mol_type = other DNA
atggccggcaacagcatcctgctggccgccgtgagcatcctgagcgcctgccagcagtcttattttgctctacaagttggcaaagcacgcttgaaatacaaagtcacccctcccgccgttacagggagtcccgaattcgagagagttttccgggcccatttttgttacctgtccggaagcggcgtccatatttggcctagtcccattcttctgggaatatttagatcttgctag

SEQ ID NO: 195103 - DNA, 501 bp, synthetic construct
  misc_feature 1..501: note = Description of Artificial Sequence: Synthetic coding sequence
  source 1..501: mol_type = other DNA
atgccctggcggggccggcggttccggctgtgccggcggaagatggccgtcctctctaaggagtatggattcgttctcttgaccggtgccgcaagcttcattatggtagcgcatctcgcaattaacgtgtctaaggcccgtaaaaagtacaaagtggagtatcccatcatgtacagcacggaccctgaaaatggtcacatcttcaactgcattcagcgtgctcatcagaacacgctggaggtgtatcctcccttcctgtttttcctggcggtgggaggcgtgtaccatccccgaattgcctcaggcctgggcttggcgtggattgtgggcagggtcctgtacgcctacggttactataccggggagcctagcaagaggtccagaggagctctaggatcaatcgccttgcttggcctagttggtacaaccgtttgctccgctttccaacacctgggctgggtgaagtctggactgggatccggccctaaatgctgccactag

SEQ ID NO: 195104 - DNA, 459 bp, synthetic construct
  misc_feature 1..459: note = Description of Artificial Sequence: Synthetic coding sequence
  source 1..459: mol_type = other DNA
atggccgtgctgagcaaggagtacggcttcgtgctgctgaccggcgccgcctcgttcatcatggtggctcacctcgccataaacgtctcaaaggcaaggaagaagtacaaggtggagtatcctatcatgtactcgaccgacccagaaaacggtcacattttcaattgtatccagcgagcgcaccagaatacactggaagtttatcctcccttcctgttctttcttgctgttggaggtgtctatcatccccgcatagcctcagggctgggactggcctggattgtaggaagggtactgtatgcatacggatattacaccggcgaaccctccaaaagatctcgaggagctcttggtagcatagctctgttgggactcgtcggaacgaccgtgtgttctgcttttcagcatttgggttgggtgaaatcaggtctcggctcgggacccaaatgttgccattag

SEQ ID NO: 195105 - DNA, 501 bp, synthetic construct
  misc_feature 1..501: note = Description of Artificial Sequence: Synthetic coding sequence
  source 1..501: mol_type = other DNA
atgccctggcggggccggcggttccggctgtgccggcggaagatggctgtactttcgaaggaatacggatttgtgttattgacgggagcagccagttttattatggtggcccatctagctattaacgttagcaaggctcgcaaaaaatataaagtcgaataccctattatgtattcaacagaccccgagaacggtcacatcttcaattgcatccagagggctcaccagaatacccttgaggtttacccaccgttcctgtttttcctcgcagtcggaggagtgtaccacccacgcatcgcatccgggttgggtctggcctggatagttggaagagtattgtatgcttatggctattatactggcgagcccagtaagcggagccgcggcgccttagggagcatcgcactcctgggcctggtgggtacaacagtgtgttcagcattccaacatctcggatgggtgaaatcaggccttgggagtggaccaaagtgctgtcattag

SEQ ID NO: 195106 - DNA, 501 bp, synthetic construct
  misc_feature 1..501: note = Description of Artificial Sequence: Synthetic coding sequence
  source 1..501: mol_type = other DNA
atgccctggcggggccggcggttccggctgtgccggcggaagatggccgtgctttcaaaagaatatgggttcgtcttactgaccggagcagctagttttattatggtggctcaccttgctatcaacgtgagcaaggcaaggaaaaaatacaaggtggaatatcccattatgtactctacggaccctgagaacgggcacatttttaattgtatccagcgggcacaccagaacacactcgaggtctatcctccgtttcttttcttcttggcagtgggcggcgtctatcacccccggatcgcctccgggctcggtctggcttggatagtaggcagagtgctgtatgcttatggatactacacaggagagccgtccaagaggagtaggggggcactgggctccatcgcactactcggcctggtcggaaccacggtttgctctgctttccagcacctcggctgggtgaagtcggggctcggatcaggaccgaaatgttgtcactag

SEQ ID NO: 195107 - DNA, 459 bp, synthetic construct
  misc_feature 1..459: note = Description of Artificial Sequence: Synthetic coding sequence
  source 1..459: mol_type = other DNA
atggccgtgctgagcaaggagtacggcttcgtgctgctgaccggcgcagcaagtttcataatggtggcccatctggctatcaatgtgtccaaagcaagaaagaagtacaaagtcgaataccccatcatgtactccacggaccccgagaacggtcacatttttaactgtattcagcgcgcacatcaaaataccctcgaggtgtacccacctttcctattcttcctagctgttgggggggtctatcacccgagaatcgctagtggactcggactggcttggattgtgggacgggtcctgtacgcctacggatattacactggtgagccctcgaaaagaagcaggggggctcttggttccattgccttgttaggccttgtaggtaccacagtgtgctccgccttccagcaccttggctgggtgaaatcaggcctaggttcaggtcctaaatgttgccactag

SEQ ID NO: 195108 - DNA, 501 bp, synthetic construct
  misc_feature 1..501: note = Description of Artificial Sequence: Synthetic coding sequence
  source 1..501: mol_type = other DNA
atgccctggcggggccggcggttccggctgtgccggcggaagatggccgtcctgagcaaagagtacgggtttgtgctgctaacgggggcagcctcatttataatggtagcccacttggccataaacgtcagcaaagcacgcaagaagtacaaagttgagtacccgatcatgtattctactgatcctgagaatggccatatcttcaattgtattcagcgcgcccaccagaacaccctggaggtatatcctccttttctattcttcttagctgtcggtggtgtttaccacccacggattgcctccggcctgggcttggcttggatcgtgggacgggttctctatgcttatggatattatacaggtgaaccatcaaagaggtctcgcggtgccctcggtagtattgctctcttaggcctggttggcaccactgtttgttccgcttttcaacacctggggtgggttaaatcagggctgggctcaggccccaagtgctgtcactag

SEQ ID NO: 195109 - DNA, 972 bp, synthetic construct
  misc_feature 1..972: note = Description of Artificial Sequence: Synthetic coding sequence
  source 1..972: mol_type = other DNA
atgccccggctgaccttcgcccccaagggctggccccacccccccacttcacttcattggtggttatttcaagaacttccgactccttcagagaatagcatgcctcccgggctgagcacaccaactgcttcacaggagggcgcaggacccgtcccagatcctagtcagccgacacgcagacaaattagactctctagcccggaacgacagcgactgagttcgctgaatctgacccctgaccccgagatggaaccacccccaaagccccctaggagctgtagtgcactggcccggcacgcattagagtcctccttcgttggttggggactgcctgtacaatctcctcaggccctggtggccatggagaaagaagaaaaagagtcacctttttcctcggaggaagaagaggaagatgtcccactggacagcgatgtagaacaggccctccagacgttcgcgaagacctccggtaccatgaataactatcctacatggcgccgcactttgttaaggcgggctaaggaagaagaaatgaaaaggttctgtaaggcccagacaattcagcgacgactgaatgagattgaggccgcgctcagggaattagaggccgagggcgtgaagctggagctggcacttcgccgacaatcctccagcccagagcaacagaagaagctgtgggttggtcagctgttacaacttgtagataagaagaattctctcgttgcagaagaggcagaactcatgatcacggtccaagaactgaatcttgaggaaaagcagtggcaattggatcaagagctcaggggctatatgaatagagaggaaaatcttaagacggccgccgataggcaggccgaagaccaagtgctgcggaagctagtcgatctggttaaccagcgggacgccctcattagattccaagaagagcggagattaagtgaactcgcactgggaactggcgcccaaggctag

SEQ ID NO: 195110 - DNA, 2946 bp, synthetic construct
  misc_feature 1..2946: note = Description of Artificial Sequence: Synthetic coding sequence
  source 1..2946: mol_type = other DNA
atggccagccccaccagcaccaaccccgcccacgcccacttcgagtctttcctccaggcccagctctgccaagatgtgctttcttccttccaggaactatgcggtgccctagggttggagccgggcgggggactgccacagtaccacaagattaaagaccagctgaattattggagcgctaaatcattatggacaaagctggataaacgggccggacagccagtgtaccagcagggacgagcctgcaccagcacaaaatgcctagttgtcggagccggaccttgtgggttgcgtgtcgccgtggagctggccctgctgggggcccgggttgtccttgtagaaaaacggacaaagttttctcgacacaacgtgttgcacctctggccgttcaccatccatgaccttagagcactcggagcaaaaaagttttatggccgattttgcacaggtactctggaccatatctcaatcaggcaactgcagctccttcttctgaaggtagctctgcttcttggggtggagattcattggggcgtgacatttactggtttgcagccacctcctcgaaaaggttcaggctggagggctcaattgcagcctaatcctcccgctcagctggccaactatgagtttgatgtgctcattagcgccgcagggggaaagtttgtgccggagggtttcaaagttcgggaaatgcggggcaaacttgctattggtatcaccgcgaactttgtcaacggcagaaccgtcgaagaaacccaggtgcctgagatctctggcgtggcgaggatctataaccagagctttttccagtccctgctgaaggccacgggcattgacctagagaatattgtctactataaggatgatactcactatttcgtcatgacagccaaaaaacagtgtctgctgaggctgggtgttctgcggcaacccttttggccgttaggaaccggggtggcgcggggctttctcgctgccttcgacgctgcatggatggttaagcggtgggctgaaggggcagaatccctggaggtcctggccgaacgtgagagtctatatcagcttctcagtcaaacatccccggaaaacatgcatcgaaacgtggctcagtacggcttggacccggccactcggtaccctaacctgaatctgagggccgtcaccccgaatcaagtgcgggacctgtatgatgtactcgccaaagaaccagtgcagcggaataacgataaaaccgatacgggaatgccagccactggcagtgcaggcacccaggaggaacttctgcgctggtgccaggagcagactgccggctaccctggcgttcacgtgagtgatttatcctcctcctgggccgatggcctggcactatgcgccctggtttatcgactgcagccaggcctgctcgagccaagcgagttacaaggcctcggcgctctggaagcaaccgcctgggcactgaaagtcgcggaaaacgaactggggatcactccagttgtgagcgcacaagcagtggtggccgggtctgaccccctcggtctgatcgcatatttgtcccatttccattctgcattcaaaagtatggcccatagccccggcccggtctcacaggccagccccgggacctcatctgcagttctgttcttgagcaaactgcagcgaactctccaacgctctagagcaaaggagaacgccgaagacgccgggggtaagaagctgagattggagatggaggcagagacgccttctactgaagttcctcccgacccagagcccggcgtgccactcacaccccccagccagcaccaggaggccggtgcaggtgatctgtgtgccctgtgtggggagcacctctacgttctggaaaggctttgcgtgaatgggcatttttttcataggtcctgctttaggtgccatacctgtgaagcaacactctggcctggtggctatgagcagcaccctggggatggtcacttttactgtcttcaacacttgccccagaccgatcataaggcggaaggctccgaccgcggacctgaaagtcccgaattgcccacccccagcgaaaattccatgcccccagggcttagcacacccaccgcatcccaggagggcgcagggcctgtccccgacccaagccagccaaccagaaggcagatcaggctgagctctcccgagagacaacggctcagcagcctcaacctgactcctgacccagagatggagcccccccctaaacctcctcggagctgttccgctctcgcccgacatgcgttggaatctagttttgtgggctgggggctgcccgtccaatccccccaggctctcgtagctatggagaaagaagaaaaggaaagccccttttccagcgaggaggaagaagaagacgtcccactggacagcgacgtggaacaggccctccagaccttcgccaagacgtctggaacaatgaacaactatcccacctggcgcaggactcttctgcgtagggctaaggaggaggagatgaagcgattctgtaaggctcagacaatccagcggcggctgaatgagatagaggccgcgcttagggaattggaagctgaaggcgtcaagctggagctggccctgcgtcgtcagtccagctctcctgagcaacaaaagaaactttgggtcgggcagctgctacagctggtagacaaaaagaacagcctggtggccgaagaagccgagctcatgattacagtgcaggagctcaaccttgaagaaaaacagtggcagctcgaccaggagctcagggggtatatgaaccgcgaagaaaacctgaagacagcagccgacaggcaagcggaggatcaggttctgaggaagctcgtggatctggtgaaccagagggatgctctgattcggtttcaggaagaacgtcggttgagtgaactggccttgggtacgggagcccagggctag

SEQ ID NO: 195111 - DNA, 3204 bp, synthetic construct
  misc_feature 1..3204: note = Description of Artificial Sequence: Synthetic coding sequence
  source 1..3204: mol_type = other DNA
atggccagccccaccagcaccaaccccgcccacgcccacttcgagagtttcttacaggcccagctgtgtcaggatgttctctcctctttccaggaattatgcggcgctctaggcttggagccaggtggggggctaccgcaatatcacaaaattaaagaccagcttaactattggagcgccaagtccctctggacaaaacttgacaaaagggcaggacagccagtttatcagcaggggagggcttgtaccagtaccaaatgcctcgtggtcggcgctgggccgtgtggcctgcgtgtcgctgtggagctggcattgctgggggcaagggtcgtgttggtggagaagcgaacaaaattcagccggcacaatgtgctgcatttatggcccttcacaatccatgatctccgcgcattaggagccaagaagttctacggccgcttctgtacaggtactttagaccacatatcaatccgccagctgcagctgctgttgctgaaagtggctcttctcctgggcgtggagatccactggggagtgacattcaccgggctgcagccccccccccggaaagggtctggctggagggcccagttacagccaaacccccctgcccagctcgcaaactacgaatttgatgttctcatctcagccgctgggggcaaattcgtgcccgagggattcaaggtgagagagatgcggggcaagcttgcaatcggtattactgccaacttcgtgaatggtcggacagtggaggagacccaggtgcctgaaatttctggagttgccaggatttacaatcaatccttttttcagagccttctgaaggcaacaggcattgaccttgaaaatatagtttattataaggacgacactcactacttcgtgatgaccgcgaagaaacagtgcctgctccggctgggcgtgctgagacaggactggccagatactaatcggctcctgggatccgcaaacgtcgtccccgaagcgctccagcgcttcacacgtgcagcggccgatttcgcgacacacggaaagcttggaaaactggaattcgcacaagatgctcatgggcagcccgacgtcagcgcttttgacttcacttcaatgatgagagcggagtcaagtgcacgggttcaggagaaacatggagctagacttcttctcggtttagtcggagattgcctggtagagcccttctggcccctaggaacaggagtggccaggggctttctcgccgcctttgatgccgcgtggatggtgaagcggtgggccgagggtgctgaaagtcttgaggttctggctgagcgcgaaagcctgtatcagttgctttcccagacatctcccgagaacatgcatcggaatgtagctcagtacggacttgacccagcaactcgctaccccaacctgaacctgcgggccgtgactcccaaccaggtgagagacctgtacgacgtcttggcaaaggaacccgtgcagcggaacaatgataaaacagacaccggcatgccagctaccgggtccgccgggacccaggaggagttgcttagatggtgtcaggagcagaccgccggctaccccggcgttcacgtcagcgatttatcttctagttgggctgacggactcgccctgtgtgccctagtgtatcgccttcaacctggtctgttagagccctcagaactccagggactcggcgctcttgaagcgacagcctgggctctgaaggtggctgagaatgagctgggaattacccccgtcgttagtgcacaggcagtggtcgcggggagcgatccacttgggcttatcgcttacctgagccattttcactccgctttcaagtcaatggctcatagccccggccctgtgtcccaggcgtcacctgggacaagtagcgccgtgctcttcttgagcaaactgcagcgcacactgcagcgatcccgggcgaaggaaaatgccgaggatgccgggggcaagaaattaaggctcgaaatggaagcagagaccccttcaaccgaggtaccacccgacccagaaccgggtgtgccactgacacccccctctcagcatcaagaggctggtgcaggggacctctgcgccctgtgcggggagcatctgtatgtactggagcgcctttgcgttaacgggcattttttccatagaagttgtttcagatgtcatacgtgcgaggcaacgctgtggccaggcggttatgaacaacaccctggggatggtcacttttactgcttacaacacctgccccaaacagaccataaagcggagggcagtgatcgaggacctgagtcacccgaattgccgacacctagtgaaaacagtatgccacccggactgtccactcccacagcaagtcaagaaggagcggggcccgtaccagatcccagccagccaaccaggaggcagatacgcctgtcctcgcccgagagacagcggcttagctctctgaacctaacacctgaccctgagatggaaccgccccccaaacctccgaggtcttgttccgccctggcacgtcatgccctggagtctagtttcgtgggatgggggctccctgtgcagagcccccaggcactagtcgctatggagaaagaagagaaggaatcccctttttcgtcagaggaagaggaggaggacgttccactggactcagacgtcgagcaggcactgcagaccttcgctaagaccagcggaaccatgaataattatcccacatggcggcggaccctcctccggcgtgctaaggaggaagagatgaaaagattttgtaaggctcaaacaatccaacgacgtttaaatgagattgaggctgctctgagggaattggaggccgagggcgtcaaactggagctggcactgaggagacaaagtagtagtcccgaacagcagaagaagctgtgggttgggcagttactgcaactggtagataaaaagaactctctggtagctgaagaggctgagctgatgattacagtgcaggagctgaatctcgaagagaaacagtggcagctggaccaagagctgagaggctacatgaaccgagaggagaatcttaagactgcagcagataggcaagccgaggatcaggttcttcgtaaacttgtcgacctggtgaaccagagggatgcactcatcaggtttcaggaggagcggcgactctctgagctcgcactgggcacaggggctcaggggtag

SEQ ID NO: 195112 - DNA, 3261 bp, synthetic construct
  misc_feature 1..3261: note = Description of Artificial Sequence: Synthetic coding sequence
  source 1..3261: mol_type = other DNA
atgagctgcctgagccacagcagcctgcccagctgctgccccccccaagaagcctctatggcatcccccacgtcaactaacccagcccacgcgcatttcgaaagctttttgcaggcgcagctgtgtcaggacgtgctgtctagtttccaagagttgtgcggagctttgggactggagcccggcggcgggctaccccaataccacaagatcaaagatcagctgaattactggagcgctaagagcctgtggacaaaactggataagcgtgcgggccagccagtataccaacagggacgcgcctgtacatctaccaagtgtcttgtggtgggtgccgggccctgcgggctccgagttgccgtcgaactggcattattaggcgcaagagtagtactggtcgagaaacggacgaagttcagccggcacaatgtcctgcacctgtggcccttcaccatccacgacctgcgcgctctcggagctaagaagttctatggcagattctgtaccggaactttagaccacatctcaatccgacagctgcagttattactgctaaaggtggcgctcctcctgggagtggagatccactggggcgtaacgttcaccggcttgcagccacctcctcgtaagggatctgggtggagagctcaactccagcccaatcccccagcccagctggccaactacgaatttgatgtccttattagtgcagctggcggcaagtttgtgcccgaagggttcaaagtaagggaaatgcggggtaagttggctataggaattactgcgaatttcgtgaatgggaggaccgtggaggagacgcaggtccccgaaatctccggggttgcgagaatttacaatcagagcttttttcagagcttgttaaaggccacgggcatagaccttgagaatatcgtgtattacaaggacgatactcattatttcgtaatgacggcaaaaaagcaatgtctgctaaggctcggagtccttcggcaggactggcccgatactaacagattactgggttccgctaacgtggttcccgaggcacttcagcgttttaccagggcagctgcagactttgcgacgcacgggaagttaggaaagctggagtttgcccaggatgcacatggacaacctgatgtgtctgcttttgactttactagtatgatgagggctgagagcagcgctagggtccaggagaagcacggggctcgcctccttttgggcttggttggcgactgcctggtcgaacccttctggccccttggaactggggtggccaggggtttcctcgctgctttcgatgccgcgtggatggttaagaggtgggctgaaggtgcggaatctcttgaagtactggcagaacgagaaagcctgtatcagctgttgtcacaaacctcgccagagaacatgcatcgtaacgttgcccagtacggcctggatcccgccacccgatatcctaatcttaatcttcgggcggtgacaccaaatcaagtccgggacctgtatgatgtgctggccaaggaaccggttcagaggaacaacgataaaacagacacagggatgcccgccactgggtccgcgggcactcaggaagagcttctccgatggtgccaggagcagacggctggctacccaggtgttcatgtatcagacctgtcctcatcctgggctgatggcctcgctctatgtgcactggtttaccgccttcaacctggactgctggagccttccgagcttcagggtttgggcgcactggaagccactgcctgggccctgaaggtggccgaaaacgagcttggaattaccccagtggtctccgcgcaggcggtagtggcagggagcgaccccttagggttgattgcttatctctctcattttcactcagcctttaagtcaatggcccactcccccggcccagttagtcaggcttcaccaggtacctcaagcgccgtcttattcctcagcaagctccagagaacgctgcaacggagccgggcaaaagaaaatgcagaggacgcaggcggaaagaaactgaggctggagatggaggctgagacaccatcaactgaggtgccccccgatccggagcccggcgtacccttaacccccccatcccagcatcaggaggcaggcgctggagatttatgtgctctttgcggcgaacatctgtacgtgctagagagattgtgcgttaacggccatttttttcataggagttgcttcaggtgtcacacatgcgaggccaccctgtggccgggcggctacgagcaacatccaggggacggccacttttattgcctgcaacacctgccacagacagatcataaagcggagggctcagaccgaggacctgagtcacccgagttaccaactccctcggagaactccatgcctccagggctgtcaactccgacagcaagccaggaaggggcgggtcctgtgcctgacccctctcagccaactagaagacagatccgcctcagttcccctgagagacagcgactttctagtctcaacctgacacccgatcccgagatggaaccccctccgaagcctccaaggtcatgttccgccctggcccggcacgctctcgaatcatccttcgtgggatggggcttacctgtgcagagccctcaagcactggtggccatggagaaggaggagaaagaatcgcctttctcaagcgaagaggaagaggaggatgtgcctttggactcagatgtagagcaggctcttcagacttttgccaaaactagcggaactatgaacaattatccaacatggagaagaaccctgctgagaagggcgaaagaagaggagatgaagcggttttgcaaagcccaaactatccagcgtaggttgaacgagatcgaggctgcccttcgggagctggaggctgagggggtgaaactggagctcgccttgcgtcgccagtcttcctctccagaacaacaaaagaagctctgggtcgggcaactgctgcagctagtggataagaagaatagcctggtcgcagaagaagctgaacttatgataacggtacaagagttgaacctggaagagaaacagtggcagctggatcaggaattgaggggctacatgaacagggaggagaacttgaaaaccgcagctgacagacaggccgaggaccaggtgctgcgtaaactggtggacttagttaatcaacgagacgccctgattcgattccaggaggagcgacgtttgtctgagttggctcttgggactggcgcccaagggtag

SEQ ID NO: 195113 - DNA, 1776 bp, synthetic construct
  misc_feature 1..1776: note = Description of Artificial Sequence: Synthetic coding sequence
  source 1..1776: mol_type = other DNA
cccaagtacgtgctgcccagcgaggcccaggtggtgcccgccaagcagctccagccgcaggacagatcatctgtacccgagcactctctgctggcaggcactcaggaggaattgctcagatggtgccaagagcagacggccggttaccctggcgtccatgtgagcgacttaagttcgagttgggctgacggtctcgctctttgtgcactcgtctataggctccagcctggactgttggagccatctgagctgcaaggtttaggcgctcttgaggccacagcttgggcgctgaaggtggccgaaaatgagctgggaatcacccctgtggttagcgcccaagccgtggtggccgggtccgacccactgggcctgattgcctatctgtcccatttccatagtgcatttaagtcaatggcacactcgcccgggccggtgagccaggccagccccggaacatcgtccgcagtgctctttctgtccaagctgcagcgaactctccagcggtccagggcaaaagaaaatgcagaggacgccggaggaaagaagctcaggctggagatggaggccgagactccgtccactgaagtgcctccggatccagaaccaggcgtgcccttgacacctcccagccaacaccaggaggccggagccggggatctgtgtgccttatgtggcgagcacttgtacgtgcttgagcgcctgtgcgtgaatgggcatttctttcacagatcttgctttcgttgtcatacctgtgaagctactttgtggcccggaggctacgaacaacatccaggggatgggcatttctattgtctgcagcaccttccccagaccgaccacaaggctgagggttccgatcggggtcctgaaagcccagaactccccacacctagcgagaattccatgccaccagggctctctacccccaccgcctcccaggagggcgccggccctgtccccgatccttcccagcccacaaggcgacagatcagactcagcagtcctgaacggcagaggttgagctccctgaacctcacccctgaccctgagatggaacctcccccaaaacctccacggtcatgcagcgctctggcacgccacgctctcgagtcttcctttgttggatggggcttgcccgtacaatcaccccaggccctggttgcaatggaaaaggaggaaaaggagtcaccgttttcaagcgaagaagaggaggaagacgttccacttgacagcgatgtcgagcaggcacttcagacgtttgccaaaacctcaggtactatgaataactatccaacatggcggaggacattattaaggcgcgccaaagaggaagaaatgaagcggttctgtaaggcacaaacgattcagcggcgcctcaatgagatagaagccgccctccgggagctcgaagcggagggagtcaagcttgagcttgctctccgccgacagtctagcagccccgagcagcagaagaaactgtgggtgggccagctactacagcttgtggacaagaaaaattcacttgtcgctgaagaggcagagttgatgattacagtccaggaattaaatctcgaagaaaagcagtggcagctcgaccaagagttgcgtgggtatatgaatcgggaagagaacctgaagaccgccgctgacagacaggccgaagaccaggtcctcagaaaactggtggatttggtcaatcagagggacgctctgatcagattccaggaggagcgcaggctgtctgagctggccctcgggacaggagcacaaggctag

SEQ ID NO: 195114 - DNA, 735 bp, synthetic construct
  misc_feature 1..735: note = Description of Artificial Sequence: Synthetic coding sequence
  source 1..735: mol_type = other DNA
atggccagccccaccagcaccaaccccgcccacgcccacttcgagagttttctgcaggcccagttgtgccaagatgttttgtcaagtttccaggagctgtgcggagcgttagggctcgaacccggggggggattaccgcaataccacaagattaaggaccagctaaattactggagtgccaaaagcctgtggactaagctagacaagagagctggccagcccgtctatcagcagggtagagcctgcacctccaccaagtgcctggtagtgggtgcgggcccttgtgggcttagagtggcggtcgagttagctctgttgggggccagggtagtcctggtggagaaaagaacaaaattctctcgtcacaatgtattgcacttgtggcccttcacaattcacgatctgagagcacttggagccaaaaagttttatgggagattctgcaccggaactttggatcacatctctattcgccaactccagctcctcctcctgaaggtcgcactgctcctcggagttgagattcactggggcgtgacgttcaccggactccagccccccccacgcaagggctctggatggagggcccagctccagccaaatcctcccgctcagctagctaattacgagtttgatgttttaatcagcgccgccggaggcaagttcgtgcctgagggcttcaaggtgagagagatgcgtggaaaattggctatcggcatcacagcgaacttctag

SEQ ID NO: 195115 - DNA, 3375 bp, synthetic construct
  misc_feature 1..3375: note = Description of Artificial Sequence: Synthetic coding sequence
  source 1..3375: mol_type = other DNA
atgggcgagaacgaggacgagaagcaggcccaggccggccaggtgtttgaaaactttgtgcaggccagcacttgtaagggcacacttcaggccttcaatattctcaccagacacctggacctcgaccccttagatcacagaaatttctattccaaactgaagtcaaaagttacaacatggaaagccaaggccttatggtacaaactggacaaacgcgggagccataaagagtacaaaagaggcaagtcatgcactaacactaaatgtttaatcgtcgggggggggccttgtggactccggactgcaatcgaactggcctatctgggtgccaaggtcgtggtggtggagaagcgggattcgttctctcggaacaatgtcctccacctgtggccatttaccatccacgaccttcgcggactcggagccaagaaattttacggtaaattttgtgccggttctatcgaccatatatctatccgccagctgcagctaatattgtttaaggtcgctttgatgctgggtgttgaaatacacgtcaatgtcgagtttgttaaggtactcgagcctcccgaagaccaggagaatcaaaaaattggatggagggcagaatttttgcctacagatcactcgttgtcagagttcgagttcgatgtgattattggcgccgacggacgccgaaacaccctcgaggggtttaggaggaaggaatttcgtggcaaactggccatcgctatcacggctaacttcatcaatcgcaactctacagctgaagcaaaggtggaagagatcagcggtgttgcctttatattcaatcagaagttttttcaggatcttaaagaggaaacagggatcgaccttgaaaacatcgtctactacaaggattgtactcactacttcgtgatgactgccaagaaacagtctttgctggacaaaggggtaatcattaacgactatatagatacagaaatgttgctctgtgcagagaatgtaaatcaggataacctgctgtcctacgctcgcgaggccgccgacttcgctacaaattatcaactgccctccctggacttcgctatgaatcactacggacaacctgacgtcgccatgtttgacttcacttgcatgtatgcctccgagaacgctgcactggtccgcgagcgacaggcacaccaactactggtggccttagttggtgatagcttgctcgagcccttttggccaatggggaccggctgcgctcggggattcttggccgccttcgatacagcctggatggtgaagtcgtggaaccagggcaccccacctttggagctgttggcagagagagagagcctctatcgcctgcttccccagaccacccctgaaaacatcaacaaaaactttgagcagtataccctcgatcccgggacacgatacccgaacctgaacagccactgtgtgcgccctcaccaggttaaacacctgtacatcactaaggagctggagcactatcccctggaaaggctgggttctgtacggcgatccgtgaatttgagtaggaaggaatctgacatccggcccagcaagttgctaacttggtgccagcagcagacggaaggctaccagcacgtaaatgtgacggaccttaccacgtcttggaggagtggcctagccctctgcgctataattcacaggttccgacccgaactgatcaacttcgatagtttgaatgaagacgatgccgtcgaaaacaatcagctcgccttcgatgtggctgaacgcgagttcggtatcccacctgttaccaccggaaaggaaatggctagtgctcaggagcccgacaagctgtcaatggttatgtatctgtccaagttttatgaactgttccgggggactccacttcgcccagtggactcctggcgcaaaaactacggagaaaacgcagatctgagtctcgcgaagagctccatttccaataattatctgaacttgacatttccacgaaaaaggacccctagggtagatggccagaccggtgaaaacgacatgaacaagcgcagaagaaagggttttactaaccttgacgaaccctccaacttcagctccagatcgcttggctccaaccaggagtgtggttcatccaaggaaggcgggaaccaaaataaagtgaagtccatggccaatcagctcctggctaagtttgaagagtcaactcgcaacccctccctaatgaagcaggagcgccgagtgtctggcatcggtaaaccagtactttgttcctccagtggaccgccagtgcactcttgttgccctaaaccagaagaggctacaccttccccatccccccccctgaaacggcagttccctagcgttgtcgtgaccggacacgtcctgcgtgagctgaagcaggtgtcggccggctctgagtgtctctctagaccatggcgcgccagggccaaatccgacctgcagcttggcggcactgagaatttcgctactctgccaagcacccgtcccagggcccaggctctttccggtgtgctttggcggctgcagcaagtagaggaaaagattcttcagaagcgtgcacagaaccttgccaatcgagagttccataccaaaaacatcaaggagaaggccgcacatctcgcctcaatgtttggccatggcgattttccccagaataaattactctctaaggggctgtctcacacccatcctcctagtccccctagccgcctccctagccctgacccggccgcgtcctcttctccctccacggtcgactctgcctcgcccgctcgcaaagagaaaaagagtccttcgggcttccattttcaccctagccacctcagaacagtgcacccacagctgactgtgggtaaggtgtcctcaggaattggggctgccgcagaggtcctggtaaatctttacatgaatgatcatagaccaaaggcgcaggccacttctccagatctagagtctatgcgtaaaagctttcccctgaacttaggcggaagcgacacctgctatttttgtaagaaacgagtttacgttatggagcgcctgtctgcggaaggtcattttttccaccgtgaatgtttcaggtgtagcatttgtgcaaccaccctgagactcgccgcgtacacttttgattgtgacgagggaaaattttactgcaagccccacttcatccactgtaagaccaactccaaacagagaaaacgacgggcagaacttaaacagcagagggaagaggaggccacctggcaggagcaagaagcccctcgacgcgacacacctactgaatcaagctgcgctgtggcagctataggtacgcttgagggcagcccacctgtgcacttctccctcccggtactgcaccccctgctgggatag

SEQ ID NO: 195116 - DNA, 3312 bp, synthetic construct
  misc_feature 1..3312: note = Description of Artificial Sequence: Synthetic coding sequence
  source 1..3312: mol_type = other DNA
atgggcgagaacgaggacgagaagcaggcccaggccggccaggtgttcgaaaattttgtgcaagcgtccacttgtaaggggaccctacaagcattcaacatcctgactcgtcacctcgatttggacccactggatcatagaaacttctatagcaagctgaagtcaaaggtaactacttggaaagctaaagctctctggtacaaactagataaaaggggaagccataaagaatataaaagagggaagtcctgcaccaacactaagtgcttgattgtcggcggcggaccctgtggcttacgcaccgccatagagctggcatatcttggagcgaaggtagtagtggtagaaaaaagggattccttctctcgcaataacgtgttgcatctgtggccatttacaatccacgatttgcgtggtctgggcgcaaaaaagttttacggaaagttttgcgctggctccatcgatcacatttccattcggcagctacagctaatactgttcaaggtggccttgatgctcggcgtcgagatccacgtgaacgtggaatttgtgaaggttctggaaccccctgaagaccaggagaatcaaaaaattggctggagggcggagtttctgcccacagaccattctctgtcagagtttgaatttgatgtgatcataggtgctgatggccgccggaacactctggagggtttcagacggaaggagttcaggggcaaactggctatcgccattactgccaactttattaatagaaactccacagccgaggccaaggttgaggagataagcggagtcgccttcatattcaatcagaagttttttcaagatctgaaggaagagacaggcatcgatctggaaaatattgtgtattacaaagattgcacacactatttcgtgatgaccgccaagaaacagtctttgttggataagggagtgattattaacgattatatagacaccgaaatgttactctgtgcagaaaatgttaaccaagataacctccttagctatgccagggaggcagctgacttcgccaccaactaccagcttccttcactcgacttcgcaatgaatcattacggtcaaccagatgttgccatgtttgactttacatgtatgtatgcctctgagaacgctgcgctggtccgggaaaggcaggcacatcaactccttgtggccctggtcggagatagcctgctcgaaccattttggcctatggggaccggctgcgcacggggctttctggccgccttcgacaccgcatggatggtgaaaagctggaatcagggcacgccgccactggaattacttgccgaacgcgaatctctctatcgacttctcccccagacaacacctgagaacattaataaaaacttcgaacagtacacccttgatcccggaactcggtatcccaatctaaacagtcactgtgttcggccacaccaggtgaagcacctttacatcacgaaggagctagaacactatcctttggaacggctcgggtccgtccgtcgctctgtcaacctttctcggaaggagtccgatatccgtcctagtaagctgcttacctggtgccagcaacagactgagggatatcaacatgtcaatgtgacggacctcacgacgtcttggcgcagtggcttggcactgtgtgccattattcaccgctttcgccccgaactgatcaactttgacagcttgaatgaagatgacgcagtggagaacaatcagctggctttcgatgtggcggagagggagtttggaattccaccagtcacaactggaaaagagatggcaagtgcgcaggaacccgacaaactgtccatggtgatgtacctgtctaagttctacgagctttttcggggaactccgctcaggcccgttgactcttggagaaaaaactatggcgaaaacgcagatttaagcctcgcgaaatcttccatctcgaacaactatctgaatctcacattcccaagaaaacgcacaccaagggtcgatgggcagactggcgaaaatgatatgaataaacggcgaagaaaaggattcactaatctggatgaaccttcgaacttctcatctcggtctttggggtccaaccaggagtgtggatcatctaaggagggcggtaaccagaacaaagtcaagagcatggccaaccagttgctggccaagttcgaggagagcaccagaaacccctccttgatgaaacaagaacgtagagtgagtggcatcggaaaacccgtcttgtgttcctctagtggacccccagtccatagctgttgtcccaagccagaggaagccaccccatcaccctccccacctctgaaaagacagtttccttccgtggtcgtgacagggcacgtgctgcgagaactaaagcaggtgagcgctggatcagagtgtcttagccgcccctggcgggcaagggccaaatctgacctgcagttgggcggaacagaaaattttgccaccctccctagcacacggccgcgcgcgcaggccctgagcggtgtcctttggcgtcttcagcaggtcgaagaaaaaattttacaaaaaagagctcagaacctagctaatagagaatttcatacgaaaaatatcaaagagaaggcagctcatctcgcaagcatgtttgggcatggggatttccctcagaacaagctcttatctaaaggcctctcccacacccaccccccatcccctcctagcagactcccctcaccggatcctgccgctagcagctcaccatcaactgtggactctgcgtctcccgctagaaaattgactgtgggcaaagtgtccagtgggatcggcgccgcagcagaagtgctagttaacctttatatgaacgaccaccggccaaaagcccaagccacatctccagatctcgaatcaatgcgaaagtcgtttcctttaaatctgggcggaagtgatacctgctacttttgcaagaagagggtgtacgtgatggaaaggttgtccgctgagggccacttttttcacagggagtgctttcggtgttccatttgtgcgactactctacgcctcgctgcatatacgtttgattgtgatgaggggaagttttactgcaagccccactttattcattgcaagaccaacagtaagcagcggaagcgtcgtgccgagcttaaacagcagagagaggaggaagcaacgtggcaggagcaagaggctcctcgccgggacacacccaccgaaagctcctgtgccgtcgccgcaatcggaacattggaaggatccccaccagttcatttcagcctaccagtgttgcatcccctgctgggatag

SEQ ID NO: 195117 - DNA, 2931 bp, synthetic construct
  misc_feature 1..2931: note = Description of Artificial Sequence: Synthetic coding sequence
  source 1..2931: mol_type = other DNA
atgggcgagaacgaggacgagaagcaggcccaggccggccaggtgttcgagaacttcgtccaggccagcacctgcaagggtacccttcaggcgtttaacattcttacgcgtcacctggatttggaccccctggaccatagaaacttctatagcaagctcaagagtaaggtgacaacgtggaaggccaaggcattgtggtataaactcgataaacgagggtcccataaggagtacaaacggggtaaatcatgcactaacacaaagtgcttgatcgtggggggtggcccgtgcggcctccggaccgctattgagctggcgtacctcggcgcaaaggttgtcgtcgtcgaaaaaagagatagttttagccgcaacaacgtgctgcatctgtggccattcactatacacgacctccggggactcggagcgaaaaagttctacggaaagttctgcgccggttccattgatcatatcagtatccggcaattacagctcatcctgttcaaagtcgccctcatgttgggcgtggagatccatgtgaatgtggagttcgtgaaagtgctggagccccccgaagaccaggagaaccaaaagataggatggcgcgccgaattcctgccaactgaccattccttgtcagaattcgagtttgatgtgattattggcgcagacggaagaagaaataccctagagggctttcgtcggaaagaattccggggcaagctcgccatcgctataaccgccaacttcattaacagaaactccactgcagaggctaaagtggaggagatcagcggtgtggcgtttattttcaaccagaaattttttcaggacttgaaggaggaaaccgggatcgacttggagaacatcgtgtactacaaagattgtactcattatttcgtcatgaccgctaagaagcagtcgcttttggacaagggagtgatcattaacgattacatcgataccgagatgcttctctgcgccgagaacgtgaaccaagacaatttattaagttatgcacgggaagcagccgatttcgctactaattatcagttgccttccctcgatttcgcgatgaatcactatgggcagcctgatgtggctatgtttgattttacctgtatgtacgcctctgagaacgccgcactggtgcgcgagcggcaggcccatcagcttttggtcgctttagtgggggactctttactcgagcctttttggcctatgggcactggctgcgcccgggggttcctggctgcttttgatacagcctggatggtgaagagctggaatcaaggaacccccccccttgagcttctggcggagagggaatctctgtaccgcctgttgccgcaaacgaccccagagaacatcaacaaaaacttcgaacaatatacactcgatcctggaactcgttacccaaacctgaattcccattgtgttcgcccgcaccaggtaaagcacttatacatcaccaaagagctggagcattacccccttgaaaggttggggtccgtacgacggagcgttaacctgtctagaaaggaaagcgatatacggccatccaagttgcttacctggtgccagcagcagacagaagggtaccaacacgtgaacgtgaccgacctgaccacatcctggcgctcaggactcgctctgtgcgccattatccataggtttaggcctgaattgattaactttgactcattgaacgaagacgatgccgtggagaacaaccagctggctttcgatgtagccgaaagagagtttggcatccccccagtcaccacaggcaaagagatggccagcgcacaggaacccgacaaattaagtatggtgatgtatttgtccaaattctacgaactgtttagggggacacccctcagacccgtggacagctggaggaagaattacggcgaaaatgccgaccttagcctggccaagtcctctatttctaataactacctcaatttaacctttccacgaaaacggactccacgagtcgacggacagactggagaaaacgacatgaataaacggaggaggaagggcttcaccaacttggatgagccatctaatttcagttccagatcattaggatctaatcaggagtgtggcagcagtaaggagggaggtaaccaaaataaggtgaaatcaatggctaaccagcttctggctaagtttgaggagagtactcggaatccatccctaatgaagcaggaaaaaaaaagcccatcaggcttccattttcatccctcacacctgagaacagttcacccccaggaaagcatgcgcaaaagttttcccctcaacctgggcggatctgacacatgctatttttgcaagaaaagagtctacgtgatggagaggctgtctgccgagggtcactttttccaccgggaatgcttcaggtgcagcatctgtgccaccaccttgagactggcggcttacacattcgattgcgacgagggcaagttttattgtaaaccacattttatccactgtaaaacaaattccaagcagagaaagagaagagcggagctcaaacagcagcgcgaagaggaggccacttggcaggaacaggaagcccctcgacgggataccccgacggaatccagctgcgccgttgctgcgattggaaccctcgagggatcccctcctggaatctccacatcgttctttaggaaagtgctaggctggcccttgcgattgccccgcgatctttgcaattggatgcagggtctcctccaggcagccggattgcatattagggacaacgcgtataattactgctatatgtacgaattgctctctctcggacttcctcttctgtgggcattttccgaagtattggcagcgatgtacagagaatccgaagggtccctagaaagcatttgtaactgggtactgagatgttttcctgtaaaactgcgctag

SEQ ID NO: 195118 - DNA, 363 bp, synthetic construct
  misc_feature 1..363: note = Description of Artificial Sequence: Synthetic coding sequence
  source 1..363: mol_type = other DNA
atgggcgagaacgaggacgagaagcaggcccaggccggccaggtgttcgaaaactttgtgcaggcaagtacatgcaaaggcaccctccaagcctttaacattctcaccagacacttggatctggatcctctagatcatcgcaacttctacagcaaactaaagagcaaagttacaacatggaaggctaaggctctgtggtataagctcgataaaaggggctcacacaaagagtacaagcgggggaaatcctgcactaacacaaaatgtctgatagtagggggaggaccctgtggccttcgcactgcaattgagctagcttacctcggagctaaagtagtcgttgttgaaaaaagggattcgtag

SEQ ID NO: 195119 - DNA, 405 bp, synthetic construct
  misc_feature 1..405: note = Description of Artificial Sequence: Synthetic coding sequence
  source 1..405: mol_type = other DNA
atgggcgagaacgaggacgagaagcaggcccaggccggccaggtgttcgaaaacttcgttcaagcatccacttgcaaaggcacattgcaggcttttaacattcttacacggcacttagacctcgacccccttgatcatagaaacttttattccaagctcaaatccaaggtcactacatggaaagcaaaggcactgtggtataaactggataagagaggatcacataaagaatataaacgagggaagtcctgtaccaacaccaagtgcctcatagtcggcggcggtccttgcggtctccggactgcaattgaacttgcttacctaggcgcgaaggtcgttgtcgtcgagaagcgggattcttttagtcggaataacgtgttgcatctgtggccatttacaatatag

SEQ ID NO: 195120 - DNA, 267 bp, synthetic construct
  misc_feature 1..267: note = Description of Artificial Sequence: Synthetic coding sequence
  source 1..267: mol_type = other DNA
atgggcgagaacgaggacgagaagcaggcccaggccggccaggtgtttgagaacttcgtgcaggctagcacctgtaagggtaccctgcaggcttttaatatcctgacccgacatctcgacttggatccactcgaccacagaaacttctactcaaagctgaagtctaaagtcacaacatggaaagctaaggcgctttggtacaaactggacaaacggggcagtcacaaggaatacaaaagaggaaaatcatgtaccaacacgaagtag

SEQ ID NO: 195121 - DNA, 12 bp, synthetic construct
  misc_feature 1..12: note = Description of Artificial Sequence: Synthetic coding sequence
  source 1..12: mol_type = other DNA
atgggcgagtag

SEQ ID NO: 195122 - DNA, 297 bp, synthetic construct
  misc_feature 1..297: note = Description of Artificial Sequence: Synthetic coding sequence
  source 1..297: mol_type = other DNA
atgggcgagaacgaggacgagaagcaggcccaggccggccaggtgtttgagaattttgtgcaggcaagtacctgtaaggggacgctccaagcattcaatattctcacacgccacttagatttagacccgctggaccatagaaacttctactcaaaattgaaaagcaaagtgacgacctggaaggcgaaggcgctctggtataagctggacaagcgtgggtcacataaagagtacaagaggggcaagagctgcactaataccaaatgtctaattgttggaggtggtccatgtggttag

SEQ ID NO: 195123 - DNA, 267 bp, synthetic construct
  misc_feature 1..267: note = Description of Artificial Sequence: Synthetic coding sequence
  source 1..267: mol_type = other DNA
atgggcgagaacgaggacgagaagcaggcccaggccggccaggtgtttgagaatttcgttcaggcatccacttgtaaggggaccttacaggccttcaacatcctcacccgccacctggacctggatccgctggatcaccgcaatttttatagtaagctgaagtccaaggtcacaacctggaaggccaaggcactatggtataaactggacaagcggggctcacacaaggagtacaagaggggtaaatcctgcacaaatacaaaatag

SEQ ID NO: 195124 - DNA, 309 bp, synthetic construct
  misc_feature 1..309: note = Description of Artificial Sequence: Synthetic coding sequence
  source 1..309: mol_type = other DNA
atgggcgagaacgaggacgagaagcaggcccaggccggccaggtgttcgaaaacttcgtgcaagctagcacatgcaaggggacgctgcaagccttcaacattctcacacgccatctggatctcgatcctctggatcatagaaatttttattctaaactgaagtcgaaagtgacaacctggaaggctaaagccctgtggtataagcttgacaaaaggggatctcacaaggaatacaaacgaggcaagtcctgtactaacactaaatgcctgatcgtgggcggaggtccatgcggccttcggaccgcatag

SEQ ID NO: 195125 - DNA, 2805 bp, synthetic construct
  misc_feature 1..2805: note = Description of Artificial Sequence: Synthetic coding sequence
  source 1..2805: mol_type = other DNA
atgggcgagaacgaggacgagaagcaggcccaggccggccaggtgttcgaaaactttgtgcaagcctccacttgcaagggaactcttcaggccttcaatatattgacaagacacctcgatttggaccctttggatcatcggaacttttatagcaagttgaagtccaaggttaccacatggaaggccaaggctttatggtacaaactcgataagagaggctctcacaaggagtacaaaaggggaaaaagctgtactaacaccaagtgtctgattgtcggaggtggcccgtgcggcctgcggacggcgatcgagctagcgtatctcggagcaaaggttgtcgtggtggagaagcgcgattcgttctctcggaacaacgtgctgcatctgtggccgtttaccatccatgatctgcgagggttgggggcaaaaaagttttatggaaaattctgcgccgggagtatagatcatataagcatcaggcagctacaactcatcttgttcaaagtcgcactgatgctgggagtcgaaatccacgtgaatgtggaatttgtaaaggtgttagagccgcccgaggatcaagagaatcagaagattggatggagagcagaattccttccgacagatcatagcctctccgaattcgagttcgacgtgattatcggcgctgacggcagaagaaacaccctggaaggcttccgccggaaagagttcagagggaaactcgcaatcgcaataactgccaatttcatcaatcgaaactccacggcggaggctaaggtcgaggaaatctccggagtagcatttatcttcaatcagaagtttttccaggatctgaaggaagaaacaggtattgacctagagaacatcgtctactataaggactgtacacactattttgtgatgactgcaaaaaagcaatcactcttagataagggggtaattattaatgattacatcgatactgagatgctgctgtgtgccgagaacgtaaaccaggacaacttactttcttacgccagagaggccgctgacttcgcaaccaactaccagcttccatcattggacttcgcaatgaaccactacggccagcccgatgtagccatgtttgatttcacatgcatgtatgcgtccgagaatgcagcccttgtgcgggagcgccaggctcatcaattactggtcgccctggtgggcgacagcctgctagagcccttttggccaatgggaaccgggtgcgccagagggtttctggccgcattcgacacagcttggatggtcaaatcgtggaaccaaggaaccccgcctctcgaattgctcgctgagcgggaatctttgtaccggctgttaccacaaaccacacctgagaacattaacaagaactttgaacagtatacgctcgatccaggtactcgctacccgaacctcaacagccactgcgtgaggccacatcaggtgaagcacctgtatatcacaaaggagctggaacattaccccctggagcgcctcggatcagttcgaagatctgtaaatttatcacgcaaggagtccgatattaggccttcaaagctgctgacctggtgccaacagcaaaccgagggctaccagcatgtcaacgttactgacctgacgactagttggcggtcaggacttgcactatgcgccattatccaccgtttccgacccgagttgatcaatttcgattccctaaacgaggacgatgcagtggaaaacaaccaactggcctttgacgttgccgagcgtgagttcggaatcccccccgtcactactgggaaagagatggcatcagcgcaggagccagacaaattgagcatggtcatgtacctttctaaattctacgaactgttcagaggtacccctttgagaccagttgacagttggaggaaaaattatggcgagaacgcggacctctctctggctaagagttcaatcagtaacaattatctgaatctgacattcccaaggaagcggaccccccgggtagacggccagactggcgaaaacgacatgaacaagcgccgaagaaaaggctttaccaatttggacgagccatctaatttctcttctcggagcctgggctcaaaccaggaatgtgggtccagtaaggaggggggcaatcagaataaggtgaagtccatggccaatcaactcctggccaagttcgaggaatctacccgcaaccctagtctgatgaaacaagagaagaaatctccatccggctttcatttccatccctcccacttgagaaccgtccatcctcagctcaccgtcggcaaggtttcctccggtatcggcgccgcagcagaggtgctggtcaacctgtacatgaatgaccaccggccaaaagcccaagctacgtcaccggacctggagtcaatgcgcaaatccttccccttgaatcttggcgggtctgacacctgctacttctgtaagaaaagagtgtacgtcatggaacgtctgtcagcggaggggcatttcttccatcgggagtgctttcgttgctctatttgcgcgaccacgctgcgtctggccgcgtacacattcgactgcgacgagggaaagttctactgtaaaccacactttatacactgcaagaccaattccaagcagcgaaaacgccgtgcggaacttaagcagcaaagagaagaagaggcaacttggcaggagcaagaggcacctagaagggatacccccactgagtctagttgcgcagttgcagcaataggcactctggagggttctccacccgtccattttagcctgcccgttctgcaccctctcctggggtag

SEQ ID NO: 195126 - DNA, 1638 bp, synthetic construct
  misc_feature 1..1638: note = Description of Artificial Sequence: Synthetic coding sequence
  source 1..1638: mol_type = other DNA
atgcggagcagccccgacctgaacagccactgcgtgcggccccaccaggtgaaacatctgtacattacgaaagagctggagcactatccactggaaaggctcggatcagtgaggcgctccgtaaatctttcccgaaaggagtctgatatccgtccaagtaagctgctgacttggtgtcagcagcaaactgagggttatcaacatgtgaacgtcaccgacctcacgacaagttggcggtcgggcctggctctctgcgccatcattcatcgctttcgacctgaactaataaatttcgactctctgaacgaagatgatgcggtagagaataaccagctggcattcgatgttgccgagcgagaattcgggattcccccagttaccaccgggaaggagatggcatccgcccaggagcccgacaagctctccatggtaatgtatctgagtaaattctatgaactgtttagaggtaccccacttagacctgtggattcctggagaaagaactatggagaaaacgccgatctgtcactagctaagtcctccataagcaataactacctgaacctgacatttcctcgcaaacgtactccaagagtcgatggccagaccggggagaatgacatgaacaagagacggcgtaagggctttacaaacttagatgaaccctctaactttagtagccgaagcttaggcagtaaccaagagtgcggcagcagtaaggaaggggggaaccagaataaagtgaagtccatggcgaaccaactgctagccaagttcgaagagtctacccgcaatccaagcttgatgaagcaagagaaaaaatctccctccggctttcactttcacccatcccatttgcgcaccgtgcatcctcaactgacagtaggcaaggtgagctcagggattggggcagctgccgaggttctggttaatctgtacatgaatgaccaccgtcccaaggcccaggcaacaagccccgacctggagtctatgaggaagagtttccctctgaatctagggggcagcgatacctgctacttctgcaagaaacgcgtctatgtgatggagcgcctctccgccgaagggcactttttccacagggagtgcttccgctgctctatatgcgccacgaccctgagactggcggcctatactttcgattgtgacgagggaaaattctactgtaagcctcactttattcactgtaaaaccaatagcaaacagagaaaacggcgcgcggagctgaaacagcagcgagaagaagaagccacttggcaggaacaggaggccccacgacgggatacaccaacagaatcctcttgcgctgttgccgcaataggaacactggagggatcccctccaggtatctctactagctttttccggaaagtactgggttggccactcagacttcctagggatttatgtaactggatgcagggactcttacaagcagcaggcctccacatcagggataatgcttacaactattgttatatgtacgagctcctgagcctcggactacctctgctgtgggcctttagcgaggtcctggccgctatgtaccgagaatcagaggggagcctggagagcatctgtaattgggtgctgaggtgcttccccgtcaagcttagatag

SEQ ID NO: 195127 - DNA, 3273 bp, synthetic construct
  misc_feature 1..3273: note = Description of Artificial Sequence: Synthetic coding sequence
  source 1..3273: mol_type = other DNA
atggccaccctgctgagccacccccagcagcggccccccttcctgcgacaggccattaaaatcaggagaagacgggttcgcgacttacaggatcccccgccccaaatggcacccgagatccagccgccatcccaccacttcagtcccgagcaaagagctcttctctatgaagacgctctgtacacggtccttcaccgattagggcaccccgagcctaaccatgttacagaggcctccgagttgctccgatatctgcaagaggctttccacgtagaacccgaagaacatcagcagaccctgcaacgcgtccgtgaactggaaaagccaatcttttgcctgaaggccactgtcaagcaggctaagggaattctcgggaaggacgtgtcggggttctctgacccctactgcctgcttggcattgagcaaggggtaggagtcccgggcggctcccctggctcgcgacaccgccagaaggccgtcgttaggcacactattcctgaggaggagacccatcggacccaggtgattacacaaactctgaatcctgtgtgggacgagactttcatcttggagttcgaagatatcacaaatgcgagcttccatctcgatatgtgggatctggatacagtcgagagcgtgagacaaaaattgggcgagctgacagatctacacgggctgcgtcgcatttttaaggaagcaagaaaggacaagggacaagacgacttcttggggaacgtcgtactgcggctgcaggatttgcggtgtcgggaagatcagtggtaccctcttgaacctcggactgagacctatcccgataggggtcaatgtcatcttcaatttcagcttattcataaacgcagagccaccagcgcgtcaagatcccagccgagctacaccgttcacttgcacctactgcagcaactggtcagtcatgaagtgacacaacatgaagcgggaagtaccagctgggatgggagtcttagccctcaggctgccacggtgctgtttctgcacgccacgcagaaggacctcagtgactttcatcagtcgatggcgcagtggctggcttactcccggttatatcagagcctggagttcccatccagctgtttattacaccctattacatccattgagtaccaatggatccagggaagactgaaggccgagcagcaggaggaactggcagcctctttcagctccctgctgacttacggtctcagtcttatccgccggtttaggtctgtgttcccattgtccgtctccgattcacctgcgcggctgcagtcactgctgagagtcctggtccagatgtgcaagatgaaggcttttggtgagctttgtcccaacacagctccactccctcagcttgttaccgaagccttgcagacggggacaacggagtggttccacctgaagcagcagcaccatcagcctatggtacagggcatccccgaggccggcaaagcgctgttagggttggttcaggatgtgattggggatttgcatcaatgtcagcgcacctgggataagatcttccataacacgctgaagatacacttatttagcatggcctttcgagagctgcagtggctggtggctaaacgtgtccaggaccatacaaccgttgtcggcgatgtagtaagcccagaaatgggtgagtcactgtttcaattatatatctcacttaaagagctgtgccagctgcggatgtcgagcagcgagcgggatggcgtcttagccctggacaatttccacagatggtttcaacctgctatcccttcttggctgcagaagacctataatgaggcactggcgcgagtccaacgtgccgtccaaatggacgaactggtcccacttggagagctgacaaaacactccacatctgccgtggatttgagcacctgcttcgctcagatctcgcatactgccagacagctggattggcccgatccagaagaagcatttatgatcactgtaaaattcgtagaggatacctgccgattagcgctcgtgtattgctccctcattaaagccagagccagagagctctcttctgggcagaaggatcaggggcaagctgccaatatgctgtgcgttgtagttaacgatatggagcagttgcggctggttatcgggaagttgcccgctcagctcgcctgggaagctcttgaacagagagtcggcgctgtccttgagcaggggcagctgcagaatactttgcacgcccaactgcagagcgcactggctgggttaggccacgagatcagaaccggcgtgaggactctggcagagcagttggaggtgggcattgccaagcatattcaaaagctcgtgggtgttagggagtccgtgctccccgaggacgcaattctgccactgatgaagttcttggaggtagagctctgttatatgaacaccaatctagtccaggagaacttcagcagtctgctgactctgctatggactcacaccctaacagtactggtagaagctgccgcaagccagagaagttccagcctagccagtaacaggctaaaaattgccctccagaatcttgagatctgcttccacgctgagggctgcggcctcccccctaaagccctccataccgccactttccaagcactccagcgggatctggaactgcaggcagccagctctcgggagctgattaggaagtatttttgctctagaatccaacagcaggccgaaactacctctgaggagttgggtgctgttacagtcaaggcgtcatatcgggcatctgagcagaaactaagagtcgaactgctcagcgcaagcagtctgctgcctctggactcaaacggatccagtgatccttttgtccagcttactctggagccccgacacgagtttccggagttagctgctagggagacacagaagcataaaaaggacttgcatcccctgtttgatgagacattcgagttcttagtgccggcggagccgtgtcgcaaggctggagcatgtctgctgctcacagtgctcgactatgacacgctcggggccgacgatctggaaggcgaggctttcttgccactcagagaggtgcccggccttagcggcagtgaagagcccggagaggtgccccagactcgccttccattgacatacccggcacctaacggagaccccatcttacagctcttagagggacggaagggagacagagaagcacaggtgttcgtgagattaaggcgccaccgagcaaagcaggccagccaacacgctctccgaccagcaccgtag

SEQ ID NO: 195128 - DNA, 2847 bp, synthetic construct
  misc_feature 1..2847: note = Description of Artificial Sequence: Synthetic coding sequence
  source 1..2847: mol_type = other DNA
atggaggagcggaagcacgagaccatgaaccccgcccacgtgctgttcgataggtttgtgcaggccacaacctgtaaaggtacattgaaagcattccaggaattatgcgatcatctggagctgaagcccaaggactatcgctctttttatcataaactgaaaagcaagttgaactattggaaagccaaagccctatgggcaaagctcgacaagagagggtcacataaggattacaagaaagggaaagcttgcaccaacactaagtgtttgattattggagcgggcccctgtgggctcaggaccgccatcgatctttccctgctgggagccaaggtcgtggttatcgaaaaaagagatgcgttttctcgcaataacgtactgcacctttggccgttcactatccacgacctccggggtcttggcgcaaaaaaattctatggaaagttctgtgcgggagcaattgaccacattagtattaggcagttgcagctaattctgctaaaagtggccctaatcctgggaattgagatccacgtcaatgtagaattccaaggactaatccaaccaccagaagatcaggagaacgagagaatcggctggagggctcttgttcacccgaagacacatcccgtgtcagagtacgaatttgaggttatcatcggaggagacgggagaagaaatactctagaaggcttcagacgtaaggaatttcggggtaaattagccattgcaatcaccgctaatttcatcaacaggaataccacagccgaggctaaagtcgaggagatcagtggcgtggcattcatttttaaccagaaattttttcaagagctccgggaggccaccggaatcgacttggagaatatcgtgtattacaaagacgatacccactattttgtcatgacagcaaagaagcagtctctgctcgataagggcgtgatacttcacgattacgcggatactgagctcctcctgtcccgagaaaatgtagaccaggaggccctgctctcctatgcaagagaggccgctgacttctcaacacagcagcagctgccaagcctggactttgctattaaccactatggacaaccagacgtcgccatgttcgattttacctgtatgtatgcatctgagaatgcagcccttgtaagggagcaaaatggtcatcagctgttagtggccttggtcggtgatagtctgttggaacctttttggcctatggggacagggattgcgagaggttttcttgcggctatggattcagcctggatggtccgatcttggagtcttggtacaagtcccttggaggttctggcagagagagaaagcatctaccggctccttccccagactacacccgaaaatgttagtaagaatttctcacagtactctatagacccagttaccaggtacccgaacattaatgtgaatttcctcaggcccagccaggtgcgccatctttatgacacaggtgaaaccaaggacatacatctcgagatggaatctcttgtgaactcccggaccactcccaaattaacccgcaacgagagcgtggcccggagcagcaagttgctgggctggtgccagcgacagacagacggatacgctggtgtaaacgtgactgacttaacaatgagttggaaatcagggctcgccttgtgtgccataatccatcggtacaggcctgatcttatcgacttcgactctcttgacgaacagaacgtggagaaaaacaaccagttggccttcgatatcgctgagaaggaactgggaattagcccaatcatgacaggaaaagagatggcgtcggtcggagaaccagataaactctctatggtgatgtacctcacccagttctatgagatgtttaaggacagcctcccaagttcagataccctcgacttgaacgctgaggagaaagctgttctgattgcttctacccgctctcccattagcttcttgtctaaattgggacagactatttctcggaagcgctcgcctaaggataagaaagaaaaagaccttgatggcgccggcaagcggagaaagaccagccaatccgaggaggaagaggcaccaagaggtcaccgaggcgagcgacccacgctcgtctcaactctgaccgaccggcgtatggatgtcgcggtaggcaatcagaataaggtaaagtatatggctacacaactcctcgccaagtttgaggagaatgccccggcacagtctatcggaatccgacgccagggtagtatgaaaaaagaattccctcagaatctgggcggtagtgacacctgctacttttgtcagaagagagtgtatgtcatggagcggctctccgccgagggcaagttttttcatagatcttgtttcaaatgcgagtactgtgcaacaacattgcgactgtctgcgtacgcatacgacattgaagatggaaagttttattgcaagccacactactgctatcgactcagcgggtatgcccagaggaaacgtcccgccgtcgcaccactaagcgggaaggaagccaagggacccctgcaggacggcgccactacagatgccaatgggagagccaatgccgtcgcatcttctactgagcggacaccaggttccggcgtgaacggccttgaggagccaagcatcgcaaagagacttcgcggcacacccgagcgaatcgagctggaaaactatagactgtctctgcgccaggcggaggcgttacaagaggttccggaggagacacaggctgaacataatctcagctcagtgctcgacacaggcgccgaagaggacgtcgcttctaggagtgctcgcagggctgcaggaaggccaccggctaccaggccctag

SEQ ID NO: 195129 - DNA, 2901 bp, synthetic construct
  misc_feature 1..2901: note = Description of Artificial Sequence: Synthetic coding sequence
  source 1..2901: mol_type = other DNA
atggaggagcggaagcacgagaccatgaaccccgcccacgtgctgttcgacagattcgtccaagctactacttgcaaaggtactcttaaagcgtttcaggagttgtgtgatcatttagagttgaagcccaaagattatagatcattttaccataagctcaaatccaaactgaattactggaaagccaaagccctatgggctaagctggataaacgtggcagtcacaaagactataaaaagggcaaagcttgtacaaacacaaagtgtctgatcatcggagcggggccatgtgggctccggacagccatagatctatcactcttaggcgctaaagtggtggtaatcgaaaagagggacgcattctccaggaataatgtgctccatctgtggccttttactattcatgacctacggggcttgggcgccaaaaaattttacggaaaattttgcgcaggggctatcgatcatatctcaatcaggcagttgcaactcatactccttaaagtcgcgctgatcctgggaatagagatccatgtcaacgtcgaattccagggattaattcagccgcctgaggaccaggagaatgaaagaattggttggagagccctggtccatcccaagactcatccagtgtcagagtacgagttcgaagtgatcatcggaggagacggcagacggaacaccctcgaagggttcaggcggaaagagttccgaggcaaactggcaatagcaattaccgctaacttcatcaaccggaacacaaccgcagaagccaaagttgaggagatctccggtgtggcctttatattcaatcagaagttcttccaggagctcagagaggcaaccggcatcgatctggagaacattgtatattataaggatgatacccactactttgttatgacggctaaaaagcagtcgctgctggacaaaggagtcatcctccacgattacgcggatacagaactgctgctgtctcgagagaacgtggatcaggaagctctactgagttacgcacgcgaagcagcagatttcagcacgcaacagcagctcccaagtctagactttgccatcaatcactatggccaacctgatgtcgctatgtttgattttacttgcatgtacgcttccgagaacgcggcccttgtaagagaacagaacggacaccagttgctcgtagcccttgtcggggacagtttactggaacctttctggccaatgggcaccggaatcgccaggggttttctggcggccatggacagcgcatggatggttaggtcgtggtcgctgggaacatcccctttagaggtcttggccgagcgggaatccatttacagattacttccccagaccactccagagaacgtgtctaagaactttagtcagtattccattgaccccgtcaccaggtatccaaatatcaacgtgaactttctaagaccttcccaagtgcgccatctctacgacaccggggaaaccaaggatatacacctcgaaatggaatcactcgtcaactccaggacaactcccaagctcacgagaaacgaaagcgttgcgcgctcttccaagttgctggggtggtgtcagcggcagacagacggttatgcaggcgtgaacgtcactgatctgaccatgtcttggaagagtggcctagccctgtgtgcaatcatccacaggtacagaccagatctgattgactttgatagtctggacgaacagaatgtagaaaaaaataaccaactggcctttgatatcgctgagaaagagttgggaatctctcctatcatgacaggcaaggagatggcttccgtcggtgaaccagataaactttccatggtcatgtacctgacacaattttatgaaatgttcaaagactctctcccctcatctgataccttggacctcaatgcagaggagaaggctgtgcttatcgcatcaaccaggtctccaatttctttcctgtctaagctgggacagacaatttcccggaagcgctccccaaaggataaaaaagaaaaagacttagatggtgcagggaaacggcgcaaaaccagtcaatctgaggaagaagaggcgcccagaggacacaggggcgagcgtccaactctggtatccacactgacagatagaagaatggacgttgccgtgggaaatcaaaataaggttaagtatatggcaacacaactgttggccaagttcgaggaaaacgcccctgcacagtctattggtattagacggcagggaagtatgaaaaaggagtttccgcagaacctaggcggatctgatacttgctacttctgccagaagagggtgtacgtcatggagcgactaagcgcagaaggcaagttcttccatcgatcatgctttaaatgtgaatattgcgcgactaccctaaggctctcagcgtatgcctacgatattgaagatggtaaattttattgcaaaccccattactgttatcggctgtccggatacgcgcagaggaaacggcccgccgtggctccgctgtctggaaaagaggccaagggtccccttcaggatggggctaccacagacgccaatggccgggcgaatgccgtcgcatcgtccaccgaacggacccccgggagcggcgtaaatggactggaggagccaagcattgcaaagcggttgagaggtaccccagaaagaatcgagctagagaattatagactgagtctgcgacaggctgaggccctgcaggaagtgccggaggagactcaggccgagcacaatttgtcaagcgtgctcgacactggcgccgaagaagacgttgcatcccgggactgggtctccccctggctgccacgaatggtctctaactcgtgggcacagatgatccaccctcctcagcctcccaccgtgttaggtagtcaaatgtag

SEQ ID NO: 195130 - DNA, 4713 bp, synthetic construct
  misc_feature 1..4713: note = Description of Artificial Sequence: Synthetic coding sequence
  source 1..4713: mol_type = other DNA
atgagcgacagcctgtggaccgccctgagcaacttcagcatgcccagcttccccggaggaagcatgttcagaaggacaaagtcatgccgaacctcaaatcgcaagtctctgatattgacctccactagccctacgttgccaaggcctcacagcccattgcccggccacctggggtcttctcccctggatagcccacgcaacttttcccctaatacaccagcacacttttcatttgccagctctcgaagggcagacggtcggagatggtcattagcatccctcccctcatctggctacgggaccaacaccccctccagcacagtctcctcttcttgctcctctcaggagcgcttgcaccaactgccctatcagcccacagtagacgaactgcactttctgtccaaacacttcggaagtaccgagagcattacagatgaggatggaggccgtcgttcacctgcagtgcgacctaggtctcgcagcctctccccgggcagaagcccgtcttcttatgataacgagatagtgatgatgaatcacgtgtataaagagcggtttcccaaggcaactgcacaaatggaggaaaagctcagagattttacaagagcatacgagcccgacagcgtattgcctttggccgacggcgtcctgagctttattcaccaccagattatcgagctggctcgtgattgtctcacaaagagcagagatgggcttatcaccacagtatacttttacgagctgcaagagaatttagaaaagttgctccaggatgcctatgagcgtagcgaaagcttggaagtagccttcgtgacacagttagttaagaagctgctgattattatatcccgccccgctagactgctcgaatgccttgaatttaatcccgaggaattctatcatctcctcgaagctgcagaggggcacgcgaaagagggccaccttgtcaagacagacatccccaggtacatcattcggcagctaggcctcacaagggacccttttcccgatgttgtccatctggaggagcaggacagcggtggttctaacacccccgagcaggacgatctgtctgaagggcggtctagcaaagcaaagaagcccccgggcgaaaatgattttgataccatcaaactgatatcgaacggggcttacggagctgtgtacttggtcagacaccgagatactcggcagagattcgccatgaagaagatcaacaagcagaaccttatcctgaggaaccaaatacagcaggcctttgtggaacgtgatatcctgacatttgccgagaaccccttcgtggtgggtatgttttgctctttcgagactcggcggcatctgtgcatggtaatggagtacgtggaaggaggcgactgtgcgaccctgctcaagaacatcggagcgcttccagtagaaatggcaaggatgtattttgctgagacagtgctagccctggagtacctgcataactacggtatagttcaccgagacctgaaacctgataatctcttaatcacgagcatggggcacatcaagcttaccgatttcggcctgtccaagatgggcctgatgtctttaactaccaatctgtatgaaggtcatatcgaaaaggacgcacgtgaatttctggacaaacaagtatgtggcacacctgaatatattgcacccgaagtgatactcaggcaggggtatggaaagccagtagactggtgggccatgggtataatactgtatgagtttctggtggggtgtgtccctttcttcggagatacgccagaagaactgtttggtcaggtcatatccgatgatattctctggcccgaaggcgacgaggccctgccaaccgaagcccaactgctgattagtagtcttctgcagaccaaccccttggtaaggttgggcgctggcggggcatttgaagtgaagcagcatagtttttttagggatttggattggacagggctcctgagacagaaagctgagtttataccacacctcgaaagtgaagatgacaccagttactttgataccaggtctgatcgctatcaccacgtgaactcatacgacgaggatgacacaacagaggaagagcccgttgagataagacagttctcttcctgcagcccccgcttctccaaggtttactcatccatggaacagttgagtcagcatgagcctaagaccccagtggcggcggctggcagtagcaaacgggagccctcaaccaaaggcccggaggagaaggtggctggcaagcgggaaggactggggggcctgacactccgcgagaaaacttggagaggaggaagccctgaaatcaagagatttagtgcgagcgaggcctcgtttctagagggagaggcgtccccaccccttggcgcccgcagacgctttagcgctcttctcgagccctcaagattctcagctccacaggaggacgaagatgaggcacggctgaggagaccacctcggccctcgagcgatccggccgggagcttggatgcaagagctccaaaggaggagacacagggagaaggcaccagttccgctggcgattctgaggccaccgatagacctcgacctggggatctgtgccccccttcaaaagatggggacgcctctggacctcgcgcaaccaatgacttggttctgaggcgggcccgccaccaacagatgagcggcgatgtagctgttgagaaaaggcccagtcgaactggcggcaaagttataaagtccgcgtcggccactgccctctccgtgatgattccggccgtggatccccacggaagcagtccactggcatctcctatgtccccacggagcctgagcagcaatccaagctcccgagacagcagcccctcccgcgattactcccccgctgtgtctggcttacgttctcccataaccattcagcgctcgggtaagaagtacggtttcaccctccgggctatacgcgtgtacatgggcgataccgacgtatatagcgtccatcatatcgtttggcacgtcgaagagggggggccagctcaggaagccggtttatgcgcgggagatttgatcacccacgtaaatggagaaccggttcacggtatggtgcatccagaggtcgtggaactgattctgaaatcagggaacaaggtggctgtgacaacgactcccttcgagaacacgtctatccggattggcccagccagaagaagttcatacaaagctaagatggctcgcagaaacaaacggccctctgccaaggagggacaggaatcaaagaaacgcagctctctgtttagaaagattacaaaacagtcaaatctgctccacacatcccggtcgctcagttccctgaatcgctcacttagctcctctgacagtttgcctggttctcccacacatggcctccccgctaggagcccaacacattcttataggtccacgcctgactctgcatatttaggagctagctctcaatcctcttcgccggcatctagtacaccaaattccccggcctcctccgcttcccatcatatccggccgtcgaccttgcatgggctgtcccctaagcttcacaggcagtaccgatctgcacgttgcaagtccgccggcaacattcccttaagtcctcttgcacatactcccagtccaactcaggcctcccctcctcccctgcccggacacactgtgggttcatcgcatactacgcagtccttccctgctaaactccactcaagcccccccgtggtgcggcccagacctaagtccgcagagcccccacggtctcccctcctgaaaagagtacagtctgctgagaaattgggagccagtctcagcgcagataagaagggcgccttgcggaagcattctctggaggtcggccatcccgattttcgtaaagattttcacggtgagcttgccttgcatagtctggccgaaagtgacggcgaaactccgccagttgaagggttaggagctcccaggcaggtagccgtgaggcggctaggtcgccaggagagcccgctatccctgggcgctgaccctttgctccccgaaggggcatcacgccccccagtgtcatcaaaagaaaaggaatcccccggcggcgctgaggcctgcaccccacccagagcaacaactcccggcggtcgaactctagagagagatgttgggtgcacccggcatcagagcgtgcaaactgaggatggaactggcggaatggcgcgagctgtggcaaaggctgctctgtcccctgtgcaggagcacgagaccggccgccgctcttcgtcaggcgaggccggcacaccactggtgcctattgtcgtcgaaccagcccgccctggcgcaaaggctgtcgtgcctcagccgctcggcgccgatagcaagggtctccaggagccggctcctctggctccgagtgttcccgaggccccgagaggtagggaacggtgggtccttgaggtcgtggaggaaagaactacgttgtctggccctcgcagcaagcccgccagtccgaaactgtcaccagaacctcagacaccctcattggcccctgcaaaatgcagtgccccaagcagcgccgtcaccccagtgcccccagcgtctcttctcggaagtggaacaaaaccacaggtaggtctaactagccggtgtcccgcagaagccgttccccctgctggcctcaccaaaaagggcgtatcatccccggcaccacctggtccttag

SEQ ID NO: 195131 - DNA, 2178 bp, synthetic construct
  misc_feature 1..2178: note = Description of Artificial Sequence: Synthetic coding sequence
  source 1..2178: mol_type = other DNA
atgagcgacagcctgtggaccgccctgagcaacttcagcatgccctcttttccggggggttcgatgttccgccgtaccaagtcctgtcggacaagcaaccgcaaatcgttgatccttacgtcgacaagtccaacattaccaaggccgcatagccccctgcctggacatctcggcagttccccgttggactcaccacggaactttagtccaaatacccccgcacacttctcgttcgcttccagccgaagagcagatgggcggcggtggtcccttgcatcacttccaagctccggctacgggacaaatacccccagttccactgtaagttcaagctgtagcagccaggagcgcctgcatcagttaccctaccaacccacagtcgatgagctccacttcctctcgaagcacttcggtagcactgagtctatcaccgatgaggacggagggcgccgcagcccggctgttcgacctcgttcccggagtctgagcccaggtcgatctccaagttcatatgacaacgaaattgtgatgatgaatcacgtgtacaaagagcgtttccctaaggctacagctcagatggaagagaagctgagggattttactagggcctacgagccagacagcgtcttgccactggccgatggcgttctgagctttattcaccatcagattatagaactagccagggattgccttacaaagagcagggatgggctcattacaaccgtctatttctatgaattgcaggaaaatttggagaaattgcttcaggatgcctacgaacggtccgagagtttggaagttgctttcgtcacacagctggtgaaaaagttgttaataatcatctcccgccctgcccgcctcctcgagtgcttagagtttaacccagaggaattttaccatctgctggaagctgcggagggacatgccaaagaaggccacctcgtaaagaccgacatcccaaggtacatcatccgccagctcggtctcactcgggacccctttccagacgtggttcaccttgaggagcaggatagtggcgggtccaacacgccagaacaagacgatctgtcagagggcaggagcagcaaagcaaaaaagcctccaggcgagaacgactttgatactatcaagctgatttcgaacggtgcctacggagctgtctatctcgtacgccaccgcgatactcgccagcgctttgccatgaagaaaatcaataagcaaaacctgatcctgagaaatcagatacagcaggcctttgttgaacgcgatatactgacctttgctgagaacccattcgtggtgggaatgttctgttctttcgaaacgaggcgccacctgtgtatggtcatggaatatgtggaaggtggcgactgtgccacactgctgaagaatatcggggctctccctgtggaaatggccaggatgtactttgccgagacagtgctggctctggagtatcttcataattatgggattgtccacagagaccttaagcccgataatctgctcattaccagtatgggccatatcaagctgactgattttggactcagcaaaatgggactgatgagcctgacaaccaatctgtacgaagggcacatagaaaaggacgcccgtgaattcctggataagcaagtgtgcggcaccccagagtatatcgcccctgaggttattttgcggcaggggtacggcaaacccgtggactggtgggccatggggatcattctgtacgagtttctggtcgggtgcgttcccttctttggagacacacctgaggagctgtttgggcaggttatctccgatgacatcctgtggcctgaaggagacgaagctttgcccaccgaggcgcaactgctgatcagttcccttctgcaaactaatccactggttcggctgggcgccgggggggccttcgaggtaaagcaacattcattttttagggatttagattggacaggacttctgagacagaaagctgagttcattccccacctggagtctgaggatgacacctcctactttgacacacgttccgatcggtatcatcatgtaaatagttacgatgaggatgacactaccgaggaggagccagtggagatccgtcaattttctagctgttcccccaggttcagtaaggtttacagcctgaggatacatatgtatacctataaatag

SEQ ID NO: 195132 - DNA, 5397 bp, synthetic construct
  misc_feature 1..5397: note = Description of Artificial Sequence: Synthetic coding sequence
  source 1..5397: mol_type = other DNA
atgaagcggagccggtgccgggaccggccccagccccccccccccgaccggcgggaggatggcgtgcagagagcagccgaactcagccagtctctgccaccccgtcgtagggcacctcctggacgccagcggctggaggagagaacgggtccggccgggcccgaaggcaaagaacaggacgtcgtgacaggcgtctcacccctgctctttaggaaactcagcaatcctgacatctttagttccacaggcaaagtcaaattacaaaggcagttgtcacaggatgactgtaaactgtggcgggggaatctcgctagctctctgagtgggaagcagctccttcctctgagctcttctgtacactcttctgtcggccaagttacttggcaatcctcaggcgaggcaagcaacctggtgcggatgcgcaaccaatctctgggacagagcgctccttcattaaccgcaggcttgaaagaactcagcctgcctagacgcgggtccttctgccgtacaagcaatcgaaagagccttatcgtcacttcttctacttcacctacattgccaagacctcacagccccctgcacggccacactgggaactcccctctcgacagcccgcgcaactttagccctaacgcacctgcgcactttagctttgtgcctgccagaaggacagacggtcggcgctggtcgctggctagtttaccatcctcagggtacggaactaatactccaagtagcaccgtaagctctagttgctcttctcaggagaaactgcaccagcttccttttcagcccactgctgatgagctgcactttttgacaaaacatttctcaacagaaagcgtaccagacgaggaggggcggcagtcccctgcaatgcgtccgagaagcagatctctgagccccgggcggtcaccggtatctttcgactcagagattattatgatgaatcacgtgtacaaagaacgtttcccgaaggcgaccgcccagatggaggagcggctggccgagtttatttcaagtaacaccccagactcggtcctgcctcttgctgatggggcccttagctttatccaccaccaagtgatagaaatggcaagggactgccttgataaaagccgaagcggcctcataacaagccagtacttctacgaactccaagataacctggaaaagctgctgcaggacgcacatgagaggtctgagtcatctgaggtggcttttgtgatgcaactggttaagaagctgatgataatcatcgcaagacccgctaggctcctagagtgcctagagtttgaccccgaagagttttaccacctgttggaggcagcagagggccatgcaaaagaaggccaggggatcaagtgcgacataccccggtatatcgtttctcagttaggtttgacaagggacccgctcgaggagatggcacagctgagcagctgcgatagtccggatacacccgaaaccgatgactcaatcgaaggccacggcgcctccctgccaagtaagaagactccctctgaagaggatttcgagacgataaaattgatcagcaacggagcatatggcgccgtctttctcgtgcgccataagagcacccggcaacggttcgctatgaagaaaattaacaaacagaatctgatcctccgtaatcaaatccagcaagcattcgtagagagagatatcctgacgttcgcagaaaacccttttgtagtgagtatgttttgctcattcgataccaaacgccacctctgtatggtgatggagtatgtggagggcggtgattgcgcgaccttattgaaaaatatcggagctctgcccgtggacatggtccgtctgtacttcgccgaaaccgtcttggccctggagtatctgcataactacggaatcgtgcatagagacctgaaacccgataacctattgataaccagtatgggacacatcaaattgaccgattttggactctcgaaaattggtcttatgtcgttgactacaaacctgtatgagggccacattgagaaagatgctcgcgagtttttggacaaacaagtatgtgggactcctgagtacatagcgcctgaggtaatcctgagacagggctacggaaaacccgtcgattggtgggcgatgggcatcatcctatatgagtttctggtagggtgtgtgccctttttcggagacacaccagaagagctcttcggccaggttatatctgacgagatcgtatggcctgagggggatgaagcgctcccaccagatgcccaagatcttactagcaagctgcttcaccaaaatccattggaacgtcttggaactggctcagcctacgaagtcaaacagcaccccttcttcaccggcttagactggactgggctgctgcggcagaaagccgaattcataccccagctcgaatctgaagatgacaccagttatttcgatacccggtcagaacgctaccaccacatggattctgaagatgaagaggaagtcagcgaagacggttgtttggagatccgacagtttagttcctgctcacctagattcaacaaagtgtatagctctatggagcggctgtctctcctcgaggagcgccggactccccctcctacaaagcggtctctttctgaggagaaagaagaccacagcgatggcttagctggcttaaagggtagagaccgttcctgggtaatcggctctcctgaaattctgcggaagcgtctctctgtaagtgagtcctcccatactgaaagtgactcgagtccacccatgaccgtgcgccgtcggtgcagcgggttacttgatgctccaagatttccagaagggccagaggaagctagctccaccttgaggcggcaaccccaagaaggcatctgggtgcttacccccccctctggagaaggggtaagtggccctgtgaccgagcactccggggagcagaggcctaagctcgacgaggaggccgttggtcgttcgtccggttccagccccgccatggagacgcggggaagggggacatcacagctcgctgagggcgccaccgctaaggctatatcggatctggcggtccggcgggcccggcaccggctgttatctggcgacagtaccgagaaacggacagccagacccgtaaataaagtgattaagagtgccagtgctaccgctctctctctgctgataccgagcgagcaccatacgtgtagcccccttgcgtctccgatgtccccgcattcccagagctcaaacccatcctctcgcgacagcagccccagtagggacttcctgccggcccttggatctatgcggccccccatcataatccaccgggccggaaagaaatatggctttaccctaagggcgattcgcgtttacatgggggacagcgacgtgtataccgtgcaccacatggtttggcatgtagaagacggcggcccggcttccgaggccggcctccgccagggggatctgattacacacgtgaatggggagcctgtacatggactggtgcacactgaggtcgtggagctgatcctgaaatctggaaataaggttgccataagcactacccccttggaaaatacttcaatcaaagtgggacccgcgagaaagggcagttacaaagctaaaatggccagaagatccaaacgctctagaggcaaagatggccaggagagtcgcaaacgcagttcactcttcagaaaaatcacgaagcaggcttcccttctccatacttcacgcagtctcagcagtcttaacaggtctctgtccagtggagaatctggtcccggctcccctacccacagccattcacttagcccccgaagcccgacccagggatatcgggtgacccccgacgccgtccactcggtaggcggtaacagtagtcagtcctcatctccttctagctctgtgccatcgtcacccgccggctctggacacacaaggccttctagcctgcatggacttgcgccaaagctgcagcggcaatacaggtctccacggaggaagtcggcaggcagtattcccctttctcccctcgcccataccccctcccctcctccccctactgcttcgccccagcgaagtcccagcccacttagcggacacgtggcacaagcattcccaacaaaacttcacctgtcaccaccgctggggcggcagctgtctaggcccaagtcagcagaaccacctcgcagtcctttgcttaagcgggtccagtccgccgagaagctagccgccgccctggctgcctcagagaaaaagctcgccacttctcggaaacattctctggatctgccccattctgagctaaaaaaggagttaccccctcgggaggttagcccacttgaggtcgtgggagccagatcggtgctgagtggcaagggtgccctacccggcaaaggcgttttacagcctgcaccgtctcgggcgcttggcaccttacgccaagaccgggctgagagaagggagtccttgcagaaacaagaagcaatcagagaagttgacagctcagaagatgacacagaagagggccctgagaatagtcagggggcacaggagctgagcctggcaccccatcccgaagtctcccagtctgtcgccccaaagggtgcaggggagtcaggcgaggaagatccttttccttcacgggacccaagaagtctgggacctatggtgccatccttacttaccggtattactctgggacccccgcgtatggaatcaccttctggtccacacagacgcctgggaagcccgcaagctatcgaggaggcagcaagcagctcttcggcagggccaaaccttggccaaagtggagccacggaccctatcccacccgaggggtgctggaaagcccagcatcttcacactcaggcgctgaccgccctttcccccagcaccagtggtctgacccccacctccagttgcagccctcccagttcaactagcggaaagcttagtatgtggtcatggaagtctctgatcgaaggacctgaccgggcatcgccctccaggaaggccaccatggccggcggcctggctaatctgcaggatctcgagaacacaactcctgcgcagccaaaaaatttgtctccaagggagcagggaaaaacacagccaccaagtgcccctcgcctggctcatccgtcctacgaagatccatcacaaggctggctctgggagagcgagtgcgcacaggccgtaaaggaggaccctgctctgagtataacccaggtaccagacgcctctggggatcggcgacaggatgtgccttgtcggggctgtccattgacacagaaatccgagccaagtctgcggagaggacaagagcctggcggacatcagaaacatagagatctggcgcttgtccccgatgagttactgaagcaaacttag

SEQ ID NO: 195133 - DNA, 2379 bp, synthetic construct
  misc_feature 1..2379: note = Description of Artificial Sequence: Synthetic coding sequence
  source 1..2379: mol_type = other DNA
atgttcagccccaccagcgcccccgccctgttcctgaccaaggtgcctttctcagccgattgcgccttggctaccagtcccctggcaattttcttaaatccccgtgcacactcttcacctggcaccccctgttcatcccgccccctcccctggtcctgccgaacaagtaatagaaaatccctcatagttaccagctccacctctccgacccttccacgtccccacagcccactacacggccatactgggaactcgccactggacagccctaggaacttctcccccaatgcgcctgcgcatttctcattcgtgcccgctcgaaggacggatggcaggcggtggtcactggctagcctgccttccagtggttacggtaccaacacgccgtccagcaccgtgtcgagttcctgcagttctcaggagaaactccaccagctcccttttcagccaacagctgacgagctacatttcctaaccaagcatttctcaactgagagcgtgccagacgaagagggtcgacagagccccgcaatgagacccaggtcacgctcactctctcccgggcgatctccggtatctttcgactccgaaattataatgatgaatcacgtgtataaagagaggtttccaaaggccacagcacagatggaggagcgactcgccgagttcattagtagcaatacacctgactcagtcctccccctggcagatggtgctctcagtttcattcatcaccaggtgatagaaatggctagagactgtctggataaatcgcgaagcggtctgatcactagccagtacttctatgaacttcaggataatcttgaaaagctgcttcaggacgcccacgaacgatctgaaagcagtgaggttgctttcgtgatgcaattagtgaaaaagcttatgatcatcattgcccggcctgcaagactgctggagtgcctggagtttgatcctgaagagttctaccatctcctggaggctgccgaggggcacgcaaaggaggggcaaggtatcaaatgtgacatccccaggtatatcgtcagtcaactcggactaaccagagacccccttgaagagatggctcagttatcaagttgtgattctccagacacacctgaaacagatgacagcattgagggtcatggggcttcactcccctccaagaagaccccgtccgaggaggatttcgagacgataaagttgatctccaatggtgcatacggagcagtttttcttgtgagacacaagtcaacccgccaacgcttcgccatgaaaaagataaataaacagaatttgatcctgaggaatcaaatacagcaagctttcgttgagcgtgatatcctgactttcgctgagaacccttttgtggtttctatgttctgctcctttgacaccaagagacacttatgtatggttatggagtatgtggaaggaggagactgcgcaaccctcctgaagaatatcggggccctgcctgtggatatggtaagattgtactttgcagagaccgtactagctctggaatacctccacaactatggcatagtacatcgggatttgaaaccagataacctcctgattactagcatgggacatatcaaattaactgactttggcttgagcaaaatcgggctgatgtctctaacaacaaacctctatgagggccacattgaaaaggacgctcgcgagtttttagataagcaggtctgtggcactccagagtatattgccccggaagtgatactgcgacagggttacggcaaacctgtagattggtgggcaatggggatcattctctacgaatttctcgtgggatgcgttccgttcttcggggatactcctgaggagctgttcggccaggtgatctcagacgagatcgtatggcctgaaggcgacgaggctctgcctcctgatgcacaggacctgacctccaagctgctgcaccagaaccccctcgaaaggcttggcacgggaagtgcctatgaagtcaagcaacatccctttttcaccggtctggattggaccggccttctccgccaaaaagccgaatttattccacagctcgagtccgaagatgacacctcttactttgacacccggagtgagcgctaccaccatatggattctgaagacgaagaggaggttagcgaggacggatgtctcgaaattaggcagttcagctcctgtagcccccggtttaacaaggtgtactcctctatggagcggctttctctccttgaggaaaggagaactccccctcctactaagcgtagtctaagcgaagaaaaagaagaccactcagacggactcgccgggctaaagggaagagatcggagctgggtgattggttcacctgagcaccaccccagcgcatag

SEQ ID NO: 195134 - DNA, 4827 bp, synthetic construct
  misc_feature 1..4827: note = Description of Artificial Sequence: Synthetic coding sequence
  source 1..4827: mol_type = other DNA
atgaagcggagccggtgccgggaccggccccagccccccccccccgaccgacgggaggacggcgtgcagcgtgctgccgagctcagtcagagcctacccccacgccgacgagccccaccaggaagacagcgcctggaagagcgcaccggcccagcagggccggaggggaaagagcaagacgtggtgaccggcgtatctcctctcctctttagaaagctgtctaaccccgacatattctcctcaacaggcaaggtgaagctccagcggcaactgagccaggatgattgcaagttatggcgaggcaatctggcgagctcgcttagcgggaagcagttgctgcccctgtctagctccgtgcattctagcgtgggacaggtgacctggcagtcctccggcgaggcttcaaacttggttcgcatgcgaaaccaatccctaggacagtcagcaccaagcttaaccgccggacttaaggaactgtctttaccccgtagggggtctttctgcaggacttccaacaggaaatcattaatcgtgaccagttctacttcccctacactgccccgaccccactctcccctgcacggtcacacgggaaattcccccctcgactcaccccgcaatttttcacctaacgcgcccgcccacttttcctttgttcctgcccggcggaccgatggccggcgttggtcactggcgagtctgccaagctccggctatggtacaaataccccgagctcaactgtatcaagcagctgctcttctcaggaaaagcttcaccagctgccattccagccaacagccgacgaattgcattttctgacaaagcactttagtacagagagtgtgccagacgaagagggaaggcagtcacctgctatgagaccccgctcccgatccttatctccaggcaggtctccagtctccttcgacagcgagattattatgatgaaccacgtttacaaggagcgcttcccaaaagcacatgagcgatcagagtcatcagaggtggcattcgtgatgcaacttgtgaagaagctgatgatcatcatagctcgccctgcccggttgttggaatgcttggaatttgatcctgaagagttttaccatctgttggaggcagcagaaggacacgcaaaagaaggccagggcatcaagtgcgacattccgaggtacatagtcagccagttgggcctgacaagggaccctttagaagagatggcccagctttcatcctgtgattcgccagataccccagaaactgacgactctatcgagggtcacggggcctcactgccatccaagaaaactccatccgaagaggatttcgagactattaaactgatctctaatggggcctacggagcagtgttcctggtccggcataagtccacccgccagcggttcgctatgaaaaaaatcaataagcagaacctcattctgcgcaatcagatccagcaggcttttgtggaacgggacatcctaacatttgccgaaaacccatttgtggtgtctatgttttgtagttttgacaccaaaagacacttgtgtatggttatggaatacgtcgagggaggcgattgcgccacacttttgaaaaacataggcgcacttcccgtcgacatggtgaggctgtacttcgcggaaaccgtactcgctttggagtacctccacaattacgggatagtacatcgcgatttgaaaccagacaacttgctgataactagcatgggacacatcaagttaactgattttgggctgtccaaaatcggcctgatgagcctgaccaccaatctctatgagggtcacatcgagaaagacgcccgagaatttctggacaaacaggtgtgcggaaccccggagtacatcgcacccgaagtcattcttcgacaggggtatggtaagcctgttgattggtgggcaatggggataattctgtacgaattcttggtgggctgtgtgccatttttcggagacacacccgaggaactgttcggccaggtgattagcgacgaaattgtttggcctgaaggcgacgaagctcttcccccagacgcacaggacctgacgagcaagctcctacaccagaacccgcttgagagactggggaccggcagtgcttacgaggtgaaacagcatccctttttcacaggtcttgactggacaggtctgttacggcagaaagccgaatttattccgcagctcgaaagtgaggacgacacatcttactttgacaccaggtctgaacggtatcaccatatggatagcgaggatgaggaggaggtgagcgaagacggatgcctggaaatccggcagtttagtagctgctctcctaggttcaataaagtctacagttccatggaacggctgagcttactcgaggagcggcgcaccccaccaccgaccaagaggagtctctctgaagaaaaggaggaccactcagacggactagcaggcttgaaggggcgagaccggagttgggtgatcggctcaccagaaatcctgcgcaagcgactctccgtttccgaaagtagccataccgagtctgactcaagcccaccgatgacagtccgccgtaggtgttccggcctactcgacgcgccacgatttccggaaggacccgaagaagcaagcagcactcttcgccggcaaccacaagaggggatatgggtattgactccgccttcaggagagggggtatctgggcctgtgacagaacacagcggagagcagcgtccgaagctggacgaggaagctgtgggcagatccagcggctcatctcctgctatggaaaccaggggacgaggcacttcgcagcttgccgaaggcgcaactgcaaaggccatcagtgacttggcggtccgccgggctcggcacagattactcagcggggattctactgaaaagcggaccgccaggcctgtgaacaaagtaataaagtcagcctccgccacagcactcagcctcctgattccgagtgagcaccacacctgctcgcccctggcaagtccaatgtcacctcactctcagtcaagcaatcctagttctcgggattccagtccctacggatttacactgagggctattcgcgtctatatgggcgactccgacgtatatactgtgcaccatatggtctggcatgtggaagacggaggaccagccagtgaggcaggcctccgccagggagacctgataactcacgtcaatggagaacccgtgcatggcctcgtgcacaccgaagtggttgaactgattttgaaatcaggaaacaaggtggctatctcaacaaccccacttgaaaacacaagcataaaggttggccctgcacgaaagggatcctataaagccaagatggcgaggcggtccaaacgctcacgcgggaaggacggtcaagagtcaaggaaaagatctagtctttttaggaagattacgaaacaggccagcctcctccacacctccaggagtttgtcctcccttaacaggagcctgagctcaggggagtcagggcccggttcgccgacgcacagtcactctttatcccctcgctctcctacacaaggatatagagtcacaccagatgccgtacactccgagttgtctcggcccaagtctgccgaacctccccggagcccactactgaagcgggtccagagcgcagaaaagctcgctgccgccctggccgcaagtgagaagaagctggctacgagtcgtaagcatagtctggatctgccgcacagcgagttgaagaaggaactgcctcctagagaagtatcacccctagaggtggtgggtgccaggtccgtgttgagtggaaaaggggccttaccaggcaaaggggtcctgcagcctgctccatcccgcgcactgggaaccctgagacaggaccgggctgagcgaagagagagcctccagaaacaggaggctatcagagaggttgactcgagcgaagatgacacagaggagggaccagaaaactctcagggggcacaggagttgtctttggccccacaccccgaagtttcgcagagtgtcgcccccaagggcgcaggagagtctggtgaggaggatcccttccctagccgagatccccgctccctgggccctatggtgcccagcttgttgactggtatcactctgggaccaccaagaatggagtcaccgagcgggcctcataggcggctggggtcacctcaggcgatcgaggaggctgcttcttcctccagtgctgggcccaacctgggccagagcggtgcaacagaccctattcctcccgaggggtgttggaaggcacagcacttgcacacacaagcccttacagccctgtcaccttctacctccggcctgactccgacgagctcctgctctccacctagctctacaagcggaaaactctccatgtggtcatggaaatctcttatcgagggtcccgacagggctagcccatcacgcaaggcgacaatggccgggggactggccaatctgcaggatctggagaacaccacgccagcacagcccaagaacctgtcacctcgagaacaggggaagacacagcctcctagtgctccccgcctggcccatcctagctatgaagatccgagccaaggatggctctgggagtccgagtgtgctcaggccgtgaaagaggacccagcattgtctattacacaggttccagatgcgtcgggagatcggcggcaagatgtgccctgcaggggatgccccctcacacaaaaatccgaaccaagcctgcggagaggccaggagcccggggggcaccagaaacatagggacctcgcactggtgcctgatgaattactgaagcagacttag

SEQ ID NO: 195135 - DNA, 1893 bp, synthetic construct
  misc_feature 1..1893: note = Description of Artificial Sequence: Synthetic coding sequence
  source 1..1893: mol_type = other DNA
atgcggccccggagccggagcctgagccccggccggagccccgtgagttttgacagcgaaataattatgatgaatcacgtctacaaggaacggttccccaaagccactgctcagatggaagaacgccttgctgaatttatcagctctaacacccctgactccgttcttccgctcgccgatggtgctctgagttttattcatcaccaggtcattgagatggcaagggattgtcttgacaagagccgaagtgggctgatcacttcccagtacttctatgagctgcaggataatttagagaagctgcttcaggatgaattcgatcctgaggagttctaccatctgctggaagccgctgaagggcacgcaaaagagggccagggcatcaaatgcgatatcccccggtacatcgtgagccagcttggcttgaccagagacccactggaggaaatggctcagctgtctagttgtgattctcccgacacgcctgaaaccgatgacagcattgaagggcacggggcatccctgcccagcaagaaaactccttcagaggaggacttcgagaccatcaaacttatctcaaatggagcctacggagcagtgttcctagtgcgtcataagtcaacgagacagaggtttgcaatgaagaaaattaacaagcagaacttgatcttgaggaatcagattcagcaagcttttgtggagcgagatatactgacatttgctgagaacccatttgtggtgtcaatgttctgtagctttgacactaagaggcacttgtgcatggtcatggaatacgtggagggaggagactgtgccaccctacttaagaacatcggggcactacccgtcgatatggttcgcctctacttcgcagaaacagtgctcgctctggagtacctgcataattacggcatcgttcatagggatctaaagcctgacaacctcctgattactagcatgggccacattaagcttacagatttcggcctgtcaaagatcggactcatgagcctgactaccaatctgtacgagggtcacattgaaaaggatgcccgagagttccttgataagcaagtctgtggaaccccggagtacatagcacccgaagttatactgcgtcagggctacggcaagcccgtggactggtgggcaatgggcatcattttatacgaattcctggtgggttgcgtgccattttttggtgatacacccgaagagctcttcggccaggtcattagtgatgaaatcgtctggcccgaaggagatgaggccctccccccggacgcacaggacctaacatcgaagctacttcaccagaacccactggagaggctgggcaccggcagcgcatacgaggtaaaacagcacccattcttcacaggcctcgactggactggcctcttgagacaaaaagccgaatttatccctcaactggaaagcgaggatgatacctcatatttcgacacccgtagtgagcgttaccaccatatggatagtgaagatgaagaagaggtgagtgaagatgggtgtctggaaatcaggcagttctcaagttgtagcccaaggtttaacaaagtgtactccagcatggaacgcctgtcgctgctggaggagcgccgaacgcccccccccaccaagcgctcgctcagtgaggagaaagaagaccacagcgatgggctggccgggttgaaggggcgcgatcgctcgtgggtcatcggctccccagaaatactgcggaaacgcctatcagtttctgaaagctccctgctgaaagtggctggacggccttctacattttcacagcactttggtacacaccctcatcagcagctattgagcagtcagttacatttatgggaggcagagcacgtggttctggagattccctattag

SEQ ID NO: 195136 - DNA, 1035 bp, synthetic construct
  misc_feature 1..1035: note = Description of Artificial Sequence: Synthetic coding sequence
  source 1..1035: mol_type = other DNA
atggacgacagcagcatcctgcggcggcggggcctgcagaaggagctgagcctaccaaggcgcggctctttttgcaggacatctaatcggaagtctctcatagtgacatcctcaacttcacccaccctgcctcggccccattcaccgctacatggccacaccggaaattccccacttgacagtccaaggaacttctcccccaacgcccccgctcacttttcttttgtgccagctaggagccactctcatcgcgccgatcggacagacggcaggcgctggagtcttgcctctctgccctcgagcgggtacggaacaaatacaccgagttccaccgtgagttcaagctgctcctcacaggagaaactgcaccagctgccttttcagccaactgcagatgagctgcacttcttaacaaagcactttagtacagaaagtgttcctgatgaggagggccggcaaagtccagccatgagacccgcaccctctcgcgccctgggaactctgcgacaggaccgcgccgagcgaagagagagcttgcagaagcaggaagcaatccgagaagtcgatagctccgaggatgacaccgaggaaggacccgaaaactcccagggggctcaagaattatctctggctccccaccctgaggtttcacaatctgtcgcgccaaaaggtgcaggagagtccggcgaggaggatcctttcccaagccgtgaccctcgctccttgggacctatggtgccttctctgctgactgggatcacccttggcccacctcggatggaaagtccaagcggtccccatcgacggcttggatcacctcaagccatagaagaggctgcatcttcaagcagcgctgggccaaacctgggacagtccggtgcgacagaccctatcccccccgaggggtgctggaaggcccagcacctccatacacaagccctgaccgccttatcaccttctactagcggtctggcgcacctgatgcgaatcccagctagggccggctatggatccttgtccgtgcataagcaatag

SEQ ID NO: 195137 - DNA, 3930 bp, synthetic construct
  misc_feature 1..3930: note = Description of Artificial Sequence: Synthetic coding sequence
  source 1..3930: mol_type = other DNA
atggacgagagcagcctgctgcggcggcggggcctgcagaaggagctgtctctcccccgacgaggacgcggatgcagaagcggcaatcgcaaaagcctggtagtaggaacgccttctcccaccctctctaggcccttgtccccgctttctgtccccacagctggttcatctcccctcgatagtcctaggaatttctcagctgcaagcgcgcttaacttcccttttgcgcggagggccgacggtcgcagatggagcttggcctctctcccctcttctgggtacggaacaaataccccttccagcactctgagtagttccagttcttcacgcgagaggctccaccaactgccatttcagcctacaccagatgaactccactttctgtccaagcattttcgatcatccgaaaatgtgctcgatgaggaaggcggtaggtcccctcgcctccgtcctcggtcccgcagcctcagtcctgggcgagcaaccggcacttttgacaatgaaatagtgatgatgaaccacgtttacagagagcgctttcccaaagccactgcacagatggaggggcggctgcaggagtttctgactgcatacgctccaggcgcacgccttgccctcgcggatggggtgctgggattcatccaccatcagattgtcgaactggccagagattgtctagcgaagtcaggtgaaaacctggtcacgagccgctattttctggaaatgcaggaaaaactagaacgtctcctgcaggacgcacatgagagatccgatagtgaggaggtgagttttatagttcagctggtaagaaaactcctcatcattatcagcagaccagccaggctgctggaatgcctcgagttcgatcctgaagaattctatcaccttctggaggctgctgagggccatgctcgtgaggggcaaggcatcaaaaccgaccttccgcagtacattattggtcagctggggctggcgaaggaccctctcgaggagatggtccccttatcacatttagaggaggagcagcctcctgccccggaatctcccgagtcacgcgctctggtgggtcagtcccgtcggaagccatgcgaatcagattttgagacaattaagttaatcagtaacggcgcttatggtgccgtgtaccttgtgagacacagggacacacgccaacgcttcgccatcaaaaaaattaacaaacagaatttaattctgagaaaccagatccagcaggtgttcgttgagcgggatatcctgacatttgcggaaaaccctttcgtagtttcaatgttttgttcgtttgagacgcggcgccacctgtgcatggtaatggaatatgtagaaggcggagattgtgccaccctgctcaagaatatgggacccctgcctgtagacatggcccgtctatacttcgccgagacagtacttgcactggagtatctgcacaattatggcatcgtacacagagacctaaagccggataatctcctgatcaccagcctgggacacattaaactaactgacttcggtctgtctaaaatcggactgatgagcatggcaacaaatctgtacgagggtcacattgaaaaggacgccagagagttcatagacaaacaagtgtgcggcactcctgagtatatcgctccggaagtcatctttcgccaggggtacggtaagccagtggactggtgggccatgggcgtggtgctgtacgaatttctggtaggctgcgtgccattcttcggcgatactcccgaggaactctttggtcaggtggtaagcgacgaaatcatgtggcccgagggcgacgaagcactgcctgctgacgctcaagacctaatcacccgccttctgcgacagtctccacttgaccggttgggcacaggaggcacccacgaggttaagcagcatccgttcttcctggcactcgactgggcgggcctgctccgccataaggccgagtttgtgcctcagttagaagccgaagacgatacctcttactttgatacacggtctgagcgctataggcacctaggaagcgaggacgatgagacgaatgatgaggaatcatcgaccgagatcccccaattttcaagttgctcccatcgtttttctaaggtgtatagcagctccgaatttctggcagtgcagccaacaccaacattcgctgagaggtcgttcagcgaagatcgtgaagaaggctgggagaggagtgaggtggactacgggaggagactcagtgcagacattaggctacggagctggacatccagcggttctagctgtcagtctagctcaagccagccagaaagaggccccagcccctcactgctcaacactatcagtctcgataccatgccaaagtttgcttttagttccgaagatgagggcgttggcccaggtcccgcagggccaaaacgacctgtgttcatcctgggtgaacctgaccctccccctgccgctacccccgtcatgcctaagccttcatcgttgagcgccgataccgctgccctgtctcacgctcgccttcgctccaattcaattggtgcacggcattccacccccaggccactggacgctggacgtgggaggcgcctcggcggtcctcgcgatcctgcacccgagaagtcaagagcctcctcatcaggcggaagcgggggcgggtcaggtgggagagttccaaagtcagcctctgtgtctgccctgtcgttgataatcacagcagatgacggatctggtgggccccttatgagcccgctgtcacctcgctccctctctagcaacccttcttctagagactccagccctagtcgggatccctctccggtgtgtgggtccctgaggccgcctatagtgattcacagctcaggcaagaaatacgggttttccttacgtgccattcgcgtctatatgggagatagcgatgtctacaccgtgcatcacgtcgtgtggtctgtggaagacggatcccctgctcaggaggcgggccttcgggctggagaccttatcacccatattaacggcgaatccgtgctgggtctcgtgcacatggatgtggttgaactcctgctcaaatctggcaataagatttctctgaggacaacagcacttgaaaatacctcgattaaggtggggccagctcgcaagaatgtggctaagggacgtatggcaaggagaagtaaacgttcccggaggcgggaaactcaagataggagaaagtcgctgttcaaaaagatttctaagcagacctctgtattgcacaccagccggtcatttagcagtgggctgcaccatagcctctcttcttctgagagtttgcctggatcacccacccatagtttaagccctagtcctacgactccttgtcgcagccctgccccagacgttcctgccgatacaactgcatcacccccgtcagcctccccctcgtctagctctcctgcctcccctgcagctgccggtcacacgcgaccaagctcactacacgggctggccgcaaagcttggacctccacggcccaagacagggcgaagaaagtcgacctcatctatcccaccatcccctctcgcctgtccacccatctccgcccctcctcccaggagccctagtcctctgcctggccaccctcccgccccagcgcgcagcccccgactccggagaggccagtctgccgataagcttggcacgggcgaacggctggatggtgaagctgggcgaagaacccgaggccccgaagctgaattggtggtgatgagacgtttgcacttgtcagagcgccgtgattctttcaaaaagcaggaagccgtgcaggaagtgtcttttgacgaaccccaggaagaggcgacaggacttcctacttctgtgccccaaattgcagtcgaaggggaagaagccgttcccgtcgcgttagggccaaccggtagagactag

SEQ ID NO: 195138 - DNA, 2523 bp, synthetic construct
  misc_feature 1..2523: note = Description of Artificial Sequence: Synthetic coding sequence
  source 1..2523: mol_type = other DNA
atggaccccaccgccggcagcaagaaggagcccggcggcggcgccgctaccgaggaaggagtcaataggatcgccgttcccaagccacctagtattgaagaattctctatagttaagcccatctctcggggcgcctttggaaaggtctatctgggacaaaagggcggaaagctctacgctgtgaaggtggtgaagaaggcagatatgatcaacaaaaacatgacccaccaggtgcaggccgagcgagatgcacttgcactatccaagagtccattcattgtgcacctttactacagcttgcagtcggctaataacgtctaccttgtgatggaatacctgataggtggcgatgtgaaatctttgctccacatatacggatacttcgatgaagaaatggccgttaagtatatttccgaggttgccctcgccctggactatctgcaccgacacggtatcatccatcgagatttgaaaccagataacatgttaattagcaacgaggggcatatcaagttaacggacttcggcctgagcaaagtgacccttaatcgagatatcaatatgatggacatcctcacaacacccagtatggctaaacccagacaagactatagtcggactcctggccaggttctgagcctgatttccagcttgggtttcaatacccccatagccgagaagaaccaggatcccgctaatatcctatccgcctgcttgagcgagaccagccagctgtcccaggggctcgtctgtccaatgtcggtcgaccagaaggacaccacaccttacagctctaaattgctcaaaagctgtctggaaaccgttgccagcaatccaggcatgcctgtgaaatgcctcacctctaaccttctgcaaagccggaagcgattggcgacctcctccgctagtagccaatcccacacattcatatcatccgtggaatctgagtgtcattccagccctaagtgggagaaggactgccaggaaagcgatgaagcactcggccccactatgatgagctggaatgccgtagaaaagctttgtgctaaatctgcaaacgccattgagaccaagggctttaacaaaaaggatttagagcttgctctttccccaatacacaactctagtgcacttccaacaacaggccggagttgcgtaaatttggccaaaaagtgtttttctggcgaggtgtcatgggaggccgttgagctggatgtcaataatattaatatggacaccgacactagtcagctgggctttcaccaatccaatcaatgggccgtcgattccgggggcatctcagaggaacatctggggaagcggtcactgaagagaaacttcgagttggtggacagtagcccgtgcaagaagattatccagaataagaaaacctgtgtagagtacaagcataatgagatgactaattgctataccaatcagaatacaggattaactgtggaggtgcaggacctgaagctcagtgtgcacaagagccagcagaacgactgcgctaacaaggaaaatatcgtgaactcttttaccgataagcagcagacaccggagaagctgccaattcctatgatcgccaagaaccttatgtgtgaactggacgaagactgtgaaaagaacagtaaacgagactatctctcctcctccttcctgtgctccgatgacgaccgagcctctaagaacatctctatgaactctgactcctcgtttccaggcatctcaatcatggagagtcctctggagtcacagccactggactcggaccgctcaattaaggaaagttcattcgaagagtcaaatatcgaagatcccctgatcgttacaccggactgccaggaaaagacctccccaaagggggtggaaaaccccgcagtacaggagagcaatcaaaagatgcttggccccccattggaagtcctaaagaccctcgcgagcaagcgaaatgctgtggcttttcgcagcttcaatagccacatcaacgcctcaaacaattccgaaccaagccgcatgaatatgactagcctggacgccatggatatctcctgtgcctactccggcagctacccgatggccattactccaacgcagaaacgacggtcttgcatgccccaccagacccccaatcagattaaaagtggcaccccttacaggactccaaaatccgtgagacggggcgtggctccagtcgacgacgggaggattctcggtactcctgactacctcgcacccgaactgctgctgggtagggcccatgatatcccttggcccgaaggcgaagaaaaactatctgacaatgcacagagcgcagtggagattctgctgacgatcgacgatactaaaagagccggcatgaaggagttaaagaggcatccactctttagcgacgtggactgggagaatcttcaacaccagacaatgccatttatacctcaacctgatgatgaaaccgacaccagttattttgaggcgcggaatacggcccaacacttgaccgtcagtggattctctctgtag

SEQ ID NO: 195139 - DNA, 2640 bp, synthetic construct
  misc_feature 1..2640: note = Description of Artificial Sequence: Synthetic coding sequence
  source 1..2640: mol_type = other DNA
atggaccccaccgccggcagcaagaaggagcccggcggcggcgccgcaaccgaggaaggcgtgaacagaatcgccgtccccaaacccccctccatagaagagtttagcattgttaaaccaatctcaaggggcgccttcggcaaggtgtatcttggtcaaaaaggggggaaattatatgcggtaaaagtggtcaagaaagccgacatgattaataaaaatatgactcaccaggtacaggctgagagggatgctctggcgctgtctaagtctccttttatcgtgcatttatattatagcctccagagtgcgaataatgtttaccttgtgatggaatatctgattgggggggacgtcaagtccctcttacacatctatggatactttgatgaggagatggccgtgaaatacattagtgaagtcgctttggctctcgattacctacaccgacacggaatcattcatagggatctcaaaccagacaacatgttgataagcaacgaggggcacataaagcttacagactttggactgtccaaggtgacactcaacagagatataaatatgatggacattttgacaacgccaagcatggccaagcccaggcaggactacagcagaacaccgggccaggtgttaagcctgatctcttcgctcgggtttaatacccccatagccgagaagaaccaggatcctgctaacatcctaagcgcttgtctgtcggagacctcacagttatcccaagggctcgtttgtcctatgtctgtggaccagaaggacaccacaccctatagcagcaaactgctgaagtcatgtctggaaacagtggcgtcgaaccccggcatgcccgtgaagtgtcttactagtaaccttttacagagcagaaagcgccttgctacgtcttcagcttcttctcagagccatacgtttataagcagtgtggagtcggaatgccattctagcccaaagtgggagaaggattgccaggaaagcgatgaagctctcggccctacgatgatgtcctggaatgcggtcgaaaaactgtgtgccaagtccgcgaacgctattgagacgaaggggtttaataagaaggacttggagttagctttgagtcctattcacaattcttcagctctgcccaccactgggcgctcctgtgtgaatttagcaaaaaagtgcttttccggagaggtgagctgggaggcggtggagttggacgtcaataatattaatatggacactgacacctcacagttaggctttcaccagtcgaatcagtgggccgtggactccggaggcataagcgaggagcatctcgggaagaggtccctcaagaggaattttgagttggtggacagctcaccatgtaagaagatcatccagaacaagaaaacctgcgtggaatacaaacataacgaaatgaccaactgctatacaaaccagaacacgggtctgactgttgaagtccaggatttaaagttatctgtgcacaaaagccagcagaatgattgcgctaacaaggagaacatcgtaaactctttcaccgataagcagcagacccccgagaagctgcccatccccatgatagcaaaaaatctcatgtgtgaacttgacgaggattgtgaaaagaactcaaagcgagactacctgagctcgagctttctgtgtagtgacgatgatagagctagtaagaacatcagcatgaacagcgacagctcttttcctggcatttctattatggaatctccactggagtctcagcccctggattcggatagaagcattaaagagagctcttttgaggaaagtaatatagaagatcccctaattgtgacaccggactgtcaagaaaagacttcccccaaaggcgtcgaaaatccagctgttcaggaatctaaccagaagatgctgggccctcccctggaagtcctgaagactctggcttccaagagaaatgccgttgctttccgatctttcaattcccacataaacgcatccaataattcagaaccctccaggatgaatatgacgtcattggacgccatggacatatcatgtgcttattcaggaagctacccaatggccattactcccacgcagaaacggcgctcgtgtatgccgcatcaacagacacccaaccaaatcaagagcggcacaccctaccgaactccaaaaagcgtcaggcgtggtgtggctcccgtggacgacggccgtatccttggaacgccagattatctggcgcctgagcttttgctgggccgcgcacacggaccagcagtggattggtgggctttgggtgtgtgcctgttcgagtttctgacaggcatcccccctttcaacgacgagaccccccagcaagtcttccaaaatattcttaaaagagatatcccgtggcccgagggagaagaaaagctttcagataatgcacaaagcgcggtggagatcctcctgaccatcgatgataccaagagggcaggcatgaaggagcttaagcgtcaccctctcttctctgatgttgactgggagaacttgcaacatcaaactatgcctttcattccacagcctgatgacgagaccgatacatcctatttcgaggcaaggaataccgcacagcacctgacagtctcaggatttagcctgtag

SEQ ID NO: 195140 - DNA, 2637 bp, synthetic construct
  misc_feature 1..2637: note = Description of Artificial Sequence: Synthetic coding sequence
  source 1..2637: mol_type = other DNA
atggaccccaccgccggcagcaagaaggagcccggcggcggcgccgctacagaggagggtgtaaaccgaatcgccgtgcccaagccaccctccatcgaagagtttagcattgtgaagcctatcagccgaggcgctttcggaaaagtgtacctcggtcagaagggtgggaagctctacgccgtcaaagtggtcaaaaaagccgatatgataaacaagaatatgacccaccaggtgcaggctgagcgcgacgctttggcattaagtaagagtcctttcatagtccacctttattacagtctgcagtctgcaaacaacgtttatctggtcatggaatatctgatcgggggcgacgtgaagtccctcctgcatatctatggatactttgacgaagaaatggcggtgaaatacataagcgaggtcgcgcttgctctggattatctacatcgccacggcatcatccatcgggacttgaagccagacaacatgttgattagtaatgagggacacatcaagttgaccgacttcggcctgagtaaggtcacacttaacagagacattaacatgatggatatccttaccactccatcgatggcaaagccgaggcaggattatagccggaccccgggccaagtgcttagcttgatttcatccttgggctttaatacgcctattgctgaaaagaatcaggatcctgccaacattctgagcgcctgccttagcgaaactagccaattaagccagggactggtgtgtccaatgagcgttgatcagaaggacaccacaccatatagtagtaaacttctaaaatcttgtcttgaaacggttgcgtctaaccccgggatgcccgtgaagtgcttgacctcaaatctcctccagtctagaaagaggcttgctacgtcttccgcctcttcacaatctcacacatttatctcaagcgttgaaagcgaatgccacagctcccctaagtgggaaaaagattgccaggagagcgatgaggccctgggaccaacaatgatgtcatggaacgctgtggagaaactttgcgcgaaaagcgccaacgcaattgaaacaaagggctttaataagaaggatctcgagctggctctttcacctatccataattcgagcgccctccccactacagggagatcctgtgtgaacctggcaaagaagtgcttcagtggggaggtgtcgtgggaagcagttgagctcgacgttaataatatcaatatggataccgataccagccagctgggctttcatcagtcgaaccagtgggcagtggactctgggggtatcagtgaagagcacctgggcaaaagaagcctgaaaaggaatttcgagctggtggattccagtccctgcaagaaaattatccagaataagaagacatgtgtcgaatataaacataacgaaatgaccaattgctataccaatcaaaatacgggattgactgtcgaggtgcaggatttaaaactgtcagtgcacaagagtcagcaaaatgactgtgctaacaaggaaaacatcgtaaactcgtttactgataagcaacaaacgccggagaaactgcccatccccatgattgccaagaatctgatgtgcgaactcgacgaggactgcgaaaaaaattcaaagagagattacctatcaagttcttttctgtgctctgatgacgatcgcgcctccaaaaacattagcatgaatagcgattctagctttcccggaatatcaatcatggagtccccccttgagagtcagcccctcgactctgacaggagcatcaaagaatctagttttgaagaaagtaacatcgaagaccccttgatcgtaacccctgattgtcaggagaaaacgtctccaaagggtgtcgaaaatccagctgttcaagaatctaaccagaagatgctaggtccacccttggaagtcctcaagacattagctagcaaaagaaacgccgtcgctttcagatccttcaacagccacattaatgctagtaacaattccgaaccatcgcggatgaatatgacctcactcgatgccatggatatctcctgcgcatattccggaagttaccccatggctataaccccgactcagaagcggcgctcttgcatgccccaccaaacacctaatcagattaagtcgggaaccccatatagaactccgaaatcagtccgccgcggcgtggcccccgttgacgacggaagaatcttgggtacccccgattaccttgcaccagagctgctgctggggagggctcatggaccagccgtcgactggtgggcactcggggtatgtttgttcgaatttttaacgggcattccaccctttaatgatgaaacaccccagcaggtgtttcagaacatcttaaaacgggacattccgtggcctgaaggtgaagagaagctgagtgacaatgcccagtcagccgtcgaaatccttctgaccatcgatgacactaaaagggccggaatgaaggagttgaaacggcaccctctcttctctgatgttgattgggaaaacctccagcatcagaccatgcctttcattcctcagccagatgatgaaactgacactagttactttgaggcccgcaataccgcccagcacctgactgtgtctggcttctccctgtag

SEQ ID NO: 195141 - DNA, 17817 bp, synthetic construct
  misc_feature 1..17817: note = Description of Artificial Sequence: Synthetic coding sequence
  source 1..17817: mol_type = other DNA
atgcagaagggcctgctggaccaggacaccggcctggtgctgctggagagccaagttataatgtcagggctaatagcacccgaaacaggcgagaatctgagcctcgaggaggggatagctaggaatctcataaatccgcaaatgtatcagcaacttagagagctgcaggatgccctcgccttgattagcaggttgacagagtctcgtgggccattgtcagtcgtcgaggctatcgagaagcggatcatttccgagaccgtggggctgaagattctggaggcccatctggctacaggaggattcagtctgtcaccctcagagaactgtatcaatttagaggaggcctttcaccagggtcttatctctgcctggctgcattccgttttggagtcctaccttcgcacgtccaagaatcttatcgatcccaacacagcagagaagataggacttctggaccttatgcagagatgcattgtccatcaggaaagcggcttcaagctgctgcccgtaaagcagttggctggtggcatggtgagtttaaagtctggcagaaaggtttcaatttttcgagccgtgcaggaagggctgatcgatcggcaagtcactgtccgtctgctggaggcccagctgtttgcaggcgggatcgtggatccacgaacaggacacagactcactgtggaagaggcagtccgccataatctaatagaccaggatatggcttgcgctatcctcatccgccaactgcagaccggcggcattatcgacaccgtaactggccagcgattgacaatcgatgaggccgtttccaatgacctcgtggcagcaaagattgccttagtaatcctggagtcactttggagcttcatgggactgctctggcccgagagtggagagattctgcccataaccgatgcactcgaacagggcatagtgagcactgagttggctcataagattctgagcaatcgtcagcacattaaagccctgttcttaccagcaaccacagaaattctctcctggaaaaaggcaatcgagagcggtatcctggatcgcgatctagcaaacaatctaaagtcgatctgcatccctgacgttatgccccatatgcagctggccgatagtgcggaacaaaatatcaaccctggggccgctgtgcttccatgctctaagagccaccccaaggcaacggcatcccagtccgaaaatttgctcttccagctgatgactcactcctatattaacgtccagaacggccagaggctgcttctcctagacaaggaactgatggagacactgacttcaagagacgagtatcagacctctcctccaaaggtagtcgagatcggacatcagcggcagaagaccccagagggtctgcaggagtccgcgaatgttaagatttccggtaccttctcgtcggggtggaccgtccggcttcctgagtttcaattttctagtcagaacaaggaatacccggaccgcgaagactgcaccaccgagaagggcaagaagacaaccgtcgagaccgaggattcttccgtggaaaaccctgaacaggacctcttcgttgaacagaaggagcgcaatcctaatatcgacgctctcaaggtgattaacaaagtgaaactggaggtgcagcggcagcttatcgggacgcagagggaggaccagaccgcggtaagcgtgagggagaatgccagtaggggtcacctgctgacaatcccgccagcagaggccgagggcgtgcccttggtagtcgataaagatgtcttctccgtggaaacaccaaagaaggagcatcagcctctgagaaataccagtttcacctgtcagaatgaacaggctcatacactggagactgaatatattcacgatgagactgggggctctcacataaaaccccaaagcaagaagctgcaggtgcaagtcaagaaaacccttggcatcaaactcgagcttaagtccgaaaccgacggcaatgttcatccactggataagaaggaaatgttgaagaagacgttcttggctaaagacgatcacaaggaatcacaggaggcacagaacatcgcgggcggaagtatgatgatgtccgaaaagacagacgaggaggactccgggagggaaatctttttgagctgctcgcatccactggaacttctcgaggaggcaactcttaatgtactgagtgcccagttgctcgacggtggcatttttcatgaacagaccgggcagaaactgttgctgaatgaagctatcagtcgggggatagttcctagccacacagccgtgaagctgatggaaaagttgaacatgttccaaggatttttcgactcacaaacatgtgaaagccttaccaccgaggaggtgatcaatgaaggcttgatggacgagaagctcctgcataacgtgttgatggccgataaggccatttctggcgtcctggatcccaggacgcagactctttgtagtgtcaaggacgcagtgactgtaggtctcctggacaaagaaaccgccacccgcatccttgaaaggcaagtcgttacaggcggaattattgatctgaagagagggaaaaaggtgtccgtcaccctcgctagcacgcttggactggtcgacgtggcagatcagcccgagctaataaaccttgagaaagctagtaaggggcgtgacgctgaaaagactgtgagggaacgactcatcagtcttcagatggagacaactggcctgatcgatccagacagcaaggctccactcaccgtcgttcagagcatcgatcgtggcttgcttgaaagggaagaagctgtaaggctcctcaccaaacaggtggtagatggtggtattatccaccacataagtggcatgagattgagcgtggacaacgcattccggcacggcttgataggagaagatctggccgaaaaactcaaacgcgtggagaatcttaatatccatcagatatttaatcctgaaactaaggaaaacatcagcctccctaaggcgatcaaactcgacctgataacctctgatctgaaaagggaaatacaggaagtgcaggcctttactggcaactttgtggacctcatctccggacagcgtctgaccttggcagaagcaaagaaagaaggcctgcttacaaatgaggccgtcttgagccctggcatgatgcacgggatcgtagatccggaaaactgccgaattgtcccatactccgaactcgtgaaaaagtgcaaaattgacatagagtcgggacagcggtacctggaagtaatccctttttcagacataaaggatggggtgtcggataaagtgctgactctcagccaagctattcagctgggcaaagttgacttcgcctctaccctgaaggtcctcgaggcacaagccaatactgggggaatcatcgatacggcgacaggtaaaaggctaaccctcgcctctgcattggaggaaaaactggtcgatgagaacatggtgaggataatcgcgagtcaccaagtgctgaatggggggatagtagatatcttctccgaccaaagggtgacactcgtcgaggcaatcgaaaagcgcctgatttcccccgagctcgccaatatgatccaaattgattccagcgagttctccgaccatagagcgcagattgagaaacaggagggtattgaggtgtgcgctctgcagaatgagtttttaggcaaggatatgctgatcgcgtgcaatcagacggctgagatgtcatgtaataaggtggaagagagcgagcggttgtttcaggtcgagaatcagagcgcccaggaaaaagtaaaagtgcgagtgtcagatggggagcaggctaagaaatcgcgggaaatcagtcttaaggagtttgggtgtaaggatcagcgaaaacctcgcatgtccagtgacgcaaaagaatttataagcataatcaatcctcataatctaaaaggcaagtctctgggacaggtctctctaacccatccctattccgagtgcgactttaaactgaaggaggtagctaggaataacatgggcaacgacaccaatgaagagcaggagaaggctgtcaccaagatagagatcatctctcacatgaagcaatccaccagctgtctggattccgaagagattcgggagaaccagggtgaagtgatcctagaggtgcaagagacatattgtgaaacaagcggcaaactgcctagcgagcaggtgcttcagcagcctatgaatgccagagtcaagtccaagagggaaaagcgcgaggttatagttgaagaatctattagaacctgcaagccggccttcttgtcagaggagaaactgtaccaagagactgccattcgagacgagcatgacagccacattaagtcgcagcccagggaaatgacgagctctgagaaaggcaaggaggctgatacagaaatggggttttccatcacatttaaaatcgaggaaagtagcagccaggtcgtgccacagggtatctccgtgaagcatctggacgccttgactctcttttcctccaagcaggctaacgagggcaaagttaacaatttgtctttgtgcctcaccctgaagcctgaggagaatcttagcagagagattgcctgtggcgcccaaagcgagcccttcccctgtatgactcccagacccgagggactccattatcaagaaagcgacggaaaggcgcaagttacgggaccttctcagatctcgaagaccgacaaatccttccaaggtacgacacgtcaagaaaccaattatcaggacagctgggtgacttccaaaacaaaagagacgaagcatcagatatcatcttccaatgagtgcaaagagaagagctaccaggaggtgagctttgatccagcgaggggtttgaagctcgaggagataaccgtaagtcgacctgactcaaaggaggtgaggtatctcgagttttctgacaggaaagatctgcaccaccaaggctcgaaatcagacgataaattatgcggcacactgaagtccgagatcgccactcaggagttgaccggagagaaattcttagaaatggccaatcccaatgtggctggtttggaagccggatctatcgaggatatcgtgacccaacgaggttcccgggttcttggctcctttctgccagagaagctgtttaagggagtgtcacaaaaggaaaatactgggcaacagaacgcgatcatctcgcctacagtcctagagacctcagaggaaaagacagttagtctgacggtctgtagcgccgtaaagacggaaaaaacaccacaagaaaagctcagagagagtcccgggtctgaacaaacaccctttatgacggctcccgaaggcaagggaaacgggggagtcaaccccgaaccgttccgagccactcagaacgtgttcacgagacagttgtgcctggagcacgatgaaaaattggtgagctacctgagcctcctgaggaatattgaaatgagaaccaaacagatccagccactggagctgaaccttgcagagcttcaggacttgctctgccaggcaaaggtgctggagcgagaactgaaggacttaaccacactggtgagccaggagctagaatgcgtcaaccagattatcatctcgcaacctcaagaagtgccagctcagctgctgaaggccttagagaaagacgccaaaaacctacagaaatccctaagttccgtgtccgatacatggaacagccgtttgctgcattttcagaatgcagtggagatagagaaaactaaagtgctcaaccaacatacacaattagaaggtcgactccaggatctcagggcatgggtcgggaacaagaacctcatacttaatagtaaagggtcaaatagcgagattgacgtggactcccttaacctttgcctccagcagtacgaggatttgaagcagcccatggcagaacggaaagcccagcttgatgctctagctttcgacatccagttctttatttccgaacacgcccaggacctgtcaccacaacagaataggcagatgttgcgtctcctcaatgaactgcaacggagttttcaggatatcctcgagcagaccgccgctcaggtggatgcgctccaaggacacctccagcagatggagcaagaagcactcgtaaagaccttgcagaagcagcagaatacctgtcaccagcagctggaggatctgtgtagctgggtgggccaggctgaaagggctttggcgggtcaccaaggtcgaaccacccaacaggatctctctgctttgcagaagaaccagtccgatctaaaggatctgcaggacgacatccaaaacagggctacctcatttgctaccgtggtaaaggacatcgagggatttatggaggagaatcagacaaagctgagccctcgggaacttacagctctgcgggagaagttgcatcaggctaaggaacaatacgaagctttgcaggaggaaacgagagtggcacaaaaggagctggaggaggccgtcacctcagctttgcagcaggagaccgaaaagtcaaaggccgcaaaagagctggccgaaaataagaagaagattgatgcacttttggattgggtgacctcggtggggagtagtggaggtcaactcctcactaatctccccgggatggagcagctgagcggagctagcctcgaaaaaggcgcccttgatactactgacggatacatgggagttaatcaggcgcccgagaagttagacaagcaatgcgagatgatgaaggcaagacaccaggaactgttgagtcagcagcaaaactttatactggccacacagtcggcccaagccttcctggaccagcacgggcacaatcttactcccgaggaacagcagatgctgcaacagaaactgggcgaactgaaggagcagtatagcacctcccttgcccaatccgaggctgaattgaagcaggtacagacactgcaggatgagcttcagaagttcctgcaggatcacaaagagttcgaaagttggctggagaggtcagaaaaggagttggagaatatgcataaggggggttcttcccccgagaccttacctagcctgctcaaacgtcagggtagctttagtgaggacgttatttcacacaaaggtgatttaaggttcgtgacaatcagtggccagaaggtccttgatatggagaattccttcaaggaaggcaaagaaccgtcagagattggaaatctggtaaaggacaagctgaaagatgctacagagaggtacacggcacttcacagcaagtgcacaaggctgggctcccacctgaatatgctcctcgggcagtatcaccagttccagaatagtgcggattccttgcaggcgtggatgcaggcctgcgaggccaatgttgagaaactgttatccgacacggtggctagcgatcccggagtcctgcaggagcagcttgccacaactaaacagctgcaggaagaactggcagaacaccaggtgcccgtggagaagcttcagaaggttgcccgagacattatggagatcgagggggaacccgcaccagaccaccgacatgtccaggagaccacggattcaatccttagccactttcagagtctgtcatattcattggcagagagaagtagtttgctccagaaggctattgcccaatcacagtcggttcaggagagcctggagagcctgttacagtctatcggggaagtggagcagaacctggaaggcaaacaggtgagcagcttgagcagtggcgtaattcaggaggcactggcaacaaatatgaagcttaagcaggacatcgctcgccagaagtcttccttagaggccacacgcgaaatggtgacccgttttatggaaactgccgatagcactacggccgctgttctccagggtaaactagcagaggtctcccagcgctttgagcagctgtgcttgcagcaacaggagaaagaatcctctcttaagaagttattaccacaggctgagatgttcgagcatttgagcggcaagttgcagcaattcatggaaaataaaagccggatgctagcgagcggcaaccagccagaccaggacattacccacttctttcaacaaattcaggagcttaatctcgagatggaggaccagcaggaaaacttagacaccctcgagcatctggtaacagaattgtcttcctgcggttttgcgcttgatctgtgccagcaccaggacagggtccagaacctccgcaaggattttactgaactccaaaagactgttaaggaaagagagaaggacgcatcaagctgtcaagagcagttagacgaatttagaaaactggtcagaactttccaaaaatggctgaaggagactgaggggtcaatccctccaaccgaaactagcatgtctgccaaggaactcgaaaaacaaattgagcatttgaagagcctcttggatgattgggccagcaaagggactctggtggaggaaatcaattgtaaggggacctctctcgagaatctcatcatggagataactgcacctgatagtcaggggaaaaccggaagcattcttccctctgtggggtcttccgtggggtcggtgaacgggtatcatacgtgtaaggacctcaccgaaatccagtgtgatatgtccgacgtcaatctgaaatatgagaaactagggggcgtgctgcacgaaagacaggagagcttacaggcaatcctcaaccgcatggaggaagtgcacaaagaggctaacagtgtgctgcagtggctggagtccaaggaagaagtccttaagagcatggatgccatgtccagtcctaccaaaaccgaaactgtcaaagcacaagcggagagcaacaaggcctttttggcagaactggagcagaattccccaaaaatccagaaagtgaaggaagccctagcgggacttctggtgacatacccaaatagccaggaagctgaaaattggaagaagattcaggaggagctgaatagccgctgggagcgggccacagaagtaacggtggcaaggcagagacagctcgaggaaagtgcctctcatctcgcatgctttcaggccgcggaatctcagctgcggccctggttgatggagaaggaactaatgatgggcgtgctggggcccttatccattgatcctaatatgctgaacgctcaaaaacagcaggtccagttcatgctgaaagaattcgaggcgcgccggcaacagcacgaacaactgaacgaggctgcccagggcatcttaaccggacctggagatgtgtcactaagcacatctcaggtgcagaaagagctccaatctatcaatcagaaatgggttgagttgaccgacaagctgaattcccgctcttcccagattgatcaagcaatcgtgaagagcacccagtaccaagagcttctccaagatctttcagagaaagtgcgtgcagtaggtcaacgactgtctgtccagtccgcgatttccacccaacccgaagctgtcaagcagcagctcgaggaaacctccgagatacgttccgatctcgaacagctggaccacgaagtcaaagaggcacagacattgtgcgacgagctcagcgtcctcatcggcgagcaatatctgaaggatgaactcaaaaagcgtctggagacggtggccttgccccttcaagggcttgaagacctggctgccgacagaattaatcgcctgcaggcagctttggcctccacgcaacagtttcagcagatgtttgacgagttaagaacctggttggatgacaaacagtcccagcaggcaaagaactgccccatcagcgccaagttagaacgcctgcagtcacaactccaggaaaatgaggagtttcagaagagtttgaatcagcactccggctcctatgaggtgatcgtggccgaaggggagagcttgctccttagtgtacctccgggcgaggagaagcggacgctccaaaaccagctggtggagctgaagaaccactgggaggagctctctaaaaagaccgctgatcgacaatcccggctgaaggattgcatgcagaaggcccagaaatatcagtggcatgtagaggacctagtgccctggatagaggattgcaaggctaagatgtctgaacttcgcgtcaccttggaccccgtgcagctggagtcatccctactgcggtcaaaggccatgcttaatgaagttgagaaacgacggtctctactcgaaatcctcaacagtgccgcggatattctgattaattcttcagaagccgacgaagatggcatcagagacgagaaggccgggatcaatcagaatatggacgccgtgactgaggagctgcaagcaaaaacaggctccctggaggaaatgacccagcggctgcgcgagtttcaggagtcttttaagaacatcgaaaaaaaagtggaaggggccaagcaccagttagaaatctttgatgccctgggctcccaggcatgttcaaataagaatttagaaaagcttcgcgcacaacaagaggttctccaggccctggagccacaagtcgactacctgagaaatttcacccagggtttagtcgaagacgcacctgatgggagcgatgcaagccaattgctgcaccaggcagaggtagcccaacaggagttcctggaggtcaagcaacgtgttaattccggctgtgttatgatggagaataagctcgaagggattggacaatttcattgcagggttcgggaaatgttttctcaacttgctgacctagacgacgaactcgacggcatgggagccattggaagagacacggattcattgcagtcacagattgaagacgtgcgactgttcttgaataagatccacgtacttaagctcgacattgaggcctccgaagctgagtgtcggcacatgttagaggaggagggtactcttgatctgctgggattgaaaagggagctggaggctcttaataaacagtgcgggaagctgaccgagagaggtaaagcaagacaggagcagctcgaactcaccctgggccgagtggaagatttttacaggaagttgaaagggttaaacgacgcgactaccgcggctgaggaggctgaggcactgcagtgggtggtgggcaccgaagtggagataattaaccagcagctggccgactttaaaatgttccaaaaggagcaagtcgaccctctccagatgaagctccagcaggtcaacggtctaggacaggggctcatccagagtgctggtaaggactgcgatgtgcagggactggaacacgatatggaggagataaacgcaagatggaataccctgaacaagaaagtggcccagagaatcgctcagctccaggaggcgctgctccactgtggtaaatttcaagatgctctggaaccactgctgtcttggttggccgacaccgaagagctgatagctaaccaaaagccacctagtgccgaatacaaggtcgtgaaagcacagattcaggaacaaaagctgttgcagaggttgctcgatgaccggaaagcaacagtggatatgctgcaggccgagggaggcaggatcgcccagagtgctgagctggcagaccgtgaaaagattaccggacagcttgagtccctggagtcccgatggaccgaactcctgtccaaagcagccgctaggcaaaaacagttggaggacatacttgtcctggcgaaacagttccacgagactgccgagcccatctcagatttcctgtccgtcaccgagaaaaagctggccaattcggagccggtagggacacagacggctaagatacagcagcaaattattcgccacaaggccctggaagaagacatcgagaaccacgcaacagatgtccatcaggccgttaaaatcggccagagcttgtcttccctcacttccccggcagagcagggagtgttgagcgagaaaattgactctctgcaggctaggtactcagaaatccaggaccgctgctgcagaaaagctgcactgctagaccaggctctgagcaacgctaggctgtttggagaggatgaggtggaagtcctgaactggctggccgaagtcgaggacaaactttcgtctgttttcgtcaaagacttcaagcaggacgttcttcacaggcaacatgccgaccatctggctttgaatgaagagatcgtaaataggaagaagaacgtagaccaagccattaagaatggacaggcgctgctcaagcaaaccaccggagaagaagtactgctcatacaagagaagctggacggcattaagacacgctacgctgacatcacagtaacaagttccaaagccctccgcacactggagcaggctcgtcagttggccacgaaattccaatcaacctacgaggagttaactggatggctgagggaggtggaggaggagttggcaacatcaggagggcagagccctacaggtgagcagataccgcagtttcagcagagacagaaggagctcaaaaaagaggtgatggagcataggctggttcttgacacagttaatgaggtgagcagagccctgctcgagcttgtgccatggcgcgccagggaaggactggataaactggtgtccgacgccaacgaacaatacaaattagtgtctgacactatagggcagcgcgttgacgaaattgacgcagcaattcagaggagccagcagtacgagcaggctgccgacgcggagctagcgtgggtggctgagacgaagcgtaaactcatggcccttggccccattagattggagcaggaccagactaccgctcagttgcaagtgcaaaaggcctttagcatcgacatcatcaggcataaggattctatggatgagctattctcccacagatccgaaatttttggaacgtgtggggaggaacagaagactgttcttcaggagaaaacagagagcttgatccaacagtatgaagctatatccctgctgaatagcgagcgatacgctagactggaacgagcccaagtactggtgaaccaattttgggagacctacgaggagctgtctccctggatcgaagaaacacgagccctgatcgcccagctcccttccccagctatcgatcacgagcagctcagacagcagcaggaggaaatgcggcagttgagagagtctattgccgaacataagcctcatattgacaagctgctcaaaatcggccctcagctgaaggagctgaaccctgaagagggggagatggtggaagagaaataccagaaggcggagaatatgtacgcccagattaaggaagaggtgagacagagagccttggcattagacgaagccgtgagccaaagcactcagatcacagagttccacgataaaatagaacccatgttggagacccttgaaaatttgagttcccgcctaaggatgcctcccttaatcccagccgaggtcgacaaaatccgtgagtgcatctctgacaataagtcagccacagtcgagctggagaaactacagccatccttcgaagctctcaagcggcgcggggaagagctcatcgggcggtcacaaggcgcagacaaagaccttgctgccaaggagatacaagataagcttgaccagatggtgttcttttgggaggatatcaaagctcgggcagaggagcgagaaatcaaatttttggatgttctggagctggcagagaagttctggtatgacatggccgcccttctgaccacaatcaaagatacacaggatattgtgcatgatctagaaagcccaggcatcgatccttccattatcaaacagcaggttgaggctgctgagactatcaaggaagagaccgacggcctccacgaggagcttgagtttattaggattctgggtgccgatctgattttcgcctgcggagaaacagaaaagcccgaggtacgcaaaagtattgatgaaatgaataacgcctgggagaaccttaataaaacatggaaagagcggttggagaaattggaggatgcaatgcaggcagccgtccagtaccaagacacacttcaggctatgtttgattggctggacaacacagtcattaagttgtgtactatgccccctgtaggaaccgatctgaacactgtgaaggaccagttgaatgagatgaaagagtttaaagtcgaggtttaccaacaacaaattgagatggagaagcttaatcatcaaggagaacttatgcttaaaaaggctacagacgagacagaccgagacatcatacgggagccattgactgaattgaaacacctgtgggaaaatctgggggagaagatcgctcaccgtcagcacaaactggaaggggctttgctcgccctgggccagtttcagcatgcgttagaagagttgatgtcttggctgacacacaccgaagaactcctggacgcacaacggccgatcagcggagaccctaaagtcatcgaggtagagttagcgaaacaccacgtgctaaaaaatgatgtgctggcgcatcaggccaccgtcgagacagtgaacaaagctggaaacgagcttctggagtcctctgcaggcgacgatgccagcagcctccggtccagactggaggccatgaaccaatgctgggagagcgttctccagaagaccgaagagagggaacagcaactccagagcacccttcagcaagctcaaggatttcattccgagattgaagatttcctgcttgagttgacgcgcatggaaagccagttgtcggcttccaagcccaccggtggcctccccgagaccgcccgggaacagctggatactcatatggaactgtatagtcagttgaaggccaaggaggaaacttacaatcagctcctggataaggggcggctgatgctgctgtccagagacgacagcgggagtggcagcaaaacggagcagagtgttgccctcttggaacagaagtggcatgtcgtgagctcaaagatggaggaacggaaatccaaattggaggaagccttaaatctagcaacggagttccaaaattccttgcaagagttcataaactggctgactctagctgagcaaagtctcaatatagcttcccctccgtcccttatactaaatactgtgttatctcaaatcgaagaacacaaggtgttcgcaaacgaggttaacgctcaccgcgaccaaatcatcgagctagaccagactgggaaccagctcaagtttctctcgcaaaaacaggatgttgtgctgataaagaaccttttagtgagcgtacaaagtagatgggaaaaagtggtgcagaggagtatagagcgaggaagatccctggacgacgccaggaagcgggctaaacagtttcatgaggcctggaagaagctgattgactggctcgaggatgctgaatctcacctggacagcgaactggagatttcaaatgatccagacaagataaaattgcagctgtccaagcacaaagagttccagaaaacattggggggcaagcaaccagtctatgataccaccattaggaccggccgcgccttgaaagagaaaacactgctgcctgaggatagtcagaagttggacaattttctgggagaggtgcgcgacaagtgggacactgtatgcggaaaaagcgtggaaagacagcataaactggaggaggcgctgctgttctcagggcagtttatggacgcactgcaagccctcgtcgactggctttacaaagtcgagccgcaactggccgaggaccagcccgtacacggcgacttggacctcgtgatgaatctgatggatgcccacaaagtctttcagaaagagttaggtaaacggaccgggaccgttcaggtcctgaagcggtcgggtagggagttgatagaaaatagccgcgatgatacaacctgggtcaaaggccaactgcaggaactttcaacacgctgggacacggtttgcaagctgtctgtgtccaagcaatccaggctggagcaagccctgaaacaggccgaggtcttccgagacaccgtgcatatgctattggagtggctttctgaggctgaacagacactgaggttcagaggagccttgcccgacgacactgaagctttacagtcactgatcgacactcataaagagttcatgaaaaaagtggaggaaaaaagggtggacgttaattctgctgtggcaatgggtgaagttatcctagcggtgtgccaccctgactgcattaccacaattaagcattggatcaccataatcagggcccggtttgaggaagtgctcacatgggcaaagcagcatcagcaaaggcttgagacagcattatccgaactcgtagccaacgccgagttactggaggaactgttggcctggatccagtgggcagagacaacattgatacaacgcgaccaggagccaatcccacagaacatcgaccgggtcaaggccctgattgccgaacatcagacctttatggaagaaatgactagaaagcaacctgatgtggacagggtgactaagacctataagcgcaaaaatatagagccaacccacgctccatttatcgaaaaaagtcgttccggaggccgcaagtctctgtcccagcctactcctcctccaatgcctattctgtcccagagcgaggctaaaaaccctcggattaatcagctgtccgcccgttggcagcaagtctggctactggccctagaacgacaaaggaaactcaacgacgccctcgacagactcgaggaactgaaagagtttgcaaactttgacttcgatgtctggcgtaaaaagtacatgcgctggatgaaccacaagaaatcccgtgtgatggatttcttcaggcggatcgataaggatcaggacgggaaaataactagacaggagtttattgacgggattttggccagcaaattccccacaacaaaattggagatgaccgcagtggccgacattttcgatcgggatggagatggctatattgactattacgagttcgtggctgcactacacccaaacaaagatgcctatcggcctacgactgacgcggataaaattgaggatgaggtgacgcggcaggtcgcacagtgcaaatgtgccaaacggtttcaggtggagcaaatcggggagaacaaatacagattcttcctgggcaaccagtttggcgactcacaacagctgagactggtccggatcctgcgatctactgtgatggtgcgcgtcggggggggttggatggctctggatgaatttcttgtgaagaacgacccatgtcgggctaggggaagaacgaacatcgagctacgcgagaagttcattttacctgagggagcctcccaaggtatgaccccttttagatctaggggtcgacggagcaagccaagtagccgagccgcttctccaacccgctccagctcatcagcgtcacagtctaatcactcttgtacttccatgccgtcaagccccgcaacccccgcttccggcaccaaagtgatccccagttctggatccaaacttaaaaggccaacacctacatttcattcgagccgaacttccctggccggcgacacaagtaatagcagctcacctgcctccactggcgctaagacgaaccgtgccgaccctaagaaaagcgctagcagacctggcagtcgcgcaggaagtcgagccggtagccgcgctagttcccggcggggctccgatgctagcgacttcgacttgctcgagacccaatccgcttgtagtgacaccagcgagtcttcagccgcaggcggccaggggaacagccgccgggggctgaataagcccagcaagatcccaactatgtcaaaaaaaactaccacagcttctccccggacacctggcccgaagagatag

SEQ ID NO: 195142 - DNA, 16293 bp, synthetic construct
  misc_feature 1..16293: note = Description of Artificial Sequence: Synthetic coding sequence
  source 1..16293: mol_type = other DNA
atgagcagcagcgacgaggagaccctgagcgagcggagctgccggtctgaacggtcttgtcgttcagaacgatcttaccgatccgaaaggagtgggagcctttctccctgtccccccggagatacgctgccctggaatctgcccctgcacgagcagaagaaacgcaagtcccaggactcagtgcttgaccccgctgagcgcgcggtggtgcgggttgccgatgagagagatagggttcaaaaaaagacattcacaaagtgggtaaataaacacttgatgaaagtcagaaaacacattaacgatctgtatgaagacctgcgagatggtcataacctcatatccctcctcgaagttctgtccggtatcaagcttccgagggaaaagggtaggatgagattccataggctgcagaacgtgcagatcgctctggactttctaaagcagcgccaagtcaagctagtcaacataagaaatgatgacattaccgacggaaaccctaagctgacccttgggctgatttggacaatcatcctccacttccagatctctgatatctacataagtggagaaagcggggacatgtcggctaaagagaagttgctgttgtggacccagaaggtgactgcaggctacaccggcattaagtgtacgaacttctcttcatgctggtccgacggaaagatgtttaatgccctcatccaccgttataggcccgacttggtcgatatggagcgtgtgcaaattcagtcgaatagggagaatctcgaacaggccttcgaagttgcggaacgcctgggagtaacccgcctactggacgctgaagacgttgacgtgccttcacccgatgagaagtcagtaataacttatgtgagttccatctatgacgccttccctaaggttcctgagggcggagaagggatttctgctaccgaggtggattctcggtggcaggagtatcaaagtcgtgtagatagcttaatcccctggattaagcagcacacaattctcatgagtgataagacgttcccacagaatcctgttgaactgaaagcactgtataaccagtacatacattttaaagagaccgagattttggcaaaggaaagggaaaagggtcggatcgaggaactgtataagttactggaagtttggatcgagtttggcagaatcaagctgccccagggctaccatccaaatgacgttgaggaagaatggggcaagctgattatagaaatgctggaaagagagaagtccctccgaccagctgtggagagacttgagctgctgttgcaaatcgccaacaagatccagaatggagccctgaattgcgaagagaaattgacattggcgaagaacactctgcaggccgacgcagcccatctggaatcagggcaacctgtccagtgcgagtctgatgtgattatgtacattcaggagtgtgaggggctgattcggcagctccaggtagacctgcagatccttcgggatgaaaattactatcagttggaggaacttgccttcagagtaatgaggctgcaggacgaattggtgaccctacgcttagagtgtaccaatttgtacaggaaaggccacttcacatctttagagctggtgcctccttcaacccttacaactactcacctgaaagctgagcccttgaccaaggccacccactcttcttccacgtcctggtttcggaagcctatgacccgggccgagttagtggccatcagttcaagcgaagatgagggcaatctgcggttcgtgtacgagctcctatcctgggtcgaagagatgcagatgaagcttgagagggcagaatggggtaacgacctgccatcagtcgaacttcagctcgaaactcagcaacacatccacacctccgtcgaggagctgggatcatccgtgaaagaggctagactctatgaaggtaagatgtcacagaattttcatacatcctatgcagaaacgcttggaaagcttgaaacacagtattgcaagctgaaggagacctcgtctttccgcatgcgacacctgcagagtctccacaagtttgtctcccgcgctacggctgagctcatatggttgaacgaaaaagaggaggaagagctcgcgtacgactggtcagataacaactctaacatttccgcaaagcgcaattacttttcagagctgactatggagctggaggagaagcaggacgtattcagaagtctgcaggacaccgcagagctgctgagtttggagaatcaccctgcaaagcagacagtggaggcttacagcgctgcagtgcagagccagctccagtggatgaaacagctttgtttgtgcgtggagcagcacgttaaagagaacacggcctacttccaatttttcagcgatgctagagaattggaaagttttttgcgcaatctgcaggactcaataaaaaggaaatatagttgcgaccataatacctccctgtcacgccttgaggacttattgcaggacagcatggatgagaaagagcagctcattcagagcaagagctccgtcgcctcattggtcgggcgatctaaaacaattgtgcagctcaagccccgatcccctgaccatgtcctgaagaataccatttctgtaaaagccgtgtgtgactacagacagatagaaataacaatctgtaaaaacgacgagtgcgtgctggaagataactctcaacgaactaaatggaaagtcattagtcccaccggtaatgaggccatggtcccttctgtgtgtttccttattccaccccccaataaggacgctatagaaatggcatctagagttgaacagtcttaccaaaaggtgatggcactgtggcatcagcttcacgtgaacactaagagtctaatctcgtggaactatctccgtaaagacctcgacctggttcagacttggaaccttgagaagctacgctccagcgcaccaggtgaatgtcaccagattatgaaaaacctgcaggctcattatgaagatttccttcaagattctcgagattccgttctcttctccgtcgctgacaggctgagactcgaagaggaggtagaagcctgtaaagcccggtttcagcacctgatgaagtccatggagaatgaagacaaagaggagactgtcgccaaaatgtatatcagcgaactgaaaaacattaggctcaggctggaggagtatgagcagcgagtcgttaaacgtattcagagcctcgctagttcccgcacagatagagacgcctggcaggataacgcactcagaatcgccgagcaggaacatacgcaggaggatctgcagcagctccgcagtgacttggacgcagtcagtatgaagtgcgactcattcctacatcagtctccttcctcgagctccgtccctactctgagatccgagcttaacctgcttgtggagaagatggatcacgtctacggattgtccactgtctatctcaataagcttaagacggtcgatgtgatcgtgcgaagcattcaggacgcagagttactggtcaaagggtacgaaataaaactgtcccaggaggaggtagtgcttgccgaccttagtgctctcgaggcccattggagcactctgcgtcattggttgtccgatgtaaaggacaagaactccgttttttccgtgcttgacgaggagattgcgaaggccaaagtggtggctgagcaaatgagccgattaacgcctgaacgcaatttggatctggagaggtaccaggagaaggggtcccagctgcaagagaggtggcacagagttatagctcagcttgaaatccgccagagcgagcttgagagtattcaggaggtacttggcgactaccgcgcatgccatggcacactaattaagtggattgaggagactacagcacaacaggaaatgatgaagccggggcaggctgaagattcccgggtattatccgagcagctgagccagcagacggcgctctttgccgagatcgaaagaaatcagaccaagctggaccaatgccagaaattctcgcaacagtactccactattgtgaaagattatgaacttcagctgatgacctacaaagcatttgtggaatcccagcagaagtcccctggaaagaggaggcggatgttgtcatcgtctgatgcgattactcaggagttcatggacttgcgtacccgctacactgcgcttgtgactcttactacacagcacgtgaagtatatcagcgacgccttgaggcgtttggaagaggaggagaaggttgtagaggaagaaaagcaggagcatgtggaaaaagtgaaggagctgcttggctgggtttcaaccctcgcacggaacacccagggaaaggccactagcagtgagacaaaagagtccaccgacatagaaaaggccatcttagaacaacaagtactgtctgaggaacttaccacgaagaaggagcaggttagcgaggccattaaaacatcacagatctttctagcaaagcacggtcacaagctgtctgagaaggagaaaaaacagatcagcgaacaacttaatgccctgaacaaggcttaccatgatctctgcgacggaagcgccaatcagttacagcagctgcaaagccaattggcccatcagacggaacagaaaacgctgcagaaacaacaaaatacctgtcatcagcagcttgaagacctgtgttcctgggtcggccaggctgagagagcgctcgccgggcatcagggccggacaacccagcaggacctgagtgccctgcaaaagaaccagtcagatcttaaagatttacaggatgatattcaaaatagagccacctccttcgcaactgtggtcaaggacatcgagggatttatggaggaaaatcagaccaaactcagtccccgcgagttgacggctctgagggaaaagttacatcaggcaaaggaacagtacgaagccttgcaggaagaaaccagggtagctcagaaggagttagaagaggccgtcacgagcgcactccagcaggagacagagaaaagtaaggcggctaaggaattggccgagaataaaaaaaaaatcgacgccctgttggactgggtgacttccgttgggagctccggtggccagttacttactaacctgcctgggatggaacagctctccggagcaagcctcgaaaagggggccttggataccactgatgggtacatgggggtgaaccaggctccggagaagttggataagcaatgtgagatgatgaaagctcgccatcaggagctgctctcccagcaacaaaactttattctggccacacagtcagcgcaggctttcctggaccagcacggccacaacctgactccagaggagcagcagatgctgcaacagaagctcggcgagctgaaagagcaatactcaacaagcctggcccagagcgaagccgagctcaagcaggtgcaaaccttacaagatgagcttcaaaagtttttgcaagaccataaagaattcgaaagctggctggagaggagtgaaaaagagttggaaaacatgcacaaaggtggctccagtcctgagacgctgcccagcttgctaaaacgccagggatccttcagcgaggatgtgatttcccataaaggcgatctgaggtttgtgacgatttcaggccagaaagtgctggacatggagaattctttcaaggaaggcaaggaaccttccgagattgggaatctcgtgaaagataaactgaaggacgctaccgagcgatatactgctttacactcgaaatgtacccgactgggctcacatctcaacatgctgctcgggcagtatcaccagttccagaactcagcagattccctgcaggcatggatgcaggcctgtgaagctaacgtggagaagctgctgagcgacaccgtcgccagtgacccaggggtgctacaagagcaactggctactactaagcaactacaggaagaactggctgagcaccaggtcccagtagaaaaactccaaaaagtggcaagagatatcatggagatagagggcgaacccgcaccagaccaccggcacgtgcaggaaactactgacagcattctctcacactttcaaagcttgtcctatagtcttgcagaacgatcgagtttgctgcagaaggctatcgctcagtcacagagcgtacaagagtccctcgaaagtcttctccaaagcataggcgaagtggaacagaatctggaaggcaagcaagtctcctccctctctagtggggtgatccaagaggccttggctaccaacatgaagttaaaacaggatattgccagacagaagtctagtctcgaagccactagggaaatggtaactaggtttatggaaaccgcagattccacaaccgccgccgtgctgcagggcaaactcgccgaggtgtcccaaagatttgagcagctgtgtttgcagcagcaggagaaagagtcatctctgaagaagctcctgccccaggctgaaatgtttgagcacctgtctggcaagctccagcagtttatggagaataagtctcggatgctggcttcaggaaaccaacctgaccaggacattacccatttcttccaacagattcaggagctcaacctggaaatggaggatcagcaggagaatctcgataccttagagcatctcgtgaccgagctgtccagttgtggattcgcgctggacctgtgtcagcaccaggacagagttcagaatctacgtaaagactttaccgagttgcagaaaactgtaaaagaaagggagaaggacgcatcttcctgtcaggagcagttggatgagttccggaaactggtcaggacttttcagaagtggctcaaagaaacagaaggcagcattccaccaaccgaaacatccatgtctgctaaagagctagagaagcaaatcgagcacctaaagagcctactggacgactgggctagtaaggggacccttgtggaagagattaactgtaaaggcacaagcctcgagaacttgattatggaaattaccgcccctgattcgcagggcaaaacagggtccattttgcctagcgtaggttcgtcggtgggatctgttaacggataccatacctgtaaggatctgaccgagattcaatgcgacatgtccgacgtcaatttaaagtatgaaaagttgggaggtgtgctgcacgaacgccaggaatcgctccaggcaattctgaacaggatggaggaggttcacaaggaggccaactccgtcctccagtggctcgagtccaaagaggaagtattgaagtccatggacgcaatgtcctcccccacaaagaccgagacagtgaaagcccaggccgaatccaacaaggctttcctcgcagaactcgaacagaattccccaaaaatccaaaaggttaaggaggcgctggctgggctcctagtaacatacccaaacagtcaggaagcggagaactggaagaagatccaagaagagctgaattcccggtgggagagagcgaccgaggttaccgtggctcgacagcgacaattggaagagtccgccagccacttggcgtgctttcaggctgctgagtcacaacttcggccgtggttgatggaaaaggagctgatgatgggggtcctcgggcccctgtctatcgacccaaatatgttaaatgcgcagaagcaacaagtgcagttcatgctcaaggagttcgaagccaggaggcagcagcacgagcagttgaacgaagcagcccaagggatattgactggaccaggtgatgttagtctgagtacttcacaggttcagaaggaactacagtcgattaatcagaaatgggtagagcttacagacaagctgaattcaagatcttcacagatcgatcaagctattgtgaagtcaacccagtaccaggaattactgcaagacctgagtgaaaaagtcagggccgtggggcaaaggttatcagtgcagtcagcaatttctactcaacctgaggcagtgaagcaacagctcgaagaaactagtgagatcaggtcagatctcgaacagctggatcacgaggtgaaagaggctcaaacgctgtgcgacgagttgtctgtgctcattggggagcagtacctgaaggacgaactgaaaaagcgcctggaaactgttgcgctgccactccagggactggaggatcttgcagccgatagaatcaacaggctgcaagccgctcttgcatccacccaacagtttcagcagatgttcgacgagttgcgtacatggctggacgacaaacagagccagcaggctaaaaattgccccatctctgcgaagctggagcgtcttcaatcacagcttcaggaaaatgaggagttccaaaaatcccttaatcagcactctgggtcctatgaggtgatcgtcgctgagggagagagcttgttgctgagtgtgcctcctggggaagaaaagagaactctgcagaatcagctcgtcgaactgaagaatcactgggaggaattaagtaagaaaacagccgacagacagtctaggctgaaagactgcatgcagaaagcccagaagtaccaatggcatgtagaggacctggtcccttggatcgaggactgtaaggcgaaaatgtcagagctacgagtgaccctggaccctgttcagttagaatcttccttattgcggtccaaggccatgctgaacgaggtggagaaacgacggagtctcttggagatcctgaacagtgccgctgacatactcatcaacagttccgaagcagacgaggatggtattcgggatgaaaaggcaggcatcaatcagaacatggatgccgtgactgaggagctgcaagcaaagaccggtagtctggaggagatgacgcagagacttagggaatttcaggagtccttcaaaaacattgaaaaaaaagtagaaggtgctaagcaccagctcgagatctttgatgcattggggtcacaggcttgttccaataagaatctggagaagctgcgcgctcaacaggaggtgcttcaggcattagagcctcaggtggactacctgcggaattttacacaggggttagtggaggacgctcctgatggatctgacgcgtcccagctcttgcaccaagctgaggtggcccaacaggagttcctggaggttaagcaacgagtgaattcagggtgtgtgatgatggagaacaagctcgagggaatcggccagtttcattgtagagtgcgcgaaatgtttagccagctggcagatctcgacgacgagctggacggcatgggggccatcgggcgggacacagacagcctccaatctcaaattgaggacgtgcgactcttcctgaacaagatccacgtcctcaaactggacatcgaagcatctgaagctgaatgccgtcatatgctggaggaggagggtacactggacttgctgggactgaaaagggaactcgaggctctgaacaagcaatgtggaaagctgacagagagggggaaagcccggcaggaacaacttgagctgaccctgggccgcgtggaagatttttatagaaagctgaagggtctgaacgatgctaccaccgctgcggaggaagcggaggcacttcagtgggtcgtcgggacagaggtggagattatcaaccaacagctcgccgattttaagatgttccaaaaggaacaggtggatcccctgcaaatgaagcttcagcaagtcaacggactgggccaaggactaatccagtccgctgggaaagactgcgacgtccaaggactggagcacgacatggaagaaatcaatgcgcgttggaataccctcaataagaaggtcgcacagcggatcgctcagcttcaggaagctctcctacactgcggtaagtttcaggatgcactggagccccttttgagctggctggctgacactgaagagctgattgcaaaccagaagcccccctccgccgaatacaaagtggtgaaggcccagatacaggagcagaagctgctccagcgactgctggatgatagaaaggccaccgtggatatgctccaggccgaagggggcagaatagctcagtcagcggagctcgccgaccgtgaaaagatcaccggccagctcgaaagtctcgagagtagatggactgagctgctgagcaaagcggcagctcggcaaaagcagctcgaggacattctggtgcttgcaaaacagttccatgagactgccgagcccatctccgattttctctcagtgactgagaagaagctcgccaactccgagcctgtgggcacgcagacggcgaaaatccagcagcagattatacggcataaggcgcttgaagaggatatcgagaatcacgccacggatgtgcatcaggcagtgaagatcggacagtctctctccagcctgacctctccagccgagcagggagtcctctctgagaagattgacagtttacaggccaggtactctgaaattcaggatcggtgttgtcgcaaggcagctctgttggatcaggccctgtctaacgctcggctgtttggggaagacgaggtggaagtgctgaattggctggctgaggtggaagataaactgtcctcagtgttcgtgaaggatttcaagcaagatgtcctccacaggcagcacgctgaccacctggctttaaacgaggagattgtgaatcgaaaaaagaacgtggaccaggcaattaagaatggtcaggccctcttaaaacagactaccggtgaagaagtattgcttatccaggagaaattagacgggatcaaaactagatacgctgacatcaccgtcaccagctccaaggcacttaggaccttggagcaagctcgacaactcgccaccaagttccaatctacctatgaggaactaactggttggttgcgagaagttgaggaagagcttgcaacctcaggtggacagtcaccaactggtgagcaaatcccacagtttcaacagcggcagaaagaactgaaaaaagaagtgatggagcaccgccttgtcttggacaccgtgaacgaggtgtcacgtgcactactcgaacttgttccatggcgcgcgagagagggtctggataagctggtctctgacgccaacgaacagtacaagctcgtgagcgatacaatcggacagagagtggatgaaattgatgccgccatccaaaggagccaacagtacgagcaagccgccgatgctgaactcgcatgggtggccgagacaaaaagaaaacttatggctcttggtcctattcgattagaacaggaccagaccacagctcagctgcaagtgcagaaagccttctctatagacatcatccgccacaaggattcgatggatgagctcttctcccaccgaagcgagatatttggcacatgcggagaagagcagaagactgtcctgcaggaaaagaccgagtcactgattcagcagtacgaggcaatatcgttgctgaattcagaaaggtatgcccgcctggaacgtgctcaggtcctggttaaccagttttgggaaacatacgaggagctgagtccctggatcgaggagacccgagctctcatagcccagctgccaagtcccgcaattgaccatgagcagctgcgacaacagcaggaagaaatgcgccagctccgagaatccatagccgagcacaagccgcatatagacaagctgttgaagattggtccccaactcaaggaactaaatcctgaggagggcgaaatggtagaggagaagtaccagaaggccgaaaacatgtacgcgcagataaaagaagaagtgcggcagcgggccctcgctctagacgaggccgtttcacagagtacccaggtctctcagttccacgacaagatcgagcccatgctggaaacactcgagaacctaagttctcgcttgcgaatgccccccctgattcccgcagaagttgataagatcagagagtgcatctccgacaacaaaagtgctacagtggagctggagaaacttcagccatcgttcgaggcgctaaagagacgcggcgaagaactgattggaaggtcccaaggcgccgacaaggacctggcagcaaaggaaatccaggataagcttgatcagatggttttcttctgggaagacataaaagccagggcggaggagcgcgagattaaattcctggatgtcctggagttggctgagaaattctggtacgacatggccgctctccttacaactatcaaggatacacaagacatcgtgcacgatctggaatccccaggaatcgacccatcaataattaaacaacaggtggaggccgcagaaacaattaaagaggaaaccgacgggttgcatgaggaactggaattcatccgaatcctcggggcggacttaattttcgcctgtggtgaaactgagaaacccgaggtcaggaagtccatagatgagatgaataatgcttgggagaacttaaacaagacctggaaagaacgtcttgagaagctcgaagatgcaatgcaggccgccgtccaataccaggatactttacaagctatgttcgattggctcgataatacggtgatcaaactttgcactatgccgcccgtcggcaccgacctcaacactgtgaaggatcaacttaacgagatgaaggagtttaaggtggaagtttatcaacaacagatcgaaatggagaaactcaaccaccagggagaactgatgctaaaaaaggccactgatgaaaccgatagagacattattcgtgagcccctcaccgagctcaagcatctatgggagaacctaggtgagaagattgctcaccggcaacacaaacttgaaggtgccctgctcgcacttgggcagtttcagcatgcacttgaagagctaatgtcctggttgacacacactgaggaactactcgatgcacaacggcctatttcaggagatcctaaagttatcgaggttgaactggccaaacatcacgtgcttaagaatgacgttctggcccatcaggctaccgtggaaactgttaataaggccggaaacgagctgctggaatcgtccgccggcgacgatgcaagcagtttacgctcgagattggaggctatgaaccagtgttgggagtctgtattgcaaaagacagaagaaagggaacaacagctacagtccacgctgcagcaggcccaaggctttcattctgaaattgaggacttcctcctagagcttactcggatggagtcccagctgagcgcctccaaacctacgggcggcctgcctgagacagcccgagagcagttggatactcatatggagctctactctcagctcaaggctaaggaggagacctataaccagttgctagacaagggccgcctgatgctgctaagtcgcgatgacagcggttccggctccaaaacagaacagagcgttgccctacttgaacagaaatggcacgtggtatcatccaagatggaggagcgcaagtccaagctggaggaagcactgaatctagctaccgagttccaaaattccttgcaagagttcattaattggctgaccctggctgaacagagtctgaatatcgcatcccccccctctctgatcctgaatactgtcctaagtcagatagaggaacacaaggtatttgccaatgaagtgaatgcacaccgggatcagattatcgagctagaccagaccggaaaccaattgaaattccttagtcagaagcaggacgttgttttgataaaaaatctgctggtctctgtacagtctagatgggaaaaggtggtgcaacgcagcatagagcgaggtagatctctggatgacgcgcgaaaaagggctaagcagtttcatgaagcttggaagaaactaattgactggttggaagacgcagagtcacacctcgatagcgaacttgaaatctcaaatgaccccgacaagatcaagctccagctctcaaagcataaagagtttcagaaaactctcggaggcaagcagcccgtctacgatactactattagaacaggccgagcgctgaaggagaagacacttctgcccgaggatagtcagaaactggataactttttaggagaggttcgggataaatgggacactgtatgcgggaaatcagtcgaaaggcagcataaattagaagaggccctattgttttctgggcagttcatggacgctctccaagcactggtggactggttatacaaagtcgaaccacagcttgccgaagaccagcccgtgcacggtgacttggacctggtgatgaacctgatggatgcgcataaagtgtttcagaaggagctgggcaagaggacaggcacagtgcaggttctgaaacgcagcggacgggagctgatagagaactcccgtgatgataccacctgggttaaaggacagctacaggaactgagcaccaggtgggatactgtgtgcaaactgagcgtatccaagcagagcaggttagagcaagcactcaaacaggcggaggtgttccgcgacaccgtgcacatgctcctggaatggctatcagaggccgagcagactctgaggtttcgtggtgcactgcctgatgacaccgaagcccttcagagtctgatagacacacataaggagttcatgaaaaaggtggaagaaaagcgtgtcgacgtcaattcagctgtcgctatgggagaagtgatccttgccgtttgccacccagactgtattactaccatcaagcattggataaccatcatccgggctcgctttgaggaagtgttgacctgggctaaacagcaccaacagcggctggagaccgctttgtcagaacttgtggccaatgctgaacttctcgaggagctgctcgcgtggattcagtgggctgagactacactgatccaacgagatcaagaaccaattccgcaaaacattgacagagttaaagccctgatagcagaacatcaaactttcatggaggaaatgacaagaaagcagcccgacgtcgaccgggtaaccaagacgtataagcggaagaatatcgagcctactcacgcgccttttattgaaaagtcccgttccggtggacgcaaatctctgtcccagccaacaccgccacctatgccaattctgagccagtccgaggctaagaaccccagaattaatcaactgtccgcccgctggcaacaagtctggctccttgccctggaaagacaaagaaagctaaatgacgcactggatcgactggaggagctgaaagaatttgcaaactttgacttcgacgtgtggcgcaagaaatatatgcgatggatgaaccacaaaaagtcccgcgtgatggacttcttccggagaatcgataaggatcaagacgggaaaattactaggcaggagttcatcgatggtatccttgcgagcaagtttcctaccacaaaacttgagatgacagctgtggcggacatcttcgatagggatggagatggctacattgactactacgaatttgtggcagccttacaccctaataaagatgcgtaccgtcccacgaccgatgccgataagatcgaggatgaggtaacacgccaggttgcgcagtgcaagtgtgcgaaacgttttcaggtggagcagataggcgagaacaaatatcgttttggggacagccagcagctgcggctcgttcggattctgcgatcaacagtcatggtgcgggtcggcggaggatggatggctttggacgaattcctcgttaaaaacgatccctgcagagcacggggccgtactaatatcgaactgagagagaaattcattttgccagaaggggccagtcagggcatgacgccattccggagtcgcggccgtcgctccaaaccctccagcagagcggcaagtcctactaggagcagcagcagcgcatcccaatcaaaccattcctgtacctccatgcctagctcaccggctactccggccagtggtaccaaagtcatcccctcctccggctccaagttaaaacgccctactccaacctttcatagctcgcgcacctctctggccggggacacaagcaatagttcatccccggccagcacgggagccaaaactaacagggccgatcccaagaagagcgcttctcgccctggaagccgagctgggtcccgcgccggtagccgagcaagctctcgacggggctctgacgcctcagatttcgacctgctcgaaacgcagtccgcatgcagtgacaccagcgagtcatccgccgcgggtggacaagggaactctaggcgggggctgaataaaccgtccaagatccctacaatgtctaagaagaccaccaccgccagcccccggacacctggaccaaaacgttag

SEQ ID NO: 195143 - DNA, 16293 bp, synthetic construct
  misc_feature 1..16293: note = Description of Artificial Sequence: Synthetic coding sequence
  source 1..16293: mol_type = other DNA
atgagcagcagcgacgaggagaccctgagcgagcggagctgccggtctgagcggtcttgcaggtcagaacgatcatatcgctcagagagaagcggcagtctgagtccatgtccacccggcgacaccctgccctggaacctaccactccacgaacagaaaaagcggaagagccaggattccgtactcgaccccgccgagcgagcggtggttcgcgtggccgatgaacgagatcgtgtccagaagaagaccttcaccaagtgggtgaacaagcacctgatgaaggtgcgaaaacatatcaatgatttgtatgaagacctcagagatggacataacctgatatcccttttggaggtgctaagtgggatcaagctgccccgggagaagggacgcatgcggttccacagactgcaaaatgttcaaatcgctctggactttctgaagcagagacaggtcaagttggtgaacattcggaatgatgacatcactgatgggaaccctaagttgaccctgggcctgatctggacaatcatcctccattttcagataagtgatatatacatctccggcgaaagtggagatatgtcggctaaagagaagctgttgttgtggacgcagaaggtaacagctggatacaccgggatcaaatgtacgaattttagttcatgttggagcgatgggaaaatgttcaatgcccttatccaccgctacaggccagatctcgtggacatggagcgtgtccagatacaatccaacagagagaatctcgaacaggcctttgaagtcgcggagcggctcggcgtgacaaggttattggatgccgaggacgtagatgtgccctctcccgatgaaaagagtgtgataacatacgtcagctccatttatgacgcttttcctaaagtgcccgaggggggggagggtatttccgctacagaggtcgactcccgatggcaggagtaccagtctagggtggactcactgatcccctggatcaagcagcataccattctcatgagcgacaagacgttcccccagaatcccgtcgaattgaaagcgctgtataaccagtatattcactttaaggagactgaaattttggctaaggaacgagagaagggtcggattgaggagctgtataaattgctcgaggtgtggatcgagttcggacggatcaaactgccccaggggtaccaccctaatgatgtggaagaggaatggggtaaattgattatagagatgttagagcgtgagaaatctctgagaccggctgtcgagcgattagaacttctgctgcaaattgctaacaagattcagaatggtgcactgaattgcgaagagaagctgactcttgccaaaaacacccttcaggcagatgccgcccacctcgagagtgggcaacccgtccagtgcgagtctgatgttatcatgtacatacaggagtgtgaagggctgatccgccaactgcaggttgacctccagatcctgcgcgatgagaattactatcagctggaggaactggcatttagagtcatgcggttgcaggatgagttggtgaccctgaggctagagtgcaccaatctgtaccggaaaggacattttacatccctggagttggtcccgccaagcaccctcaccaccacacatctcaaggctgaacccctcaccaaggccactcacagcagttccacctcttggtttcggaagccaatgacacgggcggagctggttgctatttcttcttccgaagacgaaggcaacctgcgattcgtttacgaactgctgtcttgggtggaggagatgcagatgaagttggagcgcgcggaatggggcaacgacttgcctagcgtcgagcttcaattggagacacagcagcacatccacacgtccgttgaagaacttgggagttctgttaaggaagcccgactgtacgaaggaaaaatgtcccagaattttcataccagctatgcggagactctggggaaactggagactcagtactgcaagctcaaagaaacttcaagcttccggatgaggcatctgcagtcactacacaagttcgtttcccgcgccaccgccgagctgatttggctgaatgaaaaggaagaggaagagctagcctacgattggagcgacaataactctaatattagcgcgaagaggaactactttagcgaactcactatggaactcgaagagaagcaagacgtctttaggtccttacaggatacggctgagttgctgtcacttgaaaaccaccccgccaaacagaccgtggaagcatacagtgcggcagttcagagccagctgcagtggatgaaacagctgtgtctctgtgtcgagcaacacgtgaaggagaacacagcatatttccaatttttcagtgacgcccgggaactggagtctttcctgcgaaacctgcaggatagcatcaaaaggaaatattcctgcgatcataatacctcattgtctcggttggaggatttactccaggattccatggatgaaaaggagcagctgatccagtctaagagctcagtcgctagcctggtgggccgctcaaagacaattgtgcagctgaaaccccggagccctgaccacgtgcttaagaacactatctctgtcaaggcggtgtgcgattacaggcagatagagattaccatctgcaagaacgatgagtgcgtgttagaggataacagccagcggaccaaatggaaggtgatatctcctactgggaatgaggccatggtgccctccgtgtgtttcctcataccccctccaaacaaagatgccattgaaatggcaagccgagttgaacagtcttaccagaaagttatggctctgtggcaccagcttcatgtcaacacgaagtctctcatttcttggaactacctcaggaaagacctcgacctggtccaaacatggaatctggaaaagttgcgttcgagcgcgccaggagaatgccaccagatcatgaaaaatctgcaggcccattacgaagactttctgcaggactctcgcgactctgttctgttcagtgttgctgacagactgagactggaggaagaggttgaagcatgtaaagctcgttttcagcacctgatgaagagcatggaaaacgaggataaagaagagacagtggccaagatgtacattagcgaactcaagaatattaggctgaggctcgaagaatacgaacagcgtgtagtaaagcggatacagagccttgcatctagtagaaccgatcgagatgcctggcaggataacgcactgaggatcgcggagcaggagcacacccaagaggatcttcagcagctcaggtccgacttggacgccgtgtcaatgaagtgtgattcctttctccaccaatcgcccagtagctcttctgtgcctaccctgaggagcgagttaaatctcctggtcgaaaagatggatcacgtgtatggtttatccaccgtgtatctcaacaaactgaaaacagttgacgtgattgtgagatccatacaagacgccgaactcctcgtcaaaggatatgagattaagctgtcacaggaggaggtggtgctggctgacctgagcgcccttgaagcacactggtctacattaaggcattggctgtccgatgtgaaagacaagaattcagttttttctgttctcgatgaagagattgccaaagctaaagtcgttgctgaacagatgtcccggttaacaccggaaagaaacctggacctggaacgatatcaagagaaaggctctcagctacaagagagatggcatcgggtgattgcacagctggagattagacaaagtgaattggaaagcattcaggaagtcctcggcgattaccgagcttgtcacggcaccttaataaagtggatcgaagagacaaccgcccagcaggaaatgatgaagcccggccaggccgaagactctagagtactctctgaacagctctcccagcagaccgctctgtttgccgagatcgagcggaaccagaccaagcttgaccaatgtcagaagttctcccagcagtattccaccatagtgaaggactatgaacttcaactgatgacttataaggcattcgtggaaagccagcagaagagtcctggcaaaagacgtaggatgctgtcttcttccgatgccattacccaggagtttatggacctgcgcacacgatatacagccttggtaactctgactacccaacacgtgaaatacatctccgatgccctgcgcaggctcgaagaggaagagaaggtggtggaggaggaaaaacaggagcatgtcgagaaagtgaaagaacttctggggtgggtgtcaactctggcacggaacacgcagggcaaagctacctcttcagagacaaaagagtctacagatatcgagaaggcaatactggagcaacaggttctgtccgaagagctgacaaccaagaaggaacaggtgtccgaggccattaagacatcacagatattcttagccaagcacggacataagctttcagaaaaagaaaaaaagcagatctcagagcaactcaacgccctaaataaggcgtatcatgacctgtgcgacggatccgccaaccagctccaacagctacaatctcaactggcccatcaaactgagcaaaaaaccctgcagaagcaacaaaacacctgccatcagcagctcgaagacctatgctcctgggtgggtcaggcagagagagccttggcggggcatcaagggcgtacaactcaacaggatctatccgccctgcaaaaaaatcagtccgatctgaaagaccttcaggatgacatccagaacagagccacaagctttgcaactgtcgtgaaggacatagagggcttcatggaagaaaatcagaccaagctgtctccaagggagctgacagctcttcgagagaagctgcatcaagccaaagaacagtatgaagccctgcaagaagagacacgagtggcacaaaaagagcttgaagaggccgtcacctccgcacttcaacaggaaacagagaaaagtaaagccgccaaggagctggcagagaataagaagaagatcgacgctcttctggactgggtgacctcagtgggctcatcgggcggccaattgcttacaaacctgcccggaatggaacaactgagcggcgccagccttgagaaaggcgccttggataccaccgatggatacatgggcgttaatcaggccccagaaaaactggacaaacagtgcgagatgatgaaagcaaggcaccaagaattgctgagccaacaacagaacttcatactcgccacccagagtgcgcaggccttccttgatcagcacggccacaacttgacccctgaagaacagcagatgcttcagcagaagctcggtgagctaaaggaacaatatagtacatctctcgcccagtccgaggccgagctgaaacaggtccaaaccctgcaggatgagctccagaaattcctgcaagaccataaagaattcgaatcttggcttgaacgttccgagaaagagctggaaaacatgcacaaggggggaagttctcctgaaacacttccttctctactgaaacgccaagggagcttttcggaggatgtgatatcacataaaggcgatctgcgcttcgtgaccatctcaggacagaaggtgttggacatggagaatagcttcaaagaaggcaaagaaccatcagagattggaaacctcgtgaaagacaagctcaaagacgccacagaaagatataccgccttacactccaagtgtacaagattaggctctcacctgaatatgctgctgggtcagtaccatcagtttcagaactcggccgacagcttgcaggcctggatgcaggcctgcgaagcaaatgtggagaagttgctgagcgacactgtggccagtgaccctggagtgctgcaggagcagctggcaactaccaaacagctgcaggaagaacttgccgaacatcaggtacctgtcgaaaagctccaaaaggttgccagagacattatggagattgaaggtgagccagcaccagatcacaggcatgtgcaggagaccaccgatagtattctgtcccactttcagagtctgtcatatagcctggctgagcgaagtagcctgctccagaaagctattgcccaaagccagtccgttcaggaaagtctagaaagcctgctccagtctataggggaggttgagcagaacctggagggcaagcaggtatcctccctctcctctggcgtcatccaggaggcccttgccacaaacatgaagctgaagcaagatattgcaagacagaaatcctcgctcgaggccaccagggagatggtgacacgtttcatggaaacagcggacagcacaacggctgccgtcctgcagggaaagttggccgaggtcagtcagagattcgagcagctctgcctccaacagcaggagaaggagtcttctctaaagaaactgctccctcaggctgagatgtttgagcatctgtctgggaagctgcaacagtttatggagaacaagagtaggatgctggccagcggtaaccagccagatcaggatattactcatttctttcagcagattcaggaactgaacctggagatggaagaccaacaggagaacctggacaccctggaacacttagtgactgagctgtccagttgcggcttcgctctcgatctgtgccagcaccaggatagggtgcagaaccttcggaaggattttacagagctccagaaaacggtgaaggagagagagaaagatgctagcagctgtcaagaacagctggatgagttcagaaagctagtccgcaccttccagaagtggctcaaggagacagagggtagcatccctcccactgagacaagcatgtcagctaaagagctggagaagcagatcgagcatctgaagtcactcctggacgattgggcctctaaggggactctcgtcgaggaaatcaattgtaaggggacctccctcgaaaatttgattatggaaataaccgctccagattcccaaggtaagactggcagcattttgccctccgtgggctcaagtgtgggcagtgtaaacggatatcatacatgtaaggatctaaccgaaattcagtgcgatatgagcgacgtaaacctgaaatacgagaagcttgggggggttcttcatgagaggcaagagtctctgcaggccatcctcaatcggatggaggaggtccataaggaagccaactccgtcttacagtggctggaatcaaaagaagaagtcttaaagtccatggatgcaatgtcatctcccacaaagacagaaactgtgaaagcccaagcagagtcaaataaggcgtttctcgctgaactggaacagaattctccgaaaattcagaaggtcaaagaggcgctggcaggactgctcgtgacttatcctaattcacaggaggcagagaattggaaaaaaattcaggaagagctcaactccaggtgggagcgagccactgaagtcaccgtggcacggcagcggcaactggaagagtccgctagccacctggcttgcttccaggccgccgagagccagctgcgtccatggcttatggaaaaggaattaatgatgggagtcctgggcccactcagcatagacccaaatatgctcaacgcccagaaacaacaggtccagttcatgctgaaggagttcgaggcgcgcagacaacagcatgaacagctgaatgaagcagcacaaggaatcttaacaggccccggcgacgtgagtctgtcgacctcccaggtccagaaggagttgcagagcattaaccagaaatgggtggagttaacagataaactgaacagccggagcagccagatcgaccaggccattgtgaagagcacccagtatcaagagctgctgcaggatctatctgaaaaggtgcgggccgtgggacagagactatcggtgcagagcgctatctccacccagcccgaggcagtcaagcagcagttggaggaaacgtcagaaataagatcagatcttgaacagctggaccatgaagtcaaggaggctcagacactgtgcgacgaattgtctgttctaataggagagcagtatctgaaggacgagctcaaaaagcgtttggaaaccgtggcactgcctctgcagggtcttgaggatttggccgcagataggatcaatagactgcaggccgcactcgcttcgacacagcaatttcagcagatgttcgacgaactaaggacatggctggatgataaacaaagtcagcaggctaagaattgccccatcagcgcgaagctcgaaagactccagtctcagctgcaggagaatgaagagtttcaaaagtccctgaaccagcattctggtagctacgaagtaattgttgcggaaggcgagtcccttctcctaagcgtgcctcccggagaggagaaacgcactctccagaaccagctggtggagctgaagaatcattgggaagagctgagtaagaaaaccgcagataggcagtcccgcttgaaagattgcatgcagaaagcccagaagtaccagtggcacgttgaagacttggttccttggatcgaggattgcaaggcgaaaatgagcgagttaagggttaccctggaccctgtacaactcgaaagtagtctgctgcgtagcaaagccatgttaaatgaagtggagaaacgcaggagtctcctcgagatccttaacagcgcggcagacattctcataaattcttctgaagcagacgaggacggcatccgcgatgagaaagctggcatcaatcagaatatggatgccgtgaccgaagaactgcaggcgaaaaccggctctttggaggaaatgacccagagattgcgcgaattccaggaatctttcaaaaacatagaaaagaaagtggaaggggcgaaacaccagttagagatcttcgacgctttaggatctcaggcgtgctccaataagaacctggaaaaacttcgcgcacagcaggaggtgctacaggccctggaaccccaggtggactacctgcggaatttcactcaggggctcgtggaagatgcacccgatggctcagacgcctcacagctcctccaccaagctgaggtcgcccagcaagaatttttggaggtgaaacagcgggtcaattcaggctgtgtaatgatggagaacaagctggagggaattgggcagtttcactgccgtgtgcgggaaatgtttagtcagttggctgacctggacgatgaactcgatggaatgggcgctatcggcagagataccgactctttgcagtcccagatcgaagacgtgcgtttatttctgaacaaaattcatgttctcaaactggacatcgaggctagtgaagccgagtgtcgccacatgctcgaagaggagggtacactcgatctattgggccttaaaagagaactggaggccctcaacaaacaatgcggcaagctgaccgagcggggcaaggcccgacaagaacaacttgagctaacccttggcagggtggaagacttttaccggaaacttaaaggactcaatgacgcgactactgcagccgaggaggccgaagcactgcagtgggtggtgggcactgaggtggaaattataaaccagcagcttgctgattttaagatgtttcaaaaagaacaggttgacccactccagatgaaactgcaacaagtaaacggtctaggacagggtctgatccagtccgctgggaaggactgcgacgttcagggtctggagcacgatatggaggagatcaacgccagatggaacactctgaataaaaaggtcgcgcagaggattgctcagttacaggaggccctactgcattgcggcaaattccaggacgctctcgaacctttgctctcttggctggctgacaccgaagaactcattgccaaccagaagccaccatcagccgagtacaaggtcgtcaaagctcagatccaggagcagaaactgttgcaaagattactggatgacaggaaagcaacagtggacatgttacaggccgagggcggtcgcatagctcagagcgctgagttggctgaccgcgaaaagattacaggtcagctggagagcctagaatctcggtggaccgagctgctatctaaggccgctgcgagacagaaacagctcgaggacattctggtcttggccaaacagttccacgagacagcagagcccatctctgattttttaagcgtaaccgaaaagaagctggcgaatagcgagcccgttggaacacagacggcaaagattcagcaacagatcatcaggcataaggccctggaggaagacatagaaaatcacgctacggacgtgcaccaggctgtgaagataggccaaagcctttcgtctctcaccagccctgcagaacagggcgtgctgtcagagaagattgacagtcttcaagcacgctattctgaaatccaggatagatgctgtcggaaggcagctctgctagatcaggcactctcaaacgcccgtttattcggagaagacgaagtggaagtgctgaattggttggcagaagtcgaggacaaactgtcttccgtcttcgtcaaagacttcaagcaggacgtgctccacagacagcacgcagatcatctggcactgaacgaggagattgtaaacaggaaaaagaatgtggatcaggctataaagaacggccaagcactacttaaacagactacaggcgaagaagtcctgctcatacaggaaaagctggatggcatcaagacccgttacgccgacatcacggtcacatctagcaaagccctgcgaaccctagaacaagcgcggcagctggccacaaaattccaaagcacatacgaggagctgactggctggctcagagaagtcgaggaagaactagctacgtcaggcgggcaatcacctactggcgagcagataccccagttccagcagagacaaaaagagctcaaaaaggaggtgatggaacataggctggtcctggacaccgtcaacgaggtttcccgtgcgctattggaattggtgccttggagggccagggaggggctggataagctggtgtcggacgcgaatgagcagtataaactagtgagtgatacgatcggacaacgtgtcgacgaaatcgacgccgctatccagcgttcccagcagtatgaacaggctgcggatgctgaactggcctgggtcgcagaaacaaagcgcaagctgatggccctggggcccattcgtctggagcaggatcagacaacagcccaactgcaggtgcaaaaggccttcagcatcgatatcatcagacataaggattcgatggatgaactgttctcacaccgatccgaaatcttcggcacatgcggggaggagcagaagacggttcttcaagagaaaaccgaatcactgattcagcaatatgaggctatatccctactcaactcagagagatatgcccgactggagcgcgcccaggtcctcgttaaccagttttgggaaacatatgaggaattgtcaccctggattgaagagacccgagccctgatcgcccaacttcccagccctgccatcgatcatgagcagctgcgtcagcagcaggaggagatgcgccaactccgcgagtccatcgctgaacataagccgcacatcgataagctcctgaaaattggtcctcagctgaaagagctgaaccccgaagaaggagagatggtggaggaaaagtaccagaaggcggagaacatgtatgctcagattaaggaggaggtccggcaaagggcattggcgctcgacgaggctgtgagtcagtctactcagatcaccgagttccacgacaagatagaaccaatgctcgaaacccttgaaaatttgagcagccggctgaggatgcctccactgataccagcagaagtcgacaagatacgagaatgtatcagcgataataagtccgctactgtggaactcgaaaaactacagccctcatttgaagcacttaagcggagaggcgaggaattaatcggtagatcacaaggagcagacaaagacctggcagctaaagagattcaagataaactcgaccagatggtcttcttttgggaagatatcaaggcccgcgctgaagagcgagaaatcaagtttttagacgtgcttgaactggcagagaaattttggtacgatatggccgccctactcaccactattaaagacacccaggatattgtgcacgacttggagtctccaggcatagatccttctattataaaacagcaagtcgaagcagctgaaactattaaggaagagaccgacgggctgcatgaggaactcgaattcatcaggattctcggcgcagatctgatcttcgcctgtggcgaaacagagaaaccagaggttagaaaaagtatcgatgaaatgaacaatgcctgggaaaaccttaacaaaacatggaaggagcggctcgagaagctcgaagatgccatgcaggccgctgtacagtatcaggacactctgcaggcgatgtttgactggttagacaacaccgtgattaagctttgcacaatgccacccgtgggaactgatctgaacaccgtcaaagaccaactaaatgagatgaaggaattcaaggttgaggtttatcagcaacaaatcgagatggagaaattaaaccatcagggcgaactcatgcttaagaaggccactgatgagactgacagggacattatccgcgagccgttaacagagcttaaacatctgtgggagaaccttggagagaagatagctcaccgacagcacaagctcgagggcgccttactggccctggggcaatttcaacacgccctggaggagttaatgtcctggctcacacataccgaggagctgctggatgcccagcggcctatcagcggcgacccaaaggtgattgaagtggagttggccaagcatcacgtgttaaaaaacgatgtgctcgcgcatcaggcaacagttgaaactgttaataaggccggtaacgaattgctggagtcctctgcaggtgatgacgctagctccctcaggtctcgtctggaagctatgaaccagtgttgggaaagtgtattgcagaaaactgaagagcgggaacagcagctccagtctaccttgcagcaagctcaggggttccactccgagatcgaggattttctactggagttgacccgcatggagagccagttgtcagcttctaagcctaccggcgggctccctgaaacagcccgggaacagctggacacacatatggaactctacagtcagctcaaggccaaggaggaaacgtacaatcagctgctggacaaaggtcgattaatgctactctcccgggatgattccggcagcgggagtaagacggagcagtccgtagccctgctagaacagaagtggcatgttgtgtcaagcaaaatggaggaacgcaagagtaagctggaagaagctctgaatttggccacagaatttcagaacagcctccaggaatttatcaactggctcaccctcgcagaacagtcacttaacattgctagccctcctagtctaatactgaataccgtcctctcacagatcgaggagcacaaagtgttcgccaacgaggtcaatgctcatagggaccagattatcgagttggaccaaacaggaaatcagctcaagtttttgtcacaaaagcaggatgtagtgttgatcaagaatctgcttgtgtctgttcagagtagatgggagaaagtggtgcagcgctccattgagaggggaagaagtctcgacgatgcccgcaagcgagctaagcagttccatgaagcatggaagaaactgatcgactggctcgaggacgctgaatcacacctggatagtgaactggagattagtaacgaccccgacaaaattaagttgcagctgtctaagcacaaggagtttcagaagaccctgggcggcaagcagccagtgtacgacacaaccatcagaaccgggagagccctgaaggagaaaactctgctgcctgaggatagccagaagctcgacaattttttaggggaggtcagggataagtgggacactgtttgcggcaaatcggtggaacgacaacataaactggaggaggcactgctgtttagcggccagtttatggacgccctgcaagccctagtggactggctttataaggtggagccacaattggccgaggaccagcctgtgcacggagacctggacctggtgatgaatctgatggacgcccataaggtcttccagaaggaactgggaaagaggaccggtacagttcaggtgctgaagagatcaggtagggaactgatcgagaactccagagacgacacaacatgggtgaagggacagctgcaggaactatccactcgctgggacactgtgtgcaaactgtcagtgagcaagcagtccagattagagcaggccttgaagcaggctgaagtgttccgcgatactgttcacatgctgctggagtggctgagtgaagctgaacagacccttcggttccgtggggcgctgccagatgacacagaggcacttcagagtcttattgatactcacaaagaatttatgaagaaggtagaagagaagcgggtcgacgtaaactcagctgtcgctatgggggaagtgattctggctgtgtgtcacccagactgtattaccaccatcaaacattggattacaatcataagagcgaggttcgaggaggtgctcacctgggcgaaacaacaccagcagaggctagaaaccgctttatctgaactagtagctaatgcagagctgctcgaagagctgttagcatggattcagtgggccgagacaacattaattcaacgggaccaggaaccgatcccacaaaacattgatagagttaaggcgctgattgccgagcaccaaaccttcatggaagaaatgactcgtaagcagcctgatgtcgaccgggtgacaaaaacctacaagagaaaaaacattgaaccaacccatgccccatttattgagaaaagcaggtctggcggacggaaaagcttaagtcaaccaacgccaccccctatgcccattttatcccaatctgaagcaaagaacccacgaatcaatcagctgagcgcaagatggcaacaggtttggctcctggccctggagcgtcagcgcaagctaaatgatgcactcgaccgccttgaggagttgaaagagttcgcaaactttgacttcgatgtctggcggaagaagtatatgagatggatgaaccacaaaaaatctcgggttatggattttttcaggcgtatcgataaagaccaagatggaaagataacaaggcaggaatttatcgatgggattctcgcctctaagtttcccaccaccaagctggagatgactgcggtggcggatatatttgatcgcgatggagatggatacatcgattactacgagtttgtggccgccctacatccaaacaaggacgcctacagacccaccactgatgctgataagattgaagatgaggtcacgagacaagtggcccagtgtaaatgtgcgaaacgcttccaggtcgagcaaatcggggagaacaaatataggttcggcgattcccaacagttgagactggtccgcattctgaggagtaccgttatggtgagggtggggggcggttggatggcactcgacgagtttcttgtcaaaaatgacccatgtagagccaggggtaggacaaacatagaactccgagagaaattcatactcccggagggggccagtcaaggtatgacccccttccgcagtcgcgggagacgatctaaaccttcaagtcgggcagcctctcctacccgcagtagctcgagcgcctcacagtctaaccatagttgcacttctatgccttcctctcccgcgacacccgcctcaggaactaaagtgatcccctcatcaggctctaaacttaagaggcccaccccgaccttccactcgagcaggactagcctcgccggcgatacaagcaatagttcgtctcccgcgagcaccggtgcaaagaccaatagagccgaccctaaaaagagcgccagcaggccgggtagcagagccggatctagagccggctctcgcgcaagctcacggcgaggaagcgatgcaagtgattttgacctgctggaaacacaaagtgcctgctccgacacatcagagtcctccgccgccgggggccagggaaacagcaggcggggtctgaacaagccttccaaaatcccgacgatgagtaagaagacaaccaccgcttctccccgaacgccaggtccaaagaggtag

SEQ ID NO: 195144 - DNA, 3189 bp, synthetic construct
  misc_feature 1..3189: note = Description of Artificial Sequence: Synthetic coding sequence
  source 1..3189: mol_type = other DNA
atgggcaacagcctgggctgcttcaaggagcccaaggagagcatcgctattccggagaaagcccctatcagccctaaaaaacgcgtgaggtttaagcgcagatggcgcgggaaaaagatccccactcctgaagcctcccaccaggaagaaacttccgaagggactggcgtgattgaagaaactgaaactttaaccaagctaactgaatccctgcaaaaagaagacggcgtcggcggagtcgaacatactccacccgacattctcctcccaggcgattctgctcctaattctcgggtcgtggatagagggatgattgtgcaggtgaaggagcggtttcaaggtgaagtccaaaccgcccatctgctgctggagaacgaaagctcagtggcgggtggagtttgggactcattagaggagggcatgacggtgattgcccacctgctcgacaacccagcagaacgtaattgcgagaagtcagtgtcccagcttgtggaattccctaggaccgcctcctgctcctcccgcgctgtgctgcttcccctacagggggaaactgccgtagagaaagggaacatacaacgcggatttaggtcatgtgctttgccacggactgattaccctactgataagggcaaccaagagcagttcagtgagggatggtcagtcgaggaaggaactaaatcggtgtccggtgctccccagactgccagctggatcatcgagtgcagtgtaagctcactcttactggatcagcctggcggacagagacgtaccgagccctcacacgtcggccaggttcccccacaggattcccgcctgcccacatcccagagcgatctaagtatttccggcgtgaccgttagcattcttccttcgtctagtggctatgggagtgatgggcctcatatccatggcattcaacccaaggacaccgaaccagaaaagtcttcaacctcttttagcgaagaagacggaacactcagcctggaagcctctcacacgcccagctggggcctcgaggaaatcagcgatatttacatttctggcgaatctggcgacatgtccgctaaggagaagctgctcctgtggactcagaaagtaacagcgggctacaccggaatcaagtgcacaaacttttccagttgttggagcgatgggaagatgttcaatgcccttattcatcgctaccgacccgacttggtggacatggagagagtgcagatacagagtaaccgagagaacctggagcaggctttcgaagtcgctgaaagattgggtgtgacaaggctcctcgacgctgaggatgtcgatgtcccctctccagacgagaaatcagtgattacctatgtgagttccatttacgacgcgttccctaaggtgcccgagggaggagaggggattagcgcaacagaagtggatagtcgttggcaggagtaccagtccagagtcgatagcttgatcccatggattaagcaacacaccatcctgatgagcgataagacatttccccagaacccagtagagttgaaagccctgtacaaccagtacattcatttcaaagaaacagagattctagccaaagagagagagaaggggcggattgaggaactgtataagctgttagaagtatggattgagtttggccgcattaagctacctcagggctatcacccaaacgacgtggaggaggaatgggggaaacttataatcgagatgttggagcgcgaaaagtccctgcggcccgctgtagagcgcctcgaactgcttctgcaaatagccaacaaaatccagaacggagccctcaactgtgaggagaaacttactctagcaaaaaatacactgcaggcagacgccgctcacctggagtcgggccaacctgttcagtgcgaatcagacgtaattatgtatatacaggagtgcgaaggcctcatacgccaactccaggtggacttgcagatcttgagggatgagaactattatcagctggaagaactcgcattcagagtgatgaggctgcaggacgagctggtgaccttacgcctggagtgcacaaacctttataggaaagggcactttaccagtctcgagctagtgcccccctccactttgactacaacccacttgaaggcggagccccttaccaaagctactcattctagtagcacctcgtggtttaggaagccgatgaccagagctgagttggtggctattagctcaagcgaagacgaagggaacctccgtttcgtctacgagcttctgagctgggtcgaggaaatgcagatgaaactggagagggctgagtggggaaatgatttgccctccgtcgagctgcaactcgaaacccaacaacacatccacacaagtgtggaagaactgggctcaagtgtgaaggaagcgcgactttatgagggcaagatgtcccagaacttccacacatcctatgccgagactttgggcaaactggagactcaatactgtaagctaaaggaaacctcctcttttcgcatgcgccacctccagtcattgcacaagttcgtcagcagagcaaccgccgagctgatttggcttaacgaaaaagaggaagaggagctcgcttatgactggtccgacaataactctaacatcagcgctaaacgcaattatttttccgaacttactatggagctagaagagaaacaagatgtttttaggtccctgcaggacactgccgagttgctgagcctggagaaccatcctgccaaacagaccgtcgaggcatatagcgccgccgttcagagccaactgcagtggatgaagcaactctgcctctgcgtcgagcaacacgtgaaggagaacaccgcctactttcagttttttagtgatgcccgagagctggagagctttctcagaaatctccaggatagtattaaacggaaatactcctgcgaccataatacctctctgtctaggctggaagacctgctgcaggactccatgttccaggatgagaaagagcagttgatccagagcaagtcttccgtggcctctctggtaggtcggtcaaagacaatagtgcagctcaaaccccgctcccccgaccacgtcttgaaaaatactatatccgtgaaggccgtctgtgattacaggcaaatcgaaggtagaaccatcttaagtgagggatacggaccattggctagcgcagcctgctag

SEQ ID NO: 195145 - DNA, 22167 bp, synthetic construct
  misc_feature 1..22167: note = Description of Artificial Sequence: Synthetic coding sequence
  source 1..22167: mol_type = other DNA
atgagcagcagcgacgaggagaccctgagcgagcggagctgccggtctgagcgaagctgcagaagtgagaggtcgtatcgctcagaacggagtggttctctctcaccatgccctcctggtgacactctgccctggaacctgcccttacatgagcagaaaaagcgcaagagccaggactccgtgctggatccagcagagcgtgcggttgtcagagtcgctgatgagcgcgatcgtgtgcagaaaaaaacattcacaaaatgggtaaataagcatctcatgaaagttcgcaaacatatcaacgacctctacgaagatctgagagacggccacaacctcatctcactccttgaggtcctgtctggaataaaattaccgcgtgagaaaggcaggatgcgcttccacaggctccagaacgtccagattgcgctggattttcttaagcagagacaggttaagctcgtcaatatccgcaatgacgacatcacagatgggaacccaaaacttacactcggtctcatctggacaataattctccactttcagatcagtgatatttatatttcaggtgaatcaggagatatgagcgctaaggagaagctgctcctttggacacagaaggtgaccgccggctatacaggtatcaagtgcacgaacttttcttcctgctggagtgacggcaaaatgtttaatgcactcatccatagataccgtcccgatctggttgacatggagagggtgcagatccagtccaatagggagaatctcgaacaggctttcgaggtggcagagagactgggcgtcacacgactactggatgccgaggacgtggacgtccctagtccggatgagaaatccgttatcacatacgtgagctcaatctatgatgcattccctaaagtgcccgagggtggcgaaggtatcagcgccacagaggtcgattcccgatggcaggaataccagagtagagtggactcgctcattccatggataaaacagcataccatcctgatgtccgacaagacgttcccacaaaaccctgtcgaattaaaggcactgtataatcaatatatccactttaaagaaactgaaattctggctaaggaacgagagaaaggcagaattgaggaactttacaagttgctggaggtatggatcgagttcggcaggatcaaattacctcaaggttaccatcctaatgacgtggaggaggagtggggcaagctcattattgagatgcttgagcgagaaaaaagcctgcgccctgccgtcgagcgccttgaactgcttttgcagatagctaacaagattcagaacggcgcgttgaattgcgaagaaaagctgactctggctaagaacacgttgcaggctgacgccgcgcacttggaaagcgggcaacctgtgcagtgtgagtcagatgttatcatgtacatccaagagtgtgagggactgataaggcaacttcaggtggacctgcagattctgcgggatgaaaattattaccagctcgaagaactcgcatttagagtcatgagattgcaggacgagcttgtgacactgagactcgagtgcaccaatctgtacagaaagggacacttcactagcttggagttagtgcctccatctactctcacgacaacccacctaaaggccgagccattgaccaaggccacacacagttcttctactagctggttccgtaagccaatgactcgcgctgagctcgttgccatttcatccagcgaggatgaaggtaacctccgcttcgtttatgaactgctgtcttgggttgaagaaatgcaaatgaagttagagcgtgctgaatggggaaatgaccttccctctgtggagctacagctcgaaacacaacagcacattcacactagcgttgaagagctgggctcatctgtcaaagaggcccgactgtacgagggaaagatgtcacaaaattttcacactagctatgcggaaaccttgggaaaacttgagacgcagtactgtaagttgaaggaaactagctccttccgaatgcggcacctacagagtctccataagtttgtctccagggcgactgcagaactgatttggctgaacgagaaagaggaagaagaactcgcctacgactggtcagataacaattcgaacatttccgccaagcgcaactactttagtgagctgactatggagctggaggagaagcaggacgtgttcaggtctttgcaggatactgctgagctcctgtcactggagaatcatcctgcgaagcaaactgtcgaagcctacagtgccgcagtgcaaagtcagctgcagtggatgaaacagttgtgcctgtgtgtggaacagcacgtcaaggaaaacactgcttatttccagtttttttccgatgcgagagagttagaatcattccttcggaacctgcaggactcgattaagcggaagtacagttgcgaccataacacaagcctctcgcgtctggaggatctgctgcaggattccatggacgagaaagagcagctcatacagtctaagtctagcgtagcaagcctggtgggccggagcaagactatcgtacaacttaagcctcgtagccccgatcacgtgttgaagaacacaatttcggtgaaggcagtgtgcgattaccgccagatagagataactatttgcaaaaatgacgagtgcgtcctggaagacaactcacaaagaactaaatggaaggtcatctctcccaccggaaacgaggcgatggtaccttcagtgtgttttttgatacctccacccaacaaggatgccatcgagatggctagtagggtcgaacagagctatcagaaggttatggccttatggcatcagttgcatgtgaacaccaagagtctgatctcttggaactacttgaggaaagatctcgatctcgttcagacctggaatctggagaagctgaggagcagtgctccaggagaatgccaccaaattatgaagaacctgcaagctcactacgaagacttccttcaagatagccgggatagcgtcttattcagcgtagctgataggttaaggcttgaagaggaggtcgaggcatgcaaagcccgattccagcacctcatgaaatcaatggaaaatgaagataaagaggagacagtcgctaagatgtatattagtgagctaaagaacattaggctgcgtctagaagaatatgagcaacgggtcgtgaagcggatccagtcactggcatctagccggaccgaccgagacgcgtggcaggataatgctttgagaatagctgaacaggagcatacacaggaagatctgcagcaactaagatctgatctggacgcagtctccatgaaatgcgattcctttctccaccagtctccaagctcatcaagtgtgccgacactgcggagtgagcttaacttgctcgtcgagaagatggatcacgtttacgggctgtcaacggtgtatctcaacaaactcaaaaccgttgacgtcattgtgaggagtatacaggatgcagagttactggtaaaaggttacgaaatcaagctttcccaagaggaagtggtcctcgcggacctcagcgccctggaggctcattggagcacactgcgccattggctgtctgatgttaaggacaaaaacagcgtcttttcagtgctcgatgaggagatcgccaaggccaaggtagtggctgaacagatgtcccgcttgacacctgaacgcaatcttgatctcgagcggtatcaggaaaaagggagccagttgcaggaacggtggcaccgggtcatagctcagttggaaatcaggcagtccgagctggagtcgattcaggaagtgcttggagactacagagcttgtcatggcacgctcatcaagtggatagaggagaccacagcccagcaggaaatgatgaagccaggacaggctgaagatagcagggtattgtccgaacagctgtctcagcagacagctttgtttgctgagatcgagaggaatcagactaaattggatcagtgccagaagttctctcagcagtacagtaccatagtgaaggactacgaactgcagctgatgacatacaaggctttcgtagaaagtcagcagaagagccccggcaagagacgcagaatgttgtcaagcagcgatgcaattacacaggaattcatggaccttaggactcgatacactgccctagtgacactgacaacccagcacgtgaaatatatcagcgacgcactgcggcgtctggaggaagaggagaaggtagtagaggaggagaaacaggagcatgtagagaaggtgaaggaactgctgggctgggtgtccactcttgcccgaaacacacagggtaaagccacaagctccgaaaccaaagagtctacagatattgagaaggcaattctggagcagcaggtactctctgaagagctgactactaaaaaggaacaggtgtcagaagcaatcaaaaccagccagatctttcttgccaaacatggccacaagctttctgaaaaagaaaaaaagcagatctctgaacagttaaatgcccttaacaaagcttaccacgacctgtgcgatgggagtgcgaatcagctgcagcagctgcagtcccagctcgcccaccagactgaacagaaagagtgccgcgcagttgcgggtgtcattgacttaggtacagtagaaatttttcctatattcaaggctatgcagaaggggctgctggaccaggataccggcctggtcctgctcgagtcccaagtcattatgtctggtctcatagcccccgagactggagagaacctgagcctggaggaggggatcgcaaggaacctgatcaatccccaaatgtaccagcaactgagagagttgcaggacgccctggctttgataagcaggctgacggaaagcagagggcccctcagcgtcgtggaagccattgagaagagaattatctccgagacagtgggattaaagatcctcgaggcccatttggctaccggaggcttctccctgtcccctagcgaaaactgtattaatctcgaggaggccttccatcaggggctgatttccgcatggctccactctgtgttagaatcttacttgagaacctcaaagaaccttattgaccccaacactgcggagaagatcggtttactcgacttgatgcagaggtgcattgtccatcaggagtccggctttaaactgctgcctgtgaagcaactggcaggagggatggtaagtttgaagtccgggaggaaggtgagtatttttcgggcggttcaagaagggctgatagaccgtcaagtaacagtccgtctcctggaggcgcagctgttcgccggaggaatcgtggatccacgcactgggcaccgtctgaccgttgaagaggcggtaagacacaatttgatcgatcaggacatggcatgtgctatcctgataaggcagctgcagaccggaggcatcatagatactgtgaccggccagagactcactatagacgaggccgtaagtaacgacctggtcgcagcaaagattgctctcgtgattcttgagagcctgtggagtttcatgggtctgctgtggcctgagtcaggggaaattctgcctataacagatgcgctcgagcagggtatcgtcagtactgaactggctcataaaatcctgtcaaataggcagcacattaaagctcttttcctgcccgccacaaccgaaattctcagctggaagaaggctatcgaaagcggtatcctggacagggacctggcaaacaacttaaaatccatttgtatcccggacgtcatgccccacatgcaactcgccgactccgcagagcagaatattaatcctggagcagccgtcctaccctgctccaagtcccacccaaaagccaccgcctctcagtctgagaacttgttgtttcagttgatgactcactcatacatcaacgtgcagaatgggcagcgactgctgcttctggataaggagttaatggagactcttacctcgcgagatgagtatcagacaagcccacctaaagtggttgaaatcggacatcaaaggcagaaaacaccagaaggcctccaagagtcagccaacgtaaaaatctccggtacattttctagcggttggacagtgagactgcccgagttccagttctccagccagaataaagaatatcccgatcgagaggattgcacaacagaaaagggaaaaaagacgaccgtcgagaccgaagactctagtgtcgagaacccagaacaggacttgtttgttgagcaaaaagagcgcaacccaaacatcgacgctctgaaagtgatcaataaagtgaagctcgaggtgcagcggcagctgattggtactcagcgagaggatcagacagccgtgtcagtcagggagaacgcttcccgcgggcacttgctgacgattccacccgctgaagcggaaggcgtacctttagttgtggacaaggacgtcttcagtgtcgagaccccaaagaaagaacatcagcctctacgtaacacctccttcacctgccagaacgaacaggctcacacactagagactgaatacattcacgacgagactggcggctctcacattaagccccaatctaaaaagctgcaggtgcaggttaaaaaaacattggggatcaaactcgagctgaagagcgagactgatggtaatgtacaccccctggacaagaaggaaatgcttaaaaagactttccttgcgaaagacgaccacaaggagtcacaggaggctcagaatattgccggcggttcaatgatgatgtctgagaagacagatgaggaagactcaggtcgagaaatctttttgtcgtgtagccacccccttgaactgctggaggaggccacgctcaatgttcttagcgctcagctcctcgacggcggtattttccatgagcagacaggacagaaactgctcttgaacgaagcaattagtaggggtatagtgcccagccatacagcagtgaagttgatggagaagttgaatatgttccaggggtttttcgactctcagacctgtgagagtcttacaaccgaagaagtgatcaacgagggtctgatggacgagaaattattgcacaatgtgctcatggcagacaaggcgatctccggggtgctggacccacgcacgcaaaccctttgtagcgtgaaagatgctgtgaccgttggtctgctcgacaaagaaacagcaacccgaatcctggaaagacaagtagtcacaggtggcatcattgatctcaagcgcggtaagaaggtgtccgtgacgttagcatccacactggggctggtcgacgtagcagatcagccagagctaattaatctggagaaggcatctaagggacgcgacgctgagaagactgtacgcgaacgtctcattagcctccagatggaaaccactggtttgatagaccctgatagcaaggcccccctgaccgtcgtacagtctatagatcgaggccttctggaacgcgaagaagctgtccgactcctgacaaagcaagtggtggacggcgggattattcatcatatatccggcatgaggctgagcgtggataacgcttttcgccacggcctgatcggtgaggatctcgccgaaaagctcaagagggtagagaatctgaacatccaccagatttttaaccccgagacgaaagaaaatatttccctgccgaaagcaattaagctcgacctcattacctccgatctcaaacgggaaattcaagaggtgcaggcttttacagggaacttcgtggacctgattagcggccagagactgacactggcggaggccaaaaaagaaggtttactcaccaatgaggccgtgctgagtcctggcatgatgcacggtatagttgaccctgagaattgcagaatcgttccatatagcgaactggtcaagaagtgtaagatcgacattgaaagtggccagcggtacctggaggtaatccctttttcagacattaaagacggtgttagcgacaaagttctcaccttgagccaggccatacaactgggcaaggtcgatttcgcctccactctgaaagtcttggaggcccaagccaatacaggggggattattgacactgctacaggaaagaggctgactctagccagcgccctcgaggagaagctagtagacgaaaacatggtccgtattatagcctcacaccaggttctcaatggcggaatcgttgacatcttttcagatcagcgcgtgaccctggtggaggctatcgaaaaaagactgatttcccccgaacttgccaacatgatccaaatcgacagctctgaattttcagaccaccgggcccaaattgagaagcaggaaggaatcgaagtctgtgcactgcaaaatgaattcctgggcaaggatatgttaatcgcatgtaatcaaacagccgaaatgagctgtaacaaggtggaggaaagtgagcgtctatttcaggtagagaaccagagcgctcaggaaaaggtcaaagtgagagtgtccgacggcgaacaagccaagaaaagtcgcgagattagcctgaaggagtttgggtgtaaagatcagcggaaacctcgcatgtcttccgacgccaaggaatttatctctatcatcaatcctcataacctaaaggggaaaagcctaggacaagtcagcctaacccacccgtattctgagtgtgattttaagctgaaggaggtcgcacgtaataacatgggcaatgataccaacgaggaacaagaaaaggcagtcactaaaatagagatcatctcccacatgaagcagtctacttcctgcctcgattctgaggagatacgggagaaccagggtgaggttattttagaggtgcaggagacgtactgcgagacttctggcaaactgccctcggagcaggtgctccaacagccaatgaatgccagggttaaatcaaagcgggaaaagcgggaggtgattgtggaagagtctatccggacttgtaagccagcattcctgtctgaggagaaactttatcaggaaaccgccatacgcgacgagcacgattcccatattaaatctcaaccccgcgaaatgacctcatctgaaaagggtaaggaggcagacactgaaatggggtttagcattacatttaagattgaggagagtagttcgcaagtggtaccccagggcatcagcgtaaagcatctggacgccctgacactcttttcgtcaaaacaagctaatgaagggaaggtgaataatctgtctctgtgcctgactctgaaacctgaagaaaatctgagtagagaaatcgcctgtggagcccagagcgagccattcccttgcatgaccccacggcccgaggggctacactaccaggaaagtgacggcaaggcccaggtaacagggccctctcaaatcagcaaaaccgataaatctttccaaggtacgacccgccaggagacaaattatcaggatagctgggtgactagtaagacgaaagagactaaacaccaaatttcctcatccaatgaatgtaaggagaaaagttaccaggaggtttcattcgatcctgcgcgcggactcaagctagaagaaatcactgtgagcagaccggatagcaaagaggtgcggtatcttgaattttcagacagaaaggatcttcaccaccagggctctaagtcagacgacaagctttgcgggacacttaagtcagaaatagcaacacaggaattgacaggcgaaaagtttcttgaaatggctaacccaaatgtggcgggtttagaggctggatctattgaggacattgtcactcaaagaggtagccgcgtgttaggatcctttttacctgagaaattgttcaaaggggtgagtcagaaggagaataccgggcagcaaaatgccattatcagtcccacagtcctggagacgtccgaggaaaagaccgtaagtctgacagtgtgtagtgccgtgaaaacggaaaaaactccgcaagagaagctgcgggagtcaccagggagtgaacagacgccctttatgaccgccccggaggggaagggcaacgggggggtgaatccggagccatttagagccacccagaatgtctttactaggcagctttgtctagagcacgatgagaaactggtgtcctacttaagcctcctgcgcaatatcgagatgaggactaaacagattcaacctctagagttgaaccttgccgaattgcaggacctgctgtgccaagcaaaggtgttggagagagagctgaaggatcttactacacttgtgtcacaagagctcgaatgtgttaaccagattatcatctctcagccccaagaggtacctgcccagttgctgaaagccctggagaaggatgccaaaaaccttcaaaagagcctgtcatcagtgagcgacacatggaatagtcggctcctccatttccagaacgcggtagaaatcgagaagaccaaggtcctcaaccagcatacccagctggaagggagattgcaggacctgagagcatgggtgggcaacaagaatctaattttgaacagcaagggctctaattcggagatcgacgttgacagcttgaacctctgtcttcagcagtatgaggacctgaagcagcctatggcggagcgcaaagcccagttggacgcgcttgctttcgatatccaattcttcatcagcgaacatgcccaagacttaagtccacaacaaaacagacagatgcttagactgttaaacgagctgcaacggtcttttcaagacatacttgagcagaccgctgcacaggtggacgcccttcagggccaccttcagcaaatggagcaggaggcccttgtgaagaccctgcagaaacagcaaaatacatgtcaccagcagcttgaggatctatgcagctgggtcgggcaggctgaacgcgccctcgcgggccaccagggtagaacaacacagcaagacctatctgctttgcagaaaaaccagtctgaccttaaggatctgcaagatgacattcaaaaccgtgccactagctttgctactgttgtaaaagacatcgaaggttttatggaagaaaaccagacaaaattgagccctagagagctgactgccctgagggagaaactgcatcaggccaaagaacagtacgaagcactccaggaggagaccagggtggcccagaaggagcttgaagaggctgtgactagcgccctgcagcaggagaccgagaagagtaaggccgcaaaagaactggctgagaataaaaaaaagatcgatgctctgcttgattgggtgacttccgtcggatcctcaggcggccagcttcttaccaatcttcccggtatggagcaattatcaggagcgtctctggagaagggcgctctcgacactactgacgggtacatgggtgtcaatcaagcaccagaaaagctcgacaagcaatgcgaaatgatgaaggcgcgccatcaagaactgctcagccagcaacagaactttatcctcgccacacaaagcgcccaggcttttctggaccagcacgggcataatctcacacccgaggagcaacagatgcttcagcagaaacttggggaattgaaagaacagtattccacaagcctcgcccagtccgaggccgaactgaagcaagtgcagactttgcaggacgagctgcagaagttcctccaggaccacaaggagtttgagtcatggctcgaaaggtccgagaaggagctggaaaacatgcataagggtggaagtagccctgaaaccctgccttctctgttgaaacggcagggctctttcagcgaagatgtgataagtcataaaggcgacttgaggttcgtaactataagtgggcaaaaggtactcgatatggaaaacagtttcaaggagggcaaggaacccagcgagatcggcaatctggtaaaggacaagctgaaagacgccaccgaaagatatactgcactgcattccaaatgcacccgcctgggctcccacctgaacatgttgctagggcagtaccatcagtttcagaactctgccgattctcttcaagcctggatgcaggcttgcgaggctaatgtcgagaagttgctcagtgataccgtcgcctccgacccaggagtgcttcaggaacaactcgccacaaccaagcagctccaggaagagctcgctgagcaccaggtgccggttgagaagctccagaaggtggctcgcgacataatggaaattgagggtgagcccgctcctgaccaccgccatgtccaggagacaaccgactcaatcttgagccatttccagtcactgtcatatagcctggccgagaggagcagcttgctgcagaaagcaattgctcaaagtcagtcagtccaggaatctctcgagtctctgttacaatccatcggagaagtcgaacagaatctcgaagggaaacaggttagctccctgagctcaggagtgattcaggaagcgctggctactaacatgaagctgaaacaggatattgccaggcagaagtcttcacttgaagcgactcgcgagatggtcaccaggtttatggaaacagcagattctacgaccgcagcagtccttcaagggaaactggcagaggtttcacaaaggtttgagcagctgtgcctccagcagcaggaaaaggagagtagcctgaagaagttgctgcctcaggcggagatgtttgagcacctgtcgggcaagcttcagcaattcatggaaaataaatctaggatgctcgctagcggaaaccagcccgatcaggatattactcactttttccagcagatccaggaacttaacctggagatggaagatcagcaggagaacctggatacccttgagcatctggtgacagaactctctagttgtggatttgcactggatctgtgccagcaccaggatagggttcaaaacctgcggaaagatttcacagagctgcagaagacggtcaaagaacgagaaaaagatgcctcatcttgccaggagcaactcgacgagtttcggaagctagtcagaacattccagaagtggctcaaggagacagaaggctccattcctccaaccgaaacgtcgatgtccgctaaagaacttgagaagcaaatcgagcacctgaagtcactgttggatgactgggccagcaagggtaccctggtcgaggaaataaactgcaaagggaccagtctggaaaaccttatcatggaaattacagcacccgactctcaggggaagacagggtctatccttccgtcggtggggagttctgtgggcagcgtgaacgggtaccacacctgcaaggatctgactgagatacagtgcgatatgagtgacgtgaatctcaaatacgaaaagttggggggcgtgctccacgagcggcaggagagcctccaagcaatcctgaatcggatggaggaggtacataaagaggccaactcggtgctgcagtggcttgagagtaaagaggaggtcctgaaatctatggatgccatgtcttcgcctacaaagactgagactgttaaggcacaggccgagagtaacaaggccttcctggccgaactcgaacagaacagccccaaaattcagaaagtgaaagaagctctggccgggctgctggtcacttacccgaactcacaggaagccgagaattggaaaaagatccaggaggagctaaattctcggtgggagagggcaactgaggtcaccgtggccaggcagcggcagctcgaggagagtgcctcgcatctcgcctgttttcaggccgctgagtcacagctgcgaccgtggttgatggagaaggaactcatgatgggcgttctcggccccctgtccatagatccaaacatgctcaacgcacagaaacagcaggtgcaatttatgctaaaggaattcgaggcacgacgccagcagcacgagcagctgaatgaggcagctcagggaattctgaccggccctggcgatgttagtctgagcacctctcaagtacagaaggaactgcagtccatcaatcagaaatgggtagagttgactgacaagttaaatagccgatctagccagatcgatcaggcaattgtgaaatctactcagtaccaggagctcctgcaggacctctccgagaaagtaagagccgtggggcaacgcctaagcgttcagtctgctattagtacccagcccgaggcagttaagcagcagcttgaggagacgtccgagattcgttctgacctggaacaactggaccatgaggttaaagaggcgcagaccctatgtgacgagctgtctgtgcttattggggagcagtatctgaaggacgagctaaaaaagagactggaaaccgtggcactccccctgcaggggctggaagaccttgcagcagacaggataaacaggctacaggctgcgctggctagtacccagcagttccagcagatgtttgacgagctccgcacgtggttggacgataagcagagtcagcaggcaaaaaactgccccatatcagctaagctggaacgcctacaatctcagctgcaagagaacgaggagtttcagaagagcctgaaccagcactctggctcctatgaagtgatagttgcagagggcgaatcattgctcctttccgtccctcccggagaggaaaaacggacattgcagaatcagcttgtcgaacttaagaaccactgggaggagctttcaaaaaagacagcagatagacaatctagactgaaagattgtatgcagaaggctcagaagtatcagtggcatgtagaagacctggtaccatggatcgaggattgtaaagccaagatgtctgagttgagagtgaccctcgatcctgtgcagttggagagttctcttttacggagcaaagccatgcttaatgaggtcgaaaagcgcaggtccctgttggagattctgaactctgccgcagatattctgatcaacagttcagaggccgacgaggatggcattagagacgagaaggccggaatcaatcagaacatggatgcagttaccgaagagctgcaagcgaaaacgggctctctcgaggaaatgacccagaggctcagagagttccaggaatcattcaaaaatattgagaaaaaggtggagggcgccaaacatcagctggagatcttcgacgccctggggtcccaggcatgctcaaacaaaaacctggaaaagctgcgcgcacagcaggaggtgctgcaggcgctggagcctcaggttgactacttgcggaactttactcagggtctggtagaggatgcccccgatggctcagatgcttcccagctccttcaccaggccgaggtcgcacaacaagagtttctcgaggtcaaacaaagggttaacagtggctgtgttatgatggaaaataagctcgaaggaatcggtcagttccattgccgcgtgcgggagatgttctctcagctggctgaccttgatgatgaattggatgggatgggcgccataggaagggacacagatagtttgcagtcccagatcgaagacgtcagattgttcctgaataagattcacgtgctaaagttagacattgaggcatcggaagccgagtgtcggcatatgttagaggaagaggggaccctcgaccttctggggctcaaacgcgagctggaagctctaaataaacaatgtggtaaactcacagagcgtggaaaggcaagacaggagcaactcgagctgaccctgggccgagtggaggacttttaccgtaaattgaagggactaaatgacgccactacagctgctgaggaagccgaggctctgcagtgggtcgtgggaactgaggtggaaattatcaaccagcagctggccgacttcaaaatgtttcagaaagagcaggttgaccctttgcaaatgaaactccagcaagtgaatggactggggcagggtctgatccagtccgccggcaaagattgtgatgttcagggccttgagcatgatatggaggagatcaacgcacggtggaatacactgaacaaaaaggtcgcacagcggatagctcagctgcaggaggctctgctgcactgtggaaaatttcaggacgcactggagcccctcctttcctggttggctgataccgaagaactcatagcaaatcagaaaccccccagtgccgagtataaagtggtgaaggcgcagatacaggaacagaagttgctgcaacggctcctggatgatcggaaagctacggtcgatatgttgcaagctgagggggggcgaatcgcccagtccgccgaactggccgaccgtgagaaaatcaccgggcagctcgaaagtctcgagagtcggtggaccgaattgctgtccaaggcagccgctcgccaaaagcagctcgaagacatccttgtcctcgcaaagcagtttcatgagacggctgagcccattagcgacttcttgtctgtgaccgaaaaaaagcttgccaacagtgagcccgtcgggactcagacagctaagatacagcagcaaatcataagacacaaggcactaaacgaagaaatcgtaaatcggaaaaaaaacgtggaccaggccattaagaacggccaggctctgttgaaacagacaacaggcgaagaagttcttctgatccaggaaaagctggatggtattaagacaaggtacgcggatatcacagtaacttcctctaaggccctgaggaccctggaacaggccagacaattagcgaccaagttccaatcaacttacgaggagctgactggctggctaagggaggttgaggaggagttagctacatccggaggtcagagtccaacaggggagcagattccccagtttcaacaacggcagaaggaactgaaaaaggaggtgatggagcacagactcgttctggacacagtgaacgaggtgtccagagcgcttctcgagctcgtgccctggcgggcgcgggagggcctagataagctcgtgtctgatgcaaacgaacagtataagctggtgagcgataccattggccagagggtggacgagattgatgcggctattcagcgcagtcaacagtacgagcaggccgcagatgcagagctggcatgggtggctgagacaaaaaggaaattaatggcattggggcccatcagattggagcaggatcagacaacggctcaacttcaggtacaaaaggctttcagtatcgacatcatcagacataaagatagcatggatgagttattcagtcaccggtcagaaattttcggcacatgcggggaagaacaaaagaccgtcctgcaagaaaagaccgaatctctcattcagcaatacgaggccatttctctcctgaacagcgaacgttacgcacgtcttgaacgagcccaggttctggtcaatcaattttgggaaacctatgaagagctttctccttggatagaggagactagggcgctgatcgcccaactaccttcacctgctatcgaccacgagcagttacgccagcagcaggaagagatgagacaactccgtgaaagcatcgcggagcataagccacacatcgacaagctactgaagatcggtcctcagttaaaagaactaaaccccgaagagggggagatggtcgaggaaaagtaccagaaggctgaaaatatgtatgctcaaataaaggaagaggtgcgtcagcgcgcccttgcgcttgacgaggcggtaagtcagagcacacagataactgagtttcacgacaagattgagcccatgctggagacgttggagaacctctcctccaggctacgtatgccaccccttataccagcagaggttgacaaaattagggagtgcatctcagacaataagtctgccacagttgagctggagaagcttcaacccagcttcgaggccctgaagcgcagaggtgaagaactgattggcaggagtcaaggtgccgacaaggacctggcggccaaggaaatccaggacaagttggaccagatggtcttcttttgggaggacatcaaggcccgagccgaagaaagggagattaagttcctcgacgtgctggagctagcagagaaattttggtatgatatggcagccctccttacaacaatcaaggatacacaagacatcgtgcatgatctcgaaagccctggaatcgatccgagcatcatcaagcagcaggtggaagccgccgagacaatcaaagaggaaaccgatgggctccacgaagaactggaattcatccggattttgggcgccgatctcatcttcgcatgtggagaaactgagaaacccgaggtcagaaagagcatcgacgagatgaataatgcctgggaaaatctcaacaagacctggaaagaaaggctcgaaaaactggaagacgcaatgcaggccgcagtacagtaccaagatacgttacaagcgatgtttgactggctcgataacacggtcatcaagctatgcaccatgcctcccgttggcacagacttgaacacagttaaagaccagttaaacgagatgaaggagttcaaggtggaggtctaccagcagcagatagagatggagaagcttaaccaccagggggagctgatgcttaagaaggctactgatgagacagaccgcgacattatcagagagccactcacggaactgaagcatctgtgggagaatttaggcgagaaaatagctcaccggcaacataagttggagggagccctcctagctctgggacaattccagcacgcccttgaggagctcatgagctggctcacacacacagaagagttattagacgcacaaaggccaatcagcggcgatccaaaagtgatcgaagtagaattagccaagcatcatgtgcttaagaacgacgtcctggcccaccaagcaacagttgagaccgtcaataaggccggcaacgagctgctggagtcctctgcaggtgatgatgcttcctcattaaggtctaggcttgaagctatgaatcagtgttgggagtctgttcttcagaagactgaggaaagagaacagcagctgcagagtactctccagcaggcgcagggctttcacagcgagatcgaggactttcttctcgagctgacccggatggaatcccagctgtctgcgtcaaaacccactggcgggctccctgaaactgctagggaacagctcgacacccacatggagttgtacagtcaactgaaagcaaaggaggaaacctacaatcaattactggacaaagggcggctcatgctgttatctagagacgattcgggctccggctcgaaaaccgagcagtctgtggccctgctggaacagaagtggcatgtcgtctctagcaagatggaagagaggaagtctaaacttgaagaggcactgaacctggccaccgagttccagaactccctacaggagttcatcaattggctcaccctcgcagagcaaagcctaaacatcgcctctcctccttctctaattctcaacaccgttctgagtcagatagaggaacacaaggttttcgccaacgaggttaacgcccatagagaccaaattattgaactcgaccagacgggaaaccagttgaaatttctgtctcagaagcaggatgtcgtcctaattaagaatctattggtgagcgttcagtcccgttgggagaaggtggtccagcgcagtattgagaggggacggtctctggatgacgcccgtaagcgggcgaagcagttccatgaggcctggaaaaaactgatcgattggctggaggatgctgagagtcacctggatagcgaactggaaatatctaacgacccagacaagataaaactacagctttcaaagcacaaggagtttcagaagactttgggcgggaaacagcctgtctatgacacgactattcgcaccggacgcgctctgaaggaaaagacactcctcccagaggatagtcagaagcttgacaattttttaggcgaagtccgcgacaagtgggacaccgtgtgcggtaaaagcgtagagcgacagcacaagctcgaagaagcgctgttgttctcgggccagttcatggacgctctgcaggctttagtggattggttatacaaggtggagccccagctcgccgaggatcagccggttcacggcgatctagatctcgttatgaatctgatggatgcccataaagttttccagaaagagcttggaaagagaaccggcaccgttcaagtgctgaaaagatccggcagggaattgattgaaaattccagagacgataccacctgggtaaagggccaactgcaggaactgagtacaagatgggacacagtgtgtaagctgtccgtcagcaaacagtcccgcttagaacaggccctcaaacaagccgaagttttccgggatacagtgcacatgctgctcgagtggctttccgaggctgaacagactttacgattcaggggcgccttgcccgatgatacagaggcgttacagtcgctgattgacacacataaagaattcatgaaaaaggttgaggagaagcgtgtggacgtcaattcggccgtggccatgggcgaggtgatcctcgcggtttgtcatcccgactgcattacaactataaagcattggatcaccattatcagagcaagattcgaagaggttttaacatgggctaagcagcaccagcaacggcttgagaccgcgctgtccgagctggtggcgaacgcagaactcttagaagagttactcgcatggatccaatgggctgagactacgctcatccagcgggatcaggagcctatccctcagaatatcgacagggttaaagcacttattgcggagcaccagacgtttatggaagagatgacacgtaagcagccagacgtggacagggtgactaaaacctacaaacggaaaaatatagaacctacccacgctccatttatcgaaaaatcccggtccggcggcaggaaatctctcagtcagcctaccccaccccccatgcctattctcagccaatccgaggccaagaaccctagaataaaccagctaagcgcccggtggcaacaggtttggctccttgcactggagagacaacggaagctgaatgacgcccttgataggctggaggagctaaaagaattcgccaactttgactttgatgtatggcgcaagaagtacatgcggtggatgaatcacaaaaaaagtagagttatggactttttccgacggatcgacaaggatcaggacggcaagatcacaagacaagaattcattgacggaatactggccagcaagtttcctacaaccaagctcgaaatgaccgccgtggcggacatctttgatcgcgatggcgacggctatatagactactatgagttcgtagcagccttacacccaaacaaagacgcctacaggccaacaactgacgccgataaaatagaagatgaggtgacacgccaggttgctcagtgtaagtgtgccaaaagattccaggtcgaacagataggtgaaaataaatatagattcggggactcacagcaactgaggctggtaagaattctaagaagcacagtgatggtgagggttggaggtggatggatggccctggacgagttcctcgtgaagaatgatccctgcagagctaggggccgtacaaacatagaactccgagagaaatttatactgccagagggggcctctcagggtatgaccccgtttcggagtcgcgggagacggtccaaaccctcttctcgggctgcttcacccacgcggtcaagttcctccgcctctcaatctaaccactcgtgcacaagcatgccatcctccccagctactcctgctagtggcaccaaggttattccctcctctgggtctaagctcaaaaggcctacacctactttccattcatcaaggacctcgctcgctggagatacatcaaacagctcatctcccgcaagtacaggcgccaaaaccaatagagcagatcccaagaaatccgcatctagaccagggtcccgagctgggtcccgggctggcagccgcgcctcctctcgcagaggaagtgacgcctccgactttgatcttttagaaacacaaagcgcctgcagcgatacaagtgagagtagcgcagctggcggccagggaaatagccggagggggctgaataagccaagtaagattcctacaatgtctaagaagaccaccactgccagccccagaacaccaggccctaagcggtag

SEQ ID NO: 195146 - DNA, 1155 bp, synthetic construct
  misc_feature 1..1155: note = Description of Artificial Sequence: Synthetic coding sequence
  source 1..1155: mol_type = other DNA
atcaccagcccctgggccccccggcccagctgcagcagcccctgggccatgagttcaagtgacgaagaaaccctctcggagcggagctgcagatctgagcgcagctgccggagcgagcgctcctatcgctcagagagatcaggcagtctgtcaccgtgtcctcctggagacactctgccttggaatctcccactgcatgagcagaaaaagaggaagtcccaggacagtgtgcttgaccccgcagaacgggcagttgttagagtggcagatgagcgggaccgggttcagaagaagactttcacaaagtgggtaaacaagcacctgatgaaagtccgcaaacacatcaacgacctgtatgaagatctccgggatggccataacttgattagcttgctggaggttttgagcggaataaaactgcccagggaaaagggaaggatgcgattccataggctgcagaacgtgcagattgccttggatttcttgaaacagcgtcaggtgaagcttgtcaatatacgaaacgacgatatcacagatggcaaccccaaactaactctggggttgatctggaccattattctgcacttccagatatccgatatttacatcagtggggagtcaggggatatgtctgcgaaggaaaaactcctgctctggacccagaaagtgactgctggatacaccgggatcaagtgtaccaacttctcctcttgttggagtgatgggaaaatgttcaacgcgctaatccacaggtatcggccagacctggtcgacatggaaagagtgcagatacagagtaaccgcgaaaacttggagcaagccttcgaggttgcagaaaggctgggggtcactcgattacttgacgcagaagatgtcgatgtgcccagcccagatgaaaagagtgtcataacttacgtcagcagcatctatgatgcattccctaaggttcccgaggggggcgaaggaattagtgcaacggaggtggattctcggtggcaggaatatcagagtagagtcgactcgctcatcccgtggataaaacagcataccatcctgatgtcggacaaaaccttcccacagaatccagtcgagctgaaggccctttacaaccaatacatccattttaaagaaaccgaaatcctggcaaaagaatag

SEQ ID NO: 195147 - DNA, 603 bp, synthetic construct
  misc_feature 1..603: note = Description of Artificial Sequence: Synthetic coding sequence
  source 1..603: mol_type = other DNA
atgcccctgctggacagcagctacctgccccccaccatcttcatcctcacccatgtgttgggagttgccggagtgctctattggaagcgtcatgcgcggggacgcgccgacgaacgagatagggtgcagaagaagacattcaccaagtgggttaacaagcatctgatgaaagtgcggaagcacatcaacgatctgtacgaagacttgcgggacggccataacctcattagtctactcgaggttctgtccggtatcaaattgccccgtgagaagggtcgtatgcgttttcatcggctgcagaacgtgcagattgccctagattttctgaagcaaaggcaggtcaagctggtgaacattaggaatgatgatattaccgatgggaaccccaagctgacactggggttgatatggaccatcatcttacattttcagatttcagacatctacatctctggagagtccggggacatgtccgctaaggaaaaactgctgctgtggacgcaaaaagtgacagccggttatacggggatcaaatgtactaattttagtagttgctggagcgatggaaaaatgttcaatgcgttgatccaccgatacagatag

SEQ ID NO: 195148 - DNA, 15903 bp, synthetic construct
  misc_feature 1..15903: note = Description of Artificial Sequence: Synthetic coding sequence
  source 1..15903: mol_type = other DNA
atgagcagcagcgacgaggagaccctgagcgagcggagctgccggtcagagcggagttgtcgatctgagcgctcttataggtcagagcgcagcgggtcactgtcaccctgtccacctggggatactctaccctggaatctgcccctccacgagcagaaaaagagaaagtcgcaggactcagtcctggatcccgccgagagggccgttgtccgagtggccgacgagcgcgatagagtgcaaaaaaagactttcacaaaatgggtcaataagcatctcatgaaggtgcggaagcacattaatgatctctatgaggacctgagggacggtcacaacttgataagtcttttagaagtgctgagtggaattaaacttccacgcgaaaagggtaggatgcgattccacaggctccagaacgtccagattgccctcgactttctcaagcagaggcaagtcaagctcgtcaacattcgaaacgatgacattacggatggcaatcccaaattgacactggggcttatttggacgattattctccacttccagatctctgacatatacatctccggcgagtcgggggacatgtctgcaaaagaaaaacttctgctgtggactcagaaggtaaccgctgggtatactggtattaagtgcactaacttctctagctgctggagtgatggaaagatgttcaacgccctgattcatcgctacagacctgacctggtggatatggaacgcgttcagatccagagtaatagggaaaacctggaacaagcctttgaagtggccgagaggttaggcgtcacacgactgctcgacgccgaggatgtggatgtgcccagccctgacgagaagagcgtgattacttacgtgtctagcatttatgacgcatttcccaaggttcccgaaggtggtgagggaatttctgcgacggaggttgattcaagatggcaagaataccaaagcagggtggatagcctgatcccatggatcaaacagcacacaattcttatgagtgataagacattcccccagaatcccgtggagttgaaagccctgtacaaccagtacattcatttcaaagagaccgaaatcctggcaaaggaaagagaaaaggggcgcatcgaggagctgtataagttgctggaagtgtggattgagtttgggagaattaaacttcctcagggttatcaccccaatgacgtagaggaggaatggggaaaactaattattgagatgctcgagagggaaaagagcctgaggcccgcagtcgagcgactggaattactgctgcaaatcgccaataagatccagaatggagcacttaactgtgaagagaaacttacattggccaagaacactctacaagctgacgctgctcacctcgagtctggccagccagttcagtgcgagtccgatgtgataatgtacatccaagagtgcgaaggtcttatcagacagttgcaggtggatctacaaatcctacgtgacgaaaactattaccaactagaagagcttgcttttagggtcatgcgcctgcaggacgaactagtgacactgagactcgaatgtactaacctgtatcggaaagggcacttcactagcctggaacttgtacctccaagcactttgaccaccacacacttgaaagctgaacccttgaccaaggccacccatagcagttctacgtcctggttccgtaagcctatgactcgcgcagagctcgtggcaattagtagctccgaagacgaaggcaaccttagattcgtgtacgagctgcttagctgggtcgaagagatgcagatgaagctggaacgagcagagtggggcaatgatctccccagtgtggaactgcagttggaaacgcaacagcacatccatacctctgtcgaagagttaggatcatccgtcaaggaagctagactgtatgaggggaaaatgtcccagaacttccatacctcttacgctgaaacactgggtaagcttgagacgcagtattgtaaattgaaagaaacctcctcttttcggatgcgacatctacagagtctgcataaattcgtatctagggccacggcggagctgatctggctgaacgagaaagaggaggaagagttggcttatgactggagcgacaataatagcaatatctccgctaagcgcaattatttttctgagctcacaatggagctcgaagaaaagcaggacgtatttaggtctctccaggatacagctgaattactatctttggagaaccacccagccaagcaaaccgtggaagcctactctgctgcggttcagtcacagctccagtggatgaaacaactatgcctgtgcgttgagcagcacgtaaaggagaataccgcttacttccaatttttttcagacgccagagaactcgagtcgtttttgagaaatcttcaagatagtattaagagaaaatattcctgtgatcacaacacgtcactctcgaggttggaagacctgcttcaggactctatggatgaaaaagaacagctgattcagtctaaaagttccgtcgcgtccctggtcgggagatcgaagactatcgtccaactgaagccccgctctcctgatcatgtgctcaaaaacaccatcagtgtcaaggcagtgtgcgattatagacagatagagatcactatctgtaaaaacgatgaatgtgtgctggaggacaactctcagcgcactaaatggaaagtcataagtccaaccggaaatgaggccatggtgccgtcagtgtgttttctgatcccccctccaaataaagatgccattgagatggcctcacgggtggaacagtcttatcagaaagttatggcgctgtggcaccagttgcatgtaaacacgaagtcactgatatcctggaattacttacggaaagatctggatctggtgcagacctggaatctcgaaaagctgcggtcctccgctcctggtgaatgtcatcagattatgaagaatttgcaagctcactatgaggattttctgcaagattcaagagacagtgtcctgttttctgttgctgacaggctccggcttgaagaagaggtcgaggcttgtaaagcaaggtttcaacatttgatgaaatcaatggagaatgaagacaaggaggaaactgtcgcaaagatgtatatcagtgagctgaaaaacatacggctgaggcttgaggagtacgaacagcgcgtggttaagaggatccaaagcctcgcctcttctcggaccgaccgggacgcctggcaggacaacgcactcagaattgccgagcaggaacatacgcaggaggacctgcagcaacttagatcagatctagacgcggtgtccatgaaatgcgattcttttttgcaccagagcccctctagctcctctgtccccacgctgcgcagcgagttgaacttgctcgtagagaaaatggatcacgtgtacgggctgtctaccgtgtacctcaacaaactcaagacagtggatgttattgttaggtctatccaggacgccgaactcctggtgaaaggatatgaaatcaaattgtctcaggaggaggttgtgctggcggatctatctgctcttgaggcacactggagtactttacgccattggctgagcgatgtaaaggacaagaattccgtcttttcagttcttgacgaagagatcgccaaagccaaagtggtggctgaacaaatgagcagattgactcccgagaggaatctggacttggagagataccaggaaaaaggcagccagcttcaggaacgatggcaccgggtgatcgcgcagcttgagatccggcagagcgagctggagagtatccaagaggtactcggggactaccgagcgtgtcacggcactttaataaaatggatcgaggaaactacagcacaacaggaaatgatgaagccaggacaggctgaggactcaagggttctctccgaacagctgtctcagcagactgcattatttgctgagattgagcggaatcagacaaagctggaccagtgtcagaagttttcccaacagtactccactattgttaaagactacgaacttcagctcatgacatataaagcctttgttgaatctcagcagaagtcgccaggtaaaaggagacgcatgctatctagctccgacgctattacccaggagtttatggatctccggacgagatacaccgcattggtgaccttgaccacacaacatgttaagtacatatctgacgccttgaggagacttgaggaagaggagaaagttgtagaggaggagaagcaagaacacgtggaaaaggtaaaggaactgttaggctgggtcagcacacttgcgaggaatacacagggtaaggcaacatctagtgaaacaaaagaatccactgatatcgaaaaggccatcctcgaacagcaggtcctcagtgaggaactcaccactaagaaggaacaggtgtcggaggcaatcaagaccagccagatctttcttgccaagcatgggcacaagctcagcgagaaagaaaaaaagcagatctctgaacagctgaatgccctgaacaaagcctatcacgatctctgcgacggctctgccaaccagctgcagcagctacaatcacagctggcccatcagaccgagcagaagacactacagaaacaacaaaacacttgtcaccagcaactggaagacctgtgctcgtgggttgggcaagcagaacgagccctggctggacaccaagggcgcaccactcaacaggatctgagcgcattgcaaaaaaatcagtccgatctgaaggacctgcaggacgacatacaaaatcgggcaacgagcttcgccactgttgtgaaggacatcgaggggtttatggaagaaaatcagaccaaactcagcccacgcgagctgacggctctcagagaaaaacttcaccaggcaaaggaacaatacgaggccctgcaggaagaaacgagagtcgcacaaaaggagctggaggaggccgtgacgtcagctttacagcaggaaacagaaaagagcaaagccgctaaggagctcgcagaaaacaagaagaaaattgatgccctgttggattgggtgacatcagttggcagttccggaggccagcttctgacaaacctcccgggcatggagcaactgtctggcgccagtctggaaaagggcgcattggacactaccgacgggtacatgggagtgaatcaggcgcctgaaaaactcgataaacagtgtgaaatgatgaaggccagacaccaggagttgctgtcccaacaacagaattttattcttgccactcagtccgcccaggcatttttggatcaacatggccacaatctcactcctgaggaacaacagatgttgcaacagaagcttggcgaactgaaagaacagtactcaacctccttggcacagagcgaagcagaattgaagcaggtgcaaaccttacaggacgaattgcagaaatttttgcaggaccacaaggagtttgaatcatggctggagcgatcagagaaggagctagagaatatgcataagggcggctcctctcccgaaaccctgccatcccttctgaagcgtcagggaagttttagcgaagatgtcattagccacaagggagacctgagatttgtaactatttctggccaaaaagtattagacatggagaacagttttaaggagggtaaggaaccgagcgagataggcaacctcgtgaaggacaagctcaaagatgccacagagagatacaccgccttacattccaagtgtacacgcctgggcagccatctgaatatgcttctgggtcagtatcatcagttccagaactctgccgatagtttacaagcatggatgcaagcctgcgaagccaatgtggagaagcttctttccgatacagtggcatcggatcccggagtgctgcaagagcagctagccacaacaaaacaacttcaggaggaactcgccgaacaccaggtacccgtcgagaaactgcagaaagtcgcccgggacatcatggagatcgaaggggagcccgctccagaccacaggcatgtccaggagacaactgactctatcctgtcgcacttccagtcccttagctacagccttgccgagcgttcttctctgcttcaaaaggcaatcgcgcaaagtcaaagtgtccaggagagccttgaatccctgctgcaaagcatcggagaagttgaacagaatctggaggggaaacaggtgtcctccctttcatccggtgtgatccaagaggcccttgcaacgaatatgaaattgaaacaggacattgcaagacagaaaagctctcttgaggccacaagggagatggttaccagattcatggagacagccgacagcactacagcagccgtgcttcagggcaagcttgctgaggtatcgcagcggtttgagcagctttgccttcagcaacaggaaaaggaatccagcctgaagaaactgctgccccaggctgagatgttcgagcatttgtccgggaagctgcagcagttcatggaaaataaatctcggatgctggcaagcgggaaccagccggaccaagacataacacatttcttccagcagatccaggagctcaatctcgaaatggaggatcagcaggaaaacctggacacattggagcatctggttactgagctcagtagctgtggttttgcactcgatctctgccagcatcaggatagagtgcagaacctgaggaaggattttacggagctgcaaaagaccgtgaaggaaagagagaaagacgcatctagctgccaggaacaacttgacgagttccgtaaactagtccgcacatttcagaagtggctcaaagaaaccgagggctccattccgcccacagaaacttccatgagcgcaaaagagctagagaagcagattgagcacctaaagtcacttttggatgattgggccagtaaaggcacccttgtagaggagatcaactgcaaggggacctcgctggagaacttaattatggagatcacggcacccgattcacaaggaaagaccgacttgacggaaatccagtgcgatatgtctgacgtcaatctgaaatacgagaaactgggtggagtactccacgaacgacaagaatctctgcaggcaatcttgaaccgcatggaggaggtccataaggaagctaatagcgtactgcagtggctcgaaagtaaagaggaagtgttaaagagcatggacgccatgtcaagccccacgaaaacagagaccgtgaaggcacaggctgaatctaacaaagcttttctggccgagctcgaacagaatagcccaaagattcaaaaagttaaggaggccctggccgggctcttggtcacatacccgaactcacaggaggccgaaaattggaagaagattcaggaggagctgaattctcgatgggagcgcgcaactgaggtcaccgtagcccgtcagcggcaactagaagaaagcgcaagtcacctggcctgcttccaggcggcagagagccaactgcggccctggcttatggaaaaggaattaatgatgggggtgttagggccactttcgattgatcccaacatgctgaatgcccaaaaacagcaagtgcagtttatgctcaaagagtttgaggcccggcgtcagcaacatgagcaactgaacgaagccgcccaaggtatcctgacggggccgggcgacgtgagcttatcaactagtcaggtgcaaaaagagctgcagtccattaatcaaaaatgggtcgagttgactgataagctcaattcccgcagctcccagatcgatcaagcaatcgtaaaaagtactcaatatcaggagctgctgcaggaccttagtgagaaggtgcgcgcagtgggacagcgtctcagcgtacaatctgctatttccacacagcctgaggcggtaaagcaacagctggaagaaaccagtgaaatcagaagcgacctggagcagctggatcacgaggtaaaggaggcacagacattgtgcgacgagctctcggtgctgataggagaacagtacttaaaagatgagctgaagaagcggctggaaactgtggccctccctctccagggactggaagatctggcggcagaccgtatcaatcggctgcaggccgcgctcgcatccacgcagcaattccagcagatgttcgatgagcttagaacttggctggacgataaacagagccagcaggctaagaactgccctatatcagccaaactcgagcggttacagagtcagttgcaggaaaatgaggagttccagaagtctctgaatcagcactctggctcctacgaggtgattgtagctgagggggagagtttgttgctgtctgttccccctggtgaagagaagaggacactgcagaaccagttggtcgaactaaaaaatcactgggaggaactgtctaagaagacggctgatagacagtctcgactcaaggattgcatgcaaaaagcccagaagtaccagtggcacgtcgaggacctggtgccctggattgaggattgcaaagccaaaatgagcgagctgcgcgtgaccttggaccctgtgcagctggaaagtagccttctgagaagcaaggccatgctgaatgaggtcgagaaacgtcgatcactgcttgaaattctcaactccgccgctgacatcctgattaactcttccgaggccgacgaagacgggatccgagatgagaaagcagggatcaatcagaatatggacgccgtgaccgaagagctgcaggctaaaacagggtctctggaagaaatgacacagcgcctgagggagttccaggagtcgttcaagaatattgagaagaaggtcgaaggcgccaaacaccagttagagatctttgacgcactcggttcgcaggcatgtagcaacaaaaacctcgaaaagctgagggctcagcaggaagtcttacaagctctggagccacaggtggattatttgaggaacttcacacagggactagtggaagacgcacccgatggctcggatgcctcacagctgcttcatcaggcagaggtcgcccagcaggaatttcttgaggttaagcagcgagtcaacagcggctgtgtgatgatggaaaacaagctcgagggcatcggccaatttcactgccgggtgagagagatgttctcacaacttgctgatttggacgacgagctggacggaatgggggcaattgggcgagataccgactcactccagagccaaattgaggatgtgcgtctgtttttaaacaaaatccacgttctgaagttggacatcgaggcctcagaggctgagtgtcggcacatgttggaggaagaagggacgctggacctgttgggcttaaagcgcgagctcgaagccctcaacaagcagtgcggcaagctaactgaacgaggtaaagcgcgccaggaacagttagagttaactctgggaagggtagaggacttttaccggaagctcaaagggctcaacgacgcaaccaccgccgccgaggaggccgaggcccttcagtgggtcgtggggacagaggtcgagataatcaatcagcagctggccgattttaaaatgtttcagaaagaacaagtcgaccccctgcagatgaagctgcagcaggttaatggactgggtcagggtctcattcagagtgctggcaaagattgcgacgtgcagggcctggaacatgatatggaggaaatcaacgcgagatggaatactctgaataaaaaggtggcccagcgcatcgcacagctgcaggaggccctcctccactgcggcaagttccaggacgcactggaacccttgctgtcttggctggcggacacagaggagctgatcgcaaatcagaaacccccatccgctgaatataaagtcgttaaggcacagattcaggagcagaagctgctgcaaagacttctggatgacaggaaggctaccgtcgatatgctccaggccgaagggggtcggatcgctcagagcgcagaactggccgaccgcgagaaaatcacaggccagctcgaatctttggagagtcggtggaccgaactcctgtctaaggccgctgccaggcaaaaacagctcgaggacattttagtgctcgccaaacagttccatgagacagccgaacctataagcgacttcctgtcagtgaccgagaagaaattggctaatagcgagcccgttggaacccagaccgccaagatacagcagcagatcatcagacacaaggccctgaacgaggagatcgtgaaccggaagaagaatgtggaccaggcaattaaaaacgggcaagcccttcttaagcagactaccggggaagaggtgttgctgatacaggagaaacttgacggaattaaaactcggtatgccgacattactgtcacctcctctaaggccctccggaccttggaacaggcccgccagttagccacaaagtttcagagcacctacgaagaactgactggctggctcagggaagtggaagaggagctggctaccagtggcggtcagagtccgaccggtgaacagattccacaattccagcaaagacaaaaagagttaaagaaggaagtcatggagcataggttggtactggacacggtgaacgaggtgtcacgtgcattactggagctagtgccgtggcgggcgagggaggggttagacaaactggtgtcggacgcaaatgaacagtataagctggtcagcgatacgatcggtcagcgggtcgacgagatcgacgcagccatccagaggtcacagcaatacgaacaggcagcagacgctgagctggcgtgggtcgccgaaacaaagcggaagctgatggccctgggacccatacgcttggagcaggaccaaacgactgcacaattgcaggtgcaaaaggccttctcaattgacatcatacgccataaagactcaatggatgagctcttttctcatcgcagcgaaattttcgggacctgcggggaagagcagaagacggtactgcaagagaagacagagtctcttatccagcagtatgaggcgatttctctgctcaacagtgaacggtatgcgaggctggagcgcgcccaggtgcttgtgaatcagttttgggagacctacgaggagctatcgccttggatagaggagacacgagctcttattgctcagctgccgtcccccgctattgaccatgagcagttaaggcaacagcaggaggaaatgagacaactgagagaaagtatcgctgagcataaaccccacatcgacaaattacttaagatcggtcctcagctcaaagagcttaacccggaagaaggagagatggttgaagagaagtatcagaaagcagagaacatgtacgctcagatcaaggaagaggtccgccagcgcgcgctggcactggatgaagcagtctctcaatcaactcaggtgagtcagttccacgataaaattgaaccaatgttggaaactctggaaaacctgagctctcggctgcggatgcccccactgattcccgccgaggtcgataaaattagggaatgcatcagcgataataaatccgctacagttgaacttgaaaagttgcagcctagcttcgaagcgcttaaaagaagaggcgaagagctgatcgggagatcacagggcgccgataaagacttagccgctaaggagatacaggacaagctagatcaaatggtgtttttctgggaagatatcaaagcaagggccgaggagagagagattaagttcctcgatgtgctggagcttgctgaaaagttttggtatgacatggcggctcttctaacaactataaaagatacccaagatattgtccatgatctggaatcacctggcattgatccatccatcataaaacagcaggtggaggcggccgagacaataaaggaagaaactgacggactgcacgaggagctcgaattcatacgcattttaggggccgacctgatctttgcctgcggggagaccgagaaacccgaggtcagaaagtccatcgacgagatgaataatgcttgggaaaatctgaacaaaacatggaaggagagactcgagaagctcgaggatgcgatgcaggcagccgtgcaataccaggacaccttacaggcaatgtttgattggctggataatactgtgatcaaactgtgcactatgcctcccgtcggcacagacctgaacactgtgaaggatcaactgaatgagatgaaagagttcaaggtggaggtttatcagcagcaaatcgagatggaaaaactcaaccatcagggtgaactgatgttgaagaaggcgacagacgaaactgacagagacattataagagaacccctgacagagctgaagcacctgtgggagaacctgggtgagaagatcgcacaccgacaacacaaactggagggtgcccttctggctctcggacagttccagcatgccttagaagaactgatgtcatggcttacccataccgaagaactgctcgatgcccagagacctatttctggagaccccaaagtcatcgaagtggaactggcaaaacatcacgtgctcaaaaatgacgtcttggcacaccaggccacggtggagacagtgaataaagccggcaacgagctgctggagtcttccgctggggatgacgcctctagcctgcgttcacgtttggaggctatgaatcaatgctgggagtcagtgctgcagaagacggaggagcgagagcaacagctacagtccacactgcagcaagcccaaggcttccacagcgaaatcgaggattttctgctggaattaacaaggatggaaagccagcttagtgcgtcgaagccaacgggagggttgccagaaaccgcccgcgaacagctagatacacatatggagctatacagccagctgaaagctaaagaggagacatacaatcagttactcgataaggggagactgatgctcctgtcgcgcgacgattctggcagcggaagtaaaacggaacagtccgtggcactgttagagcagaagtggcacgtcgtgagctcaaagatggaagaaagaaaatccaagctggaggaggcccttaacctagcaaccgagttccagaacagtctgcaggaatttatcaattggctgactctggctgaacagagcctgaacattgctagcccacctagcttgattctcaatacagtgctctcccagattgaggaacacaaggtgtttgccaacgaagtcaatgcccacagggatcagataatagagctggatcagacgggtaatcagctaaagttccttagccaaaaacaggatgttgttctgatcaaaaatctgctggtctccgtacagtccaggtgggagaaagtggttcagcgatccattgagaggggccgctctctcgatgacgccaggaaaagggctaaacagttccacgaggcctggaaaaagctaattgactggctggaagacgcagaatcacatctggattccgagttggagatttccaatgatccagataaaatcaagctccagctcagcaaacacaaggaattccagaaaacccttggtggcaagcagcctgtttatgacacgaccattcggacaggtcgggcattgaaggaaaaaacactcctcccagaggatagccagaagctggacaattttctgggggaggtccgcgacaagtgggatacagtgtgcggaaaatctgtcgagaggcaacacaagttagaagaggccctgctgttcagtggccaatttatggacgccctgcaagctcttgtggattggctttacaaggttgagccccaactcgccgaagaccagcccgtccacggggacctcgatctagtgatgaacctcatggatgcgcacaaagtgttccaaaaagaactcggaaaacggaccggaacggtacaggtcctgaagaggtccggccgggagctcattgagaactcccgcgacgacactacctgggtgaaagggcaactccaggagctttcaacacggtgggacaccgtctgtaaactaagcgtctcgaagcagagcagactggagcaggctctaaaacaagccgaggtgttccgggatacagtccatatgctcttagaatggctttcagaggccgagcagactctcagattccggggggcactacccgacgacacagaagccctgcagagcctaatcgatacccataaggaattcatgaaaaaagtggaggagaaacgtgtcgacgtgaattcagccgtcgcaatgggcgaggtcatacttgccgtctgtcatcccgactgtatcacaaccattaaacactggattacgatcatacgcgctcggtttgaggaagtgctaacttgggctaagcagcaccaacagaggctggaaactgccctaagcgagttagtggccaacgccgagctgctagaagaacttctggcttggattcagtgggcagagactacccttattcaaagagatcaggagccaattccacagaatattgacagggtaaaggctctcattgcagagcaccagacctttatggaggagatgaccaggaagcagcctgatgtggaccgcgttaccaagacatacaagcggaagaatatcgagccaactcacgctccattcatcgagaagtcacgctccggggggcggaaatccctcagccagcctacaccaccacccatgcctattctgtctcaatcagaagccaagaatccgagaatcaatcaactgagtgcccgctggcagcaggtctggcttctggcactggaacgtcaacgtaaactgaatgatgctctggataggctagaggaactgaaggaattcgcaaacttcgacttcgacgtgtggcgcaagaaatacatgaggtggatgaatcataaaaaatcacgggtgatggatttttttcggcgcatagacaaagaccaggatgggaagataacccggcaggaatttatagatgggatcctagcgtcaaagtttccgaccactaagctggaaatgacggcagtggcagacatatttgatagggacggcgatgggtatattgattattacgagtttgttgccgcgctccaccctaataaggatgcctatagacctaccacagacgccgacaaaatcgaagacgaggtcactcgccaggtagctcagtgcaaatgtgccaaaagatttcaagtcgagcagataggggaaaacaagtaccgttttggcgactcacagcaacttcgtctcgtacggattctacggtccactgtcatggtgcgggttgggggcggatggatggctctcgatgaatttctcgtaaagaatgacccatgccgggccagaggaaggactaatatcgaactacgcgaaaagttcatcctgcccgaaggagcttcccagggaatgaccccattccgatctcggggcaggcgcagtaagccatcttcaagggcagcttcaccaacccgcagcagctcttcagcttcccagagtaatcactcttgcacctcgatgccttcaagtcctgccacacccgcctcaggaacgaaagttatcccatcctcagggtccaagctcaaaagaccaacgccaacattccacagctcccgcacttccctggcaggagatacgtctaattctagcagccccgcatccactggggcaaaaacaaatcgtgccgatccgaaaaaatcagccagtagaccgggctcacgagctgggtcccgagcagggtcacgcgctagctcacgccgcggaagcgacgcctccgattttgaccttctggaaactcaatctgcatgttccgatacttccgagtcttcggcagctggtggccaagggaattcaaggaggggcctaaacaaaccctcaaagattcccacaatgtccaagaagaccactactgcttcaccccgaacacccgggcccaaaagatag

SEQ ID NO: 195149 - DNA, 1035 bp, synthetic construct
  misc_feature 1..1035: note = Description of Artificial Sequence: Synthetic coding sequence
  source 1..1035: mol_type = other DNA
atgaccgccgtggccgacatcttcgaccgggacggcgacggctacattgactactatgagttcgttgccgcactccacccaaataaagatgcctatcgacctacaacagacgcagacaagatcgaggacgaggtgaccagacaagtcgcccaatgcaaatgtgccaagagattccaggtcgaacagatcggagaaaataagtacagatttggagactcccagcagctgagattggtgcgcatcctacgctcaacagtgatggttcgtgttgggggggggtggatggctctggacgaattcctggtgaaaaacgatccgtgtcgcgctcgcggtcgaaccaacatcgagctgcgggagaagtttatactcccggaaggcgcaagccaaggcatgacgccctttcggtccaggggccgtcggagtaagccatcatctagagccgcaagtccaactcggagttccagctcagctagccaaagcaatcatagttgtacatcaatgccctccagtcccgcaacccccgcaagcggtaccaagacaagccttcagttcagccgttgctatgacaagccttggctggtgaacagcaaggccgggacccctatccgcgatagtcactctccggacctgcagctgccgacgcccgaggtaattccatcttcagggtcaaaactcaaacgtcccacacctacattccacagcagtcgcacctccctggccggtgacacaagtaattcttcgtcacctgcatcaacaggggccaagaccaatcgggctgatccaaagaagagtgcctctaggcccggttcgagagccggcagtcgcgccggcagtagagcttccagccggagagggagcgacgcctcagattttgatctactggaaacccaatcggcttgctctgacacctcagaatctagcgctgcgggcggccagggaaacagccgtaggggcctgaataaaccgtccaaaattcccaccatgtcaaaaaagacgactaccgcctcaccacgtactcccggtcctaagcgctag

SEQ ID NO: 195150 - DNA, 16293 bp, synthetic construct
  misc_feature 1..16293: note = Description of Artificial Sequence: Synthetic coding sequence
  source 1..16293: mol_type = other DNA
atgagcagcagcgacgaggagaccctgagcgagcggagctgccggtcagagagatcctgtagatccgaaagaagttatcggtcagagcgctcgggctctctctccccctgtccccctggcgacactctaccatggaaccttcccctccacgaacagaaaaaaagaaagtcccaggactccgttctcgatcctgctgaaagggcagtggtccgagtggcagatgagagggatcgagtccagaaaaaaacatttaccaaatgggtgaacaagcacctaatgaaggtaagaaaacatataaacgatctatacgaggacctacgggatgggcataatctgataagcctgctcgaagtgctgtctgggataaagctgcctcgcgagaaaggacggatgcgattccatcggcttcaaaacgtgcagatcgcgctcgatttccttaagcaaaggcaagtgaaactggtgaacattagaaacgacgacattaccgatgggaacccaaaacttactctcggcttgatctggactattatcttgcactttcagatctccgatatttatatttccggcgagagtggagacatgtcagctaaggaaaaactgctgctctggactcaaaaggtgactgcggggtatactggtattaagtgcactaacttttcttcttgctggtccgacggtaaaatgttcaacgccttgatccaccggtaccgaccggatttggttgatatggaaagggttcaaattcaatcaaacagagaaaatctggaacaagcgttcgaggtggcggagaggttgggggtgacacgcttgctggacgcagaggacgtcgacgtgcctagtcccgatgagaagtccgtcataacatatgtatcgtcaatctacgacgcttttcctaaggtacctgaaggtggcgaggggatttcagctacagaggttgattcccggtggcaggaataccaaagccgagtggactcccttattccgtggatcaagcagcatacaatactgatgtccgacaagacttttccccagaaccccgtggagttaaaagctctatacaaccagtacatacactttaaggaaactgagattctcgcaaaggagcgagaaaagggccggattgaggagctgtacaagcttctggaggtctggatagagttcggccgcatcaagctaccgcagggatatcatcccaatgatgtagaggaggagtggggtaagttgatcatagaaatgttggagcgcgagaagtcactccggcctgcagtggaaaggctggagctgcttctccaaatcgcaaataagattcagaacggggccctaaactgcgaggaaaagcttacccttgccaaaaacacccttcaggcagacgcagcacacctcgaatcagggcagcccgtccagtgtgaaagtgacgtaattatgtacatccaggagtgtgaaggactgatacgccagctgcaagttgacctgcaaatactccgagatgagaattattaccagctcgaggagctggcttttagagtcatgcgtttgcaggatgaactggtcactctcagacttgagtgcacgaatctctatcgcaaggggcactttacgtctctggaactggtaccacccagcaccctcactaccacacatcttaaggcggaacctctgacaaaagctacacactcctcttctacttcttggtttcgtaagcccatgactcgcgcagagctggtggctatttcttcatctgaggatgaaggcaacttaagatttgtctacgagcttctgtcctgggttgaagagatgcagatgaagctcgagcgggccgagtgggggaacgacctcccatccgttgagcttcagctggaaacccagcagcacatccacacctctgtcgaagagttgggaagctccgttaaagaagcccggctatacgagggtaagatgagtcaaaattttcatacttcctacgctgaaacattaggcaaactggagacacaatactgcaagctgaaggaaacttcctcatttcgcatgaggcatctgcaatcactgcacaaattcgtcagcagggccaccgccgagttgatatggctgaatgagaaggaggaggaggaactggcttacgattggtctgataacaattcaaacatttccgcaaagcgcaattacttcagcgagctgaccatggagctggaagagaagcaggatgtgtttagatctctgcaggataccgcagagttactcagcttggagaatcaccccgccaaacaaacagtagaggcatattccgccgccgtgcaaagtcagctgcagtggatgaagcagctttgtttgtgcgttgaacaacacgtaaaagaaaatactgcctacttccagttcttctccgatgctagagagttagagagctttctccgcaacttgcaggatagcatcaagcgcaagtattcatgcgatcacaatacaagtctatctagactggaggacttattgcaggactctatggacgagaaggagcagctgatccaaagcaagagttcagtcgccagtctggtcggccggagcaagaccatcgtacaactgaagcccaggtcacctgaccatgtgctcaaaaatacaatctctgtgaaggctgtgtgtgactatagacaaatagagataacgatctgcaagaatgacgaatgtgtgctcgaggataattcccagaggacaaagtggaaggtcatcagccctactggcaatgaagcgatggtgccatccgtctgtttcctgatacctcctcccaacaaagacgccatcgaaatggcttcacgggtggaacaatcataccaaaaagtcatggccctctggcatcagctccatgtgaacactaaatctttaatttcatggaactacctgcggaaggatctggacctggtgcagacctggaatcttgaaaagctccggagctccgcgccgggcgaatgtcaccagataatgaaaaatttgcaggcccactatgaagacttcctgcaagacagcagggactcagtcttgttctctgttgcagatcggctgaggctggaagaggaggtggaggcatgcaaagctagatttcagcatttaatgaaatccatggagaatgaggataaggaggagacggtggctaaaatgtacatatcagaattaaaaaacatccggttacgcctagaggaatatgaacagagggtggtcaaacgcatccagtcactcgccagtagtcggacagaccgcgacgcctggcaggacaatgccctgagaatagcagagcaagagcatacgcaggaagatctacaacagcttcgttccgacctggacgccgtgtcgatgaagtgcgattctttcctgcatcaaagtccttccagtagtagcgtgcccactttaaggagcgaactcaacctgctggtggaaaagatggatcacgtgtatggactttctacagtatacctgaataaactgaagaccgttgacgttatcgttagatctatccaggacgccgaattgctggtcaaagggtacgaaatcaaacttagccaggaagaagttgtcctggctgacctctctgcattagaagcacactggagcaccctccggcactggttgtctgacgtcaaagataagaacagcgtgttttccgtgttggatgaggaaatcgctaaagccaaagtagtggccgagcaaatgtcccgtctgacacctgagaggaatttggacctcgagcggtaccaggaaaaaggatctcaattgcaagaaagatggcacagagttatcgctcagctcgaaatccggcagtctgaactggagagcatacaagaagtcctaggggattatcgggcctgtcatggcactcttattaagtggatcgaggagactaccgctcaacaagagatgatgaagcctggtcaggcggaggacagtcgcgtgctctccgagcagctgtctcagcagactgcgttattcgctgagatagaaagaaatcagaccaagttggaccaatgtcaaaagttttcccaacagtacagcacaatcgttaaagattacgagctgcagttaatgacctacaaggctttcgtggagagtcagcaaaaaagtccaggcaagcgtagacgaatgctctcctcctcggatgcgatcacacaggagttcatggacctgcgtacacgatataccgccttggtgacactcactacccagcacgtgaagtatatctccgatgccctcagacggctggaggaggaagagaaggtggtggaagaggagaagcaagagcatgtcgagaaagtcaaggaacttctcggatgggtgtctaccctggcaaggaacacacagggcaaagcaacatcctccgagactaaagaatctaccgacatcgaaaaagcgattctcgagcaacaggtgctgtccgaagagctcaccacgaagaaggagcaggtctcggaggcaataaagacaagtcagatatttctcgccaaacatggacacaagcttagtgaaaaggaaaagaaacagatttctgagcaactgaacgccctgaacaaggcatatcacgatctgtgtgatggctcagccaatcagctgcagcagctgcaatcacaactcgcgcatcagaccgagcagaaaacattacagaagcaacagaatacgtgccatcagcagcttgaagacttatgttcatgggttggacaggctgaacgggcattggctgggcatcagggacgcacaactcagcaggacctctctgccctccagaagaatcagtccgacttaaaggaccttcaggatgacattcaaaatcgagctacctccttcgcaactgtggtgaaggacattgaggggttcatggaggaaaaccaaacaaaactctccccacgcgaactgaccgctctgagggagaagctgcaccaggctaaggagcagtatgaggccctgcaagaggagacacgagtggcgcagaaggagttggaagaagctgttacaagcgccttgcagcaagagaccgagaagtccaaagcagccaaagaactggcagagaataagaagaaaatcgacgccttgctcgattgggtcacttcagtggggtccagcggtggccagttactgaccaatctccctggcatggagcagctgtcgggtgcttctctggaaaaaggagccctggatactacagacgggtatatgggagtgaatcaggcgccagagaagctagacaagcagtgtgagatgatgaaagccaggcaccaggaactcttaagccaacagcagaatttcattctagccacacagtccgcccaggccttcctggatcagcatgggcataacctcactcccgaggagcaacagatgctgcagcaaaaactgggcgagctgaaggagcagtatagcacctccctggctcagagtgaagcagagctgaaacaagtgcagacactccaggacgagctacagaaatttctacaggaccacaaggagtttgagtcttggttggaacgcagcgagaaggaacttgagaacatgcacaaaggtggatcttcccccgagaccctccccagtctgctgaagcgccagggctccttcagcgaggatgtaatatcgcataaaggagacctcaggtttgtgactatctcagggcaaaaggttctggatatggagaattctttcaaggagggaaaagagccctccgagattggaaatttggttaaggacaagcttaaggacgcgaccgaaagatatacggctctgcattcaaagtgtacaaggttggggagtcatctaaatatgttgctgggacaataccaccaattccagaattcagccgattcattgcaggcgtggatgcaggcctgcgaagcgaacgttgagaaactgctctcagatacggtcgcgagcgatcctggggtcttgcaggagcaacttgccacaaccaaacagctccaggaggagctggctgaacaccaggtgcccgtcgaaaaactccagaaggtggcaagggatatcatggagattgagggtgaacctgcacccgaccacagacacgttcaagaaacgactgacagtatcctgtcacacttccagtcactgagctatagcctcgccgaacggagttccctgctgcagaaagcaatcgcacagtcccaaagtgtacaggaatccttggagtctttactgcagagcatcggggaggtagagcagaacctggagggcaaacaggtctcttccctttcttcaggcgtgatacaggaggcgctggctaccaatatgaagcttaagcaggacatcgctcgacagaagagcagtttggaagcaacacgtgaaatggttactcgcttcatggagacggccgattcaacgaccgccgccgtgctgcaaggcaagctggccgaagtgtcccagagatttgaacagctgtgtctgcaacagcaggagaaggagtcttcactgaagaagcttttgccccaggctgaaatgttcgaacacctgtccggaaaactccagcagtttatggagaataagtcaagaatgctcgcctctgggaaccagcccgatcaggacatcactcacttctttcagcagatacaagagctgaatctggaaatggaggatcagcaggaaaacctggataccttggagcatctcgtcaccgaactgtcctcctgcgggttcgctctcgatctgtgtcagcaccaggatagagtccagaatctgagaaaggatttcaccgagctccaaaagacagtgaaggaacgggagaaggatgcttcaagctgccaggaacagctggacgagtttcggaagctagtgcgcaccttccagaagtggcttaaggagaccgagggtagcatccccccaactgagaccagcatgagtgccaaggagctggagaagcagattgaacacctgaaaagtctgttagatgactgggcgtccaaaggcaccttggtggaggaaatcaattgcaagggcacaagcctggaaaatctaatcatggaaatcacagctccggatagccagggcaagacgggaagcatcctgcccagcgttggatccagcgtggggtctgtgaatggctaccacacatgtaaggacttgactgagatccagtgcgacatgagcgacgtgaacctgaagtacgaaaagcttgggggcgttctccatgaaaggcaggaaagcttacaggccattttaaacaggatggaggaagtgcacaaggaagcaaatagtgtgctgcagtggctggagagtaaggaagaggttctgaagtctatggatgctatgtcttctccaactaaaactgaaaccgtgaaggcacaagcggagagcaataaagcatttctggctgagctggagcagaacagcccaaagatccagaaggtcaaagaggctttggcgggcctgctcgtaacataccccaactcacaggaagccgagaactggaaaaagatccaggaggaacttaacagcagatgggagagagcaactgaggtgaccgtggcacgccaacgccagctcgaggagtcagccagccacctggcctgctttcaagccgcagagtcgcaactgcggccctggctgatggaaaaggaacttatgatgggagtcctgggcccactgagcatagacccaaatatgttaaatgcacagaagcagcaggtgcagtttatgttgaaggagtttgaggctcgtaggcagcaacacgagcagctcaatgaggccgcccaaggcattctcacaggtcccggagatgtcagcctgagtacatctcaggttcagaaagagctgcagtctatcaatcagaaatgggtggaactgacagataagttgaactctaggtcatctcagatcgatcaggccattgtgaagtcaacacagtatcaggaactactacaggacctaagcgaaaaggtacgcgccgtgggccagcggttgtccgtgcagtccgccatctccacgcaacccgaagcggttaaacagcagctggaggaaacctcagagattaggtctgatctcgaacaactcgaccacgaagtgaaagaagctcagacactttgcgatgagctgagcgtactgatcggcgagcagtatcttaaggacgagctcaagaagagactggagactgtcgccctgcccctgcagggcctcgaggacctagctgctgaccggataaaccgactgcaggccgccctggcatccacccagcagttccagcagatgtttgatgaacttagaacgtggctggatgacaagcagagtcaacaggcgaagaattgcccaataagtgcaaagctcgagagacttcagagtcagctccaggagaacgaagaatttcagaaaagtctgaaccagcacagcgggagctacgaagttatcgtggctgagggcgaatctctgcttttgtccgtcccgccaggtgaagaaaaacggacactgcagaaccagctggtggagttaaagaatcattgggaagaactgtcaaaaaaaacggctgaccggcagtccaggctgaaggactgcatgcagaaagcgcaaaaataccagtggcacgtcgaagacctggtcccatggattgaggactgcaaggcaaagatgtccgaactacgagtcactctcgaccccgttcaactagaaagctcactgctgcgctccaaggctatgttaaacgaggtcgagaaacgtcgcagcctcctggaaatactgaacagcgccgccgacattttaataaattcttcggaggccgatgaagatggtattagagacgagaaggccgggattaaccagaatatggatgctgtgactgaggagttgcaggccaagacaggctctctcgaagagatgacccagaggcttcgtgaatttcaggagagcttcaagaacatcgaaaaaaaagtagagggagcaaaacaccaattggagatcttcgatgctctgggctcacaggcatgctccaacaagaatctcgagaaactgcgtgctcagcaagaggtcttgcaagcacttgaaccccaggtggattatctgcgaaacttcacgcaaggtctggtcgaagacgcccctgatggcagcgatgccagtcagctcctgcaccaggctgaggtggcacagcaggagtttttagaggtcaagcagagggttaattccggctgcgtcatgatggagaataagctcgagggcatcggacaatttcattgccgagtgagggagatgttcagtcagttagctgatctggacgacgaactggacggaatgggcgcaatcggaagagacactgacagcttgcagagtcagattgaggatgtgcgcttgttcctgaataaaattcatgtcctgaagctggacatcgaggcctccgaggccgagtgtcgtcacatgctggaggaagaaggcacattagacctcctcggcctgaaaagggagctggaagccctcaacaagcaatgcggaaagctgactgagcgcgggaaggctcggcaggagcagttggaactgactttaggcagggtggaagacttttatcgaaaactgaaggggctgaatgacgcaacgactgccgcagaggaagctgaggcccttcagtgggtcgtgggaacggaggtggaaattataaatcagcagttagccgatttcaaaatgttccagaaagagcaggttgacccccttcaaatgaaactgcaacaggtgaacgggctggggcagggcctgatccaatcagccggcaaggattgcgacgtccagggactcgaacacgacatggaggagatcaatgccaggtggaacacactgaacaagaaagtggcacagcgtatcgcccagctgcaggaggctctgctgcactgcgggaagtttcaggatgctctagagcccctactctcctggctcgctgatacagaggagcttatagccaaccaaaagcccccatcagccgagtacaaagtggtcaaggcacagatacaggagcagaaacttctgcagaggctgttggatgacaggaaagctacagtcgacatgcttcaggcagagggcggcagaattgcacagtcggctgagctcgccgacagggagaagatcaccggacagctggaatctcttgaatctagatggacagagctgctgtcaaaggccgccgcccgacagaagcagctggaggacatcttagttctcgctaaacagtttcacgagaccgctgaaccaatctcagatttcttgagcgtcacagaaaagaagcttgcaaactcggaacctgtgggcactcagaccgccaaaatccaacaacagatcatcaggcacaaagctttggaggaagatatcgagaaccacgctacagatgtgcaccaagctgtgaagatcgggcagtctctgagcagtttaacctcaccagctgagcaaggtgttctttccgagaagattgactctctgcaagctcgttacagcgaaattcaggaccgttgctgcaggaaggcggccctgctggatcaggcgcttagtaatgcaaggttattcggcgaagacgaagtcgaggtcctcaactggttagccgaggtggaagacaaactgtccagcgttttcgttaaagactttaaacaggatgtgttacaccggcagcacgcggatcatctggccctcaatgaggagatcgttaaccgcaagaaaaacgtggatcaggcgattaaaaatggtcaggcccttcttaagcagaccactggggaagaagtgctgctcattcaggagaaacttgacgggataaaaacaagatacgctgacatcaccgtgaccagtagcaaggccctccggacgctcgagcaggcccggcagctagcgaccaagttccagtctacctatgaggagctaactggctggctcagggaggtggaagaggaactggctacctccggtggccaatctccaactggggaacaaattccacagttccagcagcgccaaaaagaacttaagaaggaagtcatggagcatcgtctggtcctggacactgttaatgaggtctcccgcgcactcctggaactggttccgtggagagctagagagggcttagataaattggtgtcagacgccaacgaacagtacaaactagtttccgacacaatcggccaacgggtcgacgagatagatgctgccatccagaggagccaacagtacgagcaggctgccgacgctgagctagcttgggttgcagaaaccaaacggaaattaatggccttgggacctattaggctagaacaggaccagactacagcacagctgcaggtgcagaaagctttttctattgacatcattcgccacaaagatagtatggacgagctgttctcccatcggtcagagatcttcggtacgtgcggcgaggagcagaaaactgtgctccaggaaaaaactgagagcctgatccagcagtacgaggccatatcgttattaaacagtgaacgatatgctaggctcgaacgtgcacaagtgctggtcaaccaattttgggaaacctatgaagagctgtctccctggatcgaagagaccagggctctgatcgcacaacttccctctcctgccatcgaccacgagcagctgagacagcagcaggaggagatgcggcaactacgcgaaagcatcgccgagcacaagccccatatagacaaactgctaaaaattggccctcagttgaaggagttaaaccctgaggagggagagatggtcgaggagaagtaccagaaggctgagaatatgtatgctcaaatcaaagaggaggtgcgtcaaagagcgctggccctggacgaggctgtgtctcaatcaacacaaattaccgaatttcacgacaaaatcgagccgatgctggagactctagagaatctgtcttcccgtctgagaatgccacctctcattcccgccgaagtggataagataagggagtgtatcagcgacaacaagagcgccactgtggaactcgagaaactccagccatcttttgaggcccttaagagacggggtgaggagttgatcgggcgctcacaaggtgctgataaagacctggcagcgaaagaaatccaggacaaactggatcagatggtgtttttctgggaagacattaaggcaagggctgaagagcgggaaattaaatttcttgatgttctggaactagccgaaaagttttggtacgacatggctgcactactcacaactattaaggatactcaagacatcgtccacgacctcgagtctccaggtattgatccctctattataaagcagcaagtcgaggccgccgagactattaaggaggaaacggatgggttgcatgaggagttggagtttatccgcatcttgggggctgatctgatatttgcgtgtggagagacggaaaaacccgaggtccgcaagagcattgatgagatgaacaatgcgtgggagaacctgaacaagacctggaaagagcgactggagaaactggaagatgctatgcaggctgccgtccagtaccaggatacattgcaggccatgttcgattggctcgacaacacagtcataaaattgtgtacaatgcctcccgtggggaccgacctgaacacggtgaaagatcagctgaacgaaatgaaagaattcaaagtcgaggtataccagcaacaaatagagatggaaaaactcaatcatcagggggagcttatgctgaagaaggccaccgatgagacggatcgagacataatccgcgagccgctcactgaattgaaacatctctgggaaaacctcggcgagaagatcgctcatcggcagcataagctggagggtgcattgttagccctgggccagtttcagcatgcgctggaggaacttatgtcctggctcacccataccgaggaactgctcgacgcacaaaggccgatcagcggggacccgaaggtcattgaggtggagctcgccaagcaccacgtgcttaaaaacgatgtcctagcacaccaagctaccgttgaaacagtgaacaaggccggaaacgagctcctggagagttcagccggtgatgacgcctcctcattaaggtcacgcctcgaagctatgaatcagtgctgggagagcgtcctgcagaaaaccgaggagcgggagcagcagctgcagtctaccctgcaacaggcacagggatttcacagcgaaatcgaggactttttgttggaactgacgagaatggaatctcagctctcagctagtaagcctaccggcggcctccccgaaaccgcaagagagcagctcgacacccacatggaattgtacagccagctaaaagccaaggaagaaacatacaaccagttactggacaaaggacggttgatgcttctttctcgggacgatagcggatcaggctctaaaactgaacagtccgttgccttattggaacagaagtggcacgttgtgtcttccaagatggaagaaagaaagagtaagctggaagaggctctaaatctcgcaacagagttccagaattccctccaagaattcattaattggttaaccctggccgagcagtccctaaatattgcctccccgccttctctgattctgaatacagttttgtcacaaatcgaggagcataaagttttcgccaacgaagtaaacgctcatcgggatcaaatcatcgagcttgatcagaccgggaatcagctcaagttcctgtctcagaaacaagatgtcgttctgattaaaaacctactcgtctccgtccaatctcggtgggagaaagtcgtacagaggtcgatcgaaagagggcgcagcttggatgacgcgcgtaaacgcgctaaacaatttcatgaggcttggaaaaaactgatcgattggctggaggacgccgaaagccatcttgacagtgaactggagatctccaacgacccagataaaataaagttgcagctctccaagcataaagagtttcaaaagaccttaggcggaaaacagcctgtgtacgatactactattcggactgggcgtgctctgaaggagaagactctcctgcccgaagacagccaaaaactggataactttttgggagaggtgcgggataagtgggatacagtgtgtggtaagagcgtcgagaggcaacacaagttggaagaggccctactgttcagcggccagtttatggacgcgttgcaggcgctggtagactggctctataaggtcgagccgcaacttgccgaagaccagcccgtacatggcgacctggacctggttatgaacctgatggacgcacataaggtgttccagaaagaacttggaaaaaggaccgggactgtgcaggtgctaaagaggtccggacgcgaattaatagaaaatagcagggatgatacaacgtgggtgaagggccaactccaagaactctctacccgttgggacacagtgtgtaagttatcagtaagcaagcagagtaggctggaacaagctctcaaacaagccgaagtgttccgagataccgtgcatatgctgctggaatggctgtcagaagctgagcagacactcagattccgtggtgcattaccggacgatactgaagccctccagagccttatcgacacacacaaggagtttatgaagaaggttgaagaaaagcgggtggatgtgaactcagctgtggctatgggagaggttatactcgccgtgtgccaccccgactgcatcacgacaataaaacactggataacgatcattcgggcacgatttgaggaagtgttaacctgggctaagcagcaccagcaaaggctggaaactgcactgagtgagctcgtagcaaacgcggaactgttggaggaactactcgcgtggatccaatgggcagagaccacgctgattcaacgggaccaggagccgatccctcagaacatcgatagggtgaaggccctgattgccgaacaccagaccttcatggaggaaatgacacggaaacagccagacgtggacagggtcactaagacctacaaaaggaaaaatatcgaacctacccacgctcccttcatagagaagtccaggtctggcgggcgaaaatcattgtcccagccaacacccccaccgatgccaatcctatcacagagcgaggctaagaaccctcggatcaatcagctcagtgcccgttggcagcaagtttggctacttgcgctcgaacggcagcgaaagctgaacgacgctctggaccggctggaagagttgaaggagttcgctaattttgattttgatgtgtggaggaaaaagtacatgaggtggatgaatcacaaaaagtctagagtgatggactttttccggaggatagataaggaccaggacggcaagattacccgccaagagttcatagatgggatcctcgcctctaaatttccgacaaccaaattggagatgactgccgtggccgacatttttgatagggacggcgacgggtacatcgattattacgagttcgttgcggccctgcatcccaataaggatgcttatagaccaaccaccgatgctgacaagatagaagatgaagttacccggcaggtcgcccaatgcaaatgcgcaaaaaggtttcaagtggagcagatcggtgaaaataagtacagatttggagatagtcagcagttgaggctcgtgcgcatcctacggtctacagtgatggtccgagttggaggtggctggatggcgctggacgaatttctagtgaagaacgacccatgtagggcccggggtcgcactaacatcgaactacgggaaaagtttatactgcctgagggtgcgtcccagggcatgactccattcaggtcccgtggtcgaagatccaaaccaagttctcgggcagcatcgcccacaagatcctcgtcaagtgcctcccagagcaatcattcttgtacgagcatgccttcttctccagcaactcctgcctccgggacaaaggtgataccttccagtgggtcaaaactcaagaggcccacaccaacctttcactcctcccgcacatccctcgcgggagatacctctaacagctccagcccagcttccaccggagccaaaactaatcgcgccgaccctaaaaaatccgcctctcggcccggatcacgcgcgggatccagagccggctctcgcgccagcagcaggcgtgggagcgatgcgtccgatttcgatctccttgagacccagagtgcctgttcggacacctccgaaagtagcgccgctgggggccagggaaactcacgtaggggcctgaacaaaccctccaaaatacccaccatgtctaaaaaaacaaccactgctagtccgcgcacaccgggccctaaaagatag

SEQ ID NO: 195151 - DNA, 8412 bp, synthetic construct
  misc_feature 1..8412: note = Description of Artificial Sequence: Synthetic coding sequence
  source 1..8412: mol_type = other DNA
atggacggcgtggccgagttcagcgagtacgtgagcgagaccgtggatgtgcctagtccatttgaccttctggagcctcccacatcgggtgggtttctgaagctgagcaaaccatgttgttatatctttccggggggcaggggagattcagcactattcgccgtgaacggattcaacatacttgttgatggcggcagcgataggaagtcctgtttctggaaactcgttcgtcatcttgataggattgactctgttttgttaacacacatcggggcagacaacctgcctgggatcaacgggctcctccagcggaaagtcgcggagcttgaagaggagcaaagccagggctcctcatcctattccgattgggtgaagaatctgatctctccagagctcggagtggtcttctttaacgtcccagaaaagcttcggctgcccgacgcttcacggaaggcaaagaggagtattgaagaggcatgtctgactctgcagcacctcaacaggctgggcatccaggctgagcctctctacagggtggtgagcaacaccatcgagcctcttacactgttccataagatgggcgttggacgtctcgacatgtacgtactcaacccagttaaagacagtaaggagatgcaatttctgatgcagaagtgggccggcaattcaaaggccaaaacaggaatagtgctgccaaatggcaaggaggcggagatctccgtgccctacctgacctcaatcacagccctggtcgtgtggctgccggcaaatcctaccgaaaagatagtaagggtcctgttccccggcaatgccccccagaataagatccttgagggtctagaaaagctcagacatctggacttcctgcgataccctgttgccacgcagaaagacttagcctccggtgcggtcccgaccaaccttaaacctagtaagataaaacagcgcgcggactcaaaggagagcctgaaagcaacaactaagaccgccgtttctaaactggccaagagggaagaggtggttgaagagggggcaaaagaagcacggagtgagcttgctaaggaactcgcaaaaacagagaaaaaagctaaagaatccagtgaaaaaccacccgagaagcccgccaaaccggagcgggtgaagacggaatcctcagaggctcttaaggccgagaaacgcaagctgattaaagacaaggtgggcaaaaagcacctgaaagagaaaatttccaaattggaggagaagaaggacaaggaaaagaaggagatcaagaaagaaaggaaggaactaaagaaagacgagggaaggaaggaggagaagaaggacgctaagaaagaggaaaagagaaaggacaccaagcccgagttgaaaaagatctcaaagcccgaccttaagcctttcactcccgaggttcgaaagaccttatacaaggccaaagtgcccggcagagtcaaaatcgaccgcagtcgcgccatcagaggcgagaaagagctctcttccgagcctcagacgcctcccgcccagaaagggactgttccgctgccaaccatttcggggcatagggagctggtattatcttcccccgaagacctgactcaggacttcgaggaaatgaaacgagaagaacgcgcccttttagcagagcagcgggatacaggcttaggggacaagccctttcccctggacaccgccgaggaagggcccccctccactgccattcagggaactcccccctcagtcccgggccttggccaggaagaacacgtcatgaaggaaaaggaactcgtccctgaagtacctgaagagcagggttcaaaggaccgcgggctggatagcggggcagaaactgaggaggaaaaggatacctgggaggaaaaaaaacagcgagaggccgagcgtctgcctgacaggacagaggcaagagaggagagtgagccggaggtcaaggaagacgttatagagaaggctgagttggaagagatggaggaggttcatcccagtgacgaagaagaagaggacgcgacgaaagccgaagggttctaccagaaacatatgcaggagccactgaaagtgacacctagaagccgagaggccttcggtggtcgtgagttgggccttcagggcaaggccccagagaaggagacttcgctgttccttagctctctcaccaccccggccggggctaccgagcatgtgtcctatatacaggacgaaactatcccaggttattctgagacagagcagaccatctcggacgaggagatccatgatgagcctgaggaaagaccagctcccccacgattccatacaagcacttatgacctccctgggcctgagggggctgggccgtttgaagcgtctcaacccgcggacagtgccgtgcctgccacgagtggaaaggtgtacggaacccccgaaactgaattgacttatcccaccaatattgtcgcggcccctctcgctgaagaagaacatgtcagctccgcgacatctatcacagagtgtgacaagctctccagctttgctacatcagtagctgaagatcagtccgtggcctccctgactgccccccagacggaggaaaccgggaagtcctccctccttctggacaccgtgaccagcattccctcaagtcgcacagaagctacgcaggggctcgattatgtgccaagtgccggaactatctcgcctacatcctcactggaagaagacaaagggttcaaatctccaccatgcgaggatttcagtgtcaccggtgagagtgagaaacggggcgagattatcggaaagggtctgtcaggcgagagggctgtcgaagaggaagaagaagaaacagccaatgtcgagatgtcagagaaactgtgtagccagtatggaactcccgttttttccgcccccgggcatgctcttcaccctggcgagcccgccctgggtgaagccgaggagcgctgtctaagtcctgatgacagtacggtgaagatggccagccctccaccctccgggcctccgagtgccactcatacgccattccaccagtctccagtagaggaaaagtcagaacctcaggacttccaggaggcagactcgtggggagacactaagaggaccccaggagtgggcaaggaggacgcagccgaagagacagttaaacctggtcccgaggagggaacgctggaaaaggaggagaaggtaccacctccccgcagcccccaggcccaggaagcccctgttaatattgacgaaggcctgacaggctgcactatccaactgctgcccgcacaagacaaggctatcgtgttcgagattatggaagcaggcgaaccaaccggaccgatcctgggcgctgaggcactgcccggggggttgagaacgttacctcaggagcctgggaaaccacagaaggatgaggttctgcgctatcctgacagaagcctgtcaccggaggacgcagaatccctctcagtcctcagtgtcccctcaccggacactgccaaccaggaaccgacccctaagagtccatgtggactcacagaacagtaccttcataaggataggtggcctgaggtgtctccagaagatacgcagagtctcagtttgtccgaggagtccccctctaaggagacatcgttagacgtctcttccaagcagctctcccctgagagcctgggcaccctgcaattcggggagctgaacctgggtaaggaggagatgggccacttaatgcaggctgaagacacatcccaccataccgcccctatgtccgtgccggaacctcatgccgcaaccgcaagcccacctaccgacgggacaaccagatactctgcgcagaccgacatcactgacgattccctggaccgcaagtcaccagcctccagcttttcccactccactccttccggaaatggtaaatacctgccgggcgcaatcacttcacccgacgaacacatcctcactcccgattcctcttttagtaagtcacctgagtccctgcccgggccagcacttgaggatatcgctatcaagtgggaggataaggtccctggactgaaggataggacttcagagcaaaagaaagaaccagaaccaaaggacgaagttctgcaacagaaggataaaactctggagcataaggaggtggtggagcctaaagataccgctatataccagaaggatgaggccctgcacgtgaaaaatgaggctgttaaacagcaggataaggctttagaacagaaaggcagagatttggagcagaaggacaccgcactggagcagaaagacaaagccctcgagcctaaagataaagacttggaggaaaaggacaaggccctggaacagaaggataagattccagaagagaaggataaagccttagaacaaaaggatactgcactggaacaaaaagacaaggccctggagccaaaggacaaagacctagagcagaaggaccgcgtcttggagcaaaaggaaaaaattcccgaagagaaggacaaagccctcgatcagaaagtgcgttctgtggagcacaaggctcccgaagacactgttgccgagatgaaagaccgtgatttggagcaaacggataaagctcctgagcagaaacaccaagcacaggaacagaaggacaaagttagcgaaaaaaaagaccaggccttggagcagaagtactgggcactgggccagaaggatgaagcactggaacaaaacattcaggctctcgaggaaaatcatcagactcaggagcaagagagcttagtgcaggaagataagacaaggaaacctaagatgctggaggagaagagccctgagaaagttaaggccatggaagagaaactggaggccctactggagaaaactaaagccctgggactggaagaatcactggtgcaggaggggcgcgctcgagagcaggaggagaagtactggagggggcaagacgtggtgcaggagtggcaggaaacatctcccactagagaggaacccgccggtgaacaaaaggaactcgctcctgcatgggaggatactagcccagaacaggacaatcggtattggcggggacgagaagatgtcgcattggagcaggacacctattggagagagctgtcgtgtgaacggaaagtctggttcccccacgaactggacggccaaggtgccagacctcattacactgaagaacgggagtcaacattcctggacgaaggcccggacgatgaacaggaagtgcctctgcgggaacatgcaacccgctccccatgggcatccgacttcaaggatttccaggaaagttcacctcagaagggactcgaagtggaacggtggctggcagagtcccccgtggggcttccccccgaagaagaggataagctgacgaggtcacctttcgaaataatttcaccccccgcctcgcctccagaaatggtcggacaaagagtcccttccgcgcccggacaggaatcccccataccagatcccaaactcatgcctcacatgaaaaacgagcctactactcccagctggttagccgacattccaccgtgggtcccaaaagatcgtcctttgccgccagcaccgttgtcacctgcccctggaccgcccaccccggcccccgaaagtcacacacccgccccgttctcttggggcaccgccgagtatgacagtgtggttgccgccgtgcaggagggcgccgcagagttggagggtgggccttactcgcctttaggaaaggactacagaaaagcagagggcgaacgagaagaggaaggtcgcgcggaagctcctgataaatcttcacatagctcaaaggtacccgaagcttctaagagccacgccaccacagagcctgaacaaaccgaacctgaacagcgggaaccaacgccataccctgatgaaagaagcttccagtatgccgatatctatgaacaaatgatgctgactggcttgggccctgcctgtccaacacgggagcccccgctgggggcagccggtgactggcccccgtgtctgtccaccaaagaggccgccgcaggaagaaatacttctgcggagaaggaactttcgagtcccatttcacccaagtccctgcagtctgacacgcccaccttctcgtatgcggccctggccgggccaaccgtgcctccccgaccagagcctggccccagcatggagccgtctttaacaccccctgccgttccaccacgagcccccatcctaagtaagggtccttcccctcctctgaatggaaatatcctgtcttgttcacctgatcgaaggtctccatccccaaaggagtctgggagatcccattgggacgactcaacaagtgatagcgagctggagaaaggcgcccgggaacagcccgagaaagaagcacagtcccctagcccaccacatccaattccaatgggcagtccaacactgtggccagaaactgaggcacacgtctcaccccctcttgactctcacctcggtcccgcccgcccctctctggacttccctgcgtccgcatttggttttagttcattgcagcctgctcccccacagctgccaagtccggctgaacctcgtagtgccccatgcggctctctggccttctctggcgatagagctctcgctctggccccagggcctccaaccaggacgaggcatgacgagtaccttgaggtcacgaaggcaccttcgctggattctagtctcccgcaactccccagcccatctagccctggggccccattgctatctaatctgcccaggccagcctctcctgcactcagtgaaggttcaagctctgaggctaccacccctgtgatcagcagtgtagctgagcgcttttccccatcactcgaagccgcagagcaagaatccggagaactggaccccggaatggaaccggcggcccattcactgtgggatcttacccctttaagcccggcgccgcctgctagcctggacctcgccttggcccccgccccatcactcccaggagatatgggggacggaattttgccatgtcacctggagtgttccgaagctgcaacagaaaaaccctcaccatttcaggtacccagcgaggattgcgctgccaatggtcccaccgaaacgagtcccaatcccccaggccctgccccagccaaagcagaaaacgaagaggccgctgcttgtcccgcttgggagaggggggcatggccagagggtgcagaacgcagtagtaggcccgacaccctcctgtcgccggaacagcctgtctgtcccgctgggggttcaggagggcctccctcctctgcttctcctgaggtcgaagccggcccccagggctgtgcgacagaaccccgcccacaccgcggggagctgtccccatcgtttctgaacccgcccctgcccccgagcatcgacgacagagatttatcaaccgaggaagtgcgcttggtcggtcgcgggggccggcgcagagtcgggggccctggcaccacgggaggtccttgcccggtgaccgacgaaacccctccaacttctgcctcggatagcgggtcgtctcagagcgattccgacgttcctccagaaacagaggaatgcccaagtataactgccgaagccgccctggacagcgatgaagatggcgatttcctccccgtcgataaagcaggcggagtgagcggcacccaccaccctcggcctggccacgacccgcctcccctcccacagcctgaccctagaccctccccaccccgtccagacgtgtgtatggcagacccggaaggcctgagcagcgagtccggaagggtggagagattgagagagaaagagaaagtccagggtagggtgggccgtcgggctcccggcaaggcaaaacccgcaagcccagctcgccggctcgatctcaggggtaaaaggtccccaacgcccggaaaaggtcccgccgaccgggcatcgagggcacccccacgccctcgctctacgacgtcacaagttacccccgctgaagagaaggatggtcacagtcccatgagtaagggcttggtaaacggcctgaaagctggaccaatggcattgtcctctaagggcagctccggcgcccccgtctatgtcgacctggcctacattccaaaccactgctccggaaagactgcagatctggatttctttagacgagtacgggcatcctactacgtagtttccggtaatgacccagctaatggagagccctcccgggcagttctcgacgctcttttggaaggaaaagcccagtggggtgagaatcttcaggtgacgctcatcccgacacacgatactgaggttacccgggagtggtaccaacagactcatgagcagcagcagcagttgaacgtgctggtccttgctagttccagcactgtggtcatgcaagatgaaagttttcccgcttgcaagatcgaattctag

SEQ ID NO: 195152 - DNA, 9126 bp, synthetic construct
  misc_feature 1..9126: note = Description of Artificial Sequence: Synthetic coding sequence
  source 1..9126: mol_type = other DNA
atggagaccgaggccgagcccgcccggccccacggcgtggccatggagacaactccaggccttggtctgaggtcacccggggctcccctggcacagaaccccgccgagttactctgcgaagctggcgcggcagtggcagccgcaagatgggacctgcagaagcatagccttcttatagttataggcgacatcggcaccgaatcacagttaagggccgtgcgagcccaccttgaacagggcattttgagctggaacatcgatctgtcatcgttcgacctcaaccaacagttaaggctgtttatcactcgccatctagcacattttagctcggaagtgaaaggtcaacggacactttgtcatcagtccgagattctagagacaatcattcttgtgaacccatcagcagacagcatctcgtcagaggtgcatcatctgctaagcagcagctctgcctacaagcttctcattctgagcgggcagagcttagaacccggaggtgacttaatactgcagagcggaacgtactcatacgagaattttgctcaggttttgcacaaccccgagatttctcagctcctgtcaaatcgcgacccaggaattcaggcctttttaaccgtgtcctgcctgggggagggagattggagtcatctgggcctttcctccagccaggagacgctgcaccttagactgaaccctgagccaaccctgccaaccatggatggcgtggcggaattttccgagtacgtttccgagacagtggacgtaccatcaccatttgatcttttggagccgcccactagtgggggattcctgaagttaagtaagccctgctgctacatctttccaggaggacgcggtgactccgctctctttgcggtgaacggcttcaatatccttgtggatggtgggagcgatcgtaagagctgcttctggaaactggtcaggcatctggacagaattgattctgtcctcctgacccacataggcgctgataatcttcccgggatcaacggtcttctccagaggaaggtggctgagttagaggaagaacagagccagggctccagcagctattccgattgggtcaaaaatcttatttctcccgagctcggggtagtgttcttcaacgtgcccgagaaactacggctgcctgatgcttcccgcaaagccaagcgctccattgaagaagcctgtctcacactgcagcacttgaaccgtctaggaatccaagcagagccgttgtaccgcgtggtctccaacactattgagcccctaacattattccacaagatgggagtcgggcggttggacatgtacgttctcaatcccgtgaaggatagcaaggaaatgcagtttctaatgcaaaagtgggctggaaatagcaaagcaaagaccggcatcgtcctccctaatggcaaggaggctgaaataagcgtgccatacctgacctctatcactgcgctggttgtatggctgcccgccaacccaaccgagaaaatcgtccgggtgctcttccctgggaatgctcctcagaataagattctagaggggctggaaaagctccgccacctcgacttcctgagataccccgtggcaacgcaaaaggatctcgcctccggggctgtacccaccaacctgaaaccatctaagattaaacagagggctgacagcaaggagagtctgaaggccacaacaaaaaccgcggtttccaaactggccaagcgagaagaagttgtggaggagggcgccaaagaagcccgttccgagctggccaaggaactcgccaaaaccgaaaaaaaggctaaggagtcctccgagaagcctccagagaagccagccaaacctgaacgggttaagactgaaagttccgaggcccttaaggccgaaaagcgaaagctgattaaggacaaggtcgggaaaaaacacctgaaagaaaaaatttcaaagctcgaagaaaaaaaggacaaggaaaaaaaggaaatcaaaaaggagaggaaggagctgaaaaaggacgaggggcgtaaagaggaaaagaaggacgccaagaaggaggagaaacgaaaagacacgaaaccagagcttaagaagatcagcaagcctgacctgaagcccttcacgcctgaagtccggaagaccctctataaggcgaaggtcccaggaagggtaaaaattgataggtctcgagcaatccgaggagagaaagaattgtccagcgagccacagacaccccccgcccagaaaggcacggtgccgctgcccaccatcagcggacaccgggaacttgtgttatctagtcctgaagatttgacccaagattttgaagagatgaagcgggaggaacgagccctgctggccgagcaaagagacaccgggttaggcgataagccgttccccttggacacagctgaggaaggcccaccttccacagcaattcagggcacccctccctccgtgccaggcctgggccaagaagagcacgtgatgaaagagaaggagttagtgcctgaagttcccgaagagcagggtagcaaagacaggggcctggactcgggagccgagacagaggaggagaaagacacgtgggaagaaaagaaacagagagaagccgaaaggctcccagatcggaccgaggcgcgtgaagaaagcgagccagaggtcaaggaggacgtgatagagaaagctgagttagaggagatggaagaggttcaccccagcgacgaagaggaggaggatgctaccaaggctgaggggttttaccaaaaacacatgcaggaaccattgaaagtgacaccacgcagccgggaggcgttcggagggcgggaactggggctgcagggtaaggcccctgagaaggagacatccctgttcctgagcagcctgacaactccggcaggtgcgactgagcacgtgagctatatacaagacgagactattcccggatatagcgagacggagcaaacgatttctgacgaagagatacacgacgaaccggaggagaggcctgctccacctagattccatacctcaacctacgatctacctggccccgagggggctgggccattcgaagcatcacaacccgcagactctgcagtcccagcaacgtcagggaaggtgtatggcaccccggaaacagaactcacgtacccgacaaacatcgtagcagccccactagctgaggaggagcatgtgtcctcagctacttccatcactgagtgtgataagctgtctagctttgccactagtgtcgccgaggaccagtccgtggcttcactcacagctccccaaacagaagagaccgggaagtcttctttattactggacacagttacaagcatcccgagcagccgcacagaggccactcagggcctggactatgtgccatcagcaggtaccataagccccacctcctcactggaagaggacaagggattcaagagccctccctgcgaagatttcagcgtgaccggggagagcgagaaaaggggagagattatcgggaagggtctaagcggggagcgagcagttgaggaagaggaggaagagacagccaacgtggaaatgtcagaaaagctctgttcacagtacgggacacctgtgttctctgccccagggcacgccttgcatcccggagaacccgctcttggagaggccgaagaaaggtgcctgtcccctgacgacagtacagtgaaaatggcaagcccacccccgagcgggccgccttcagctacccataccccattccaccagagtcctgtggaagaaaagtccgagcctcaagatttccaggaggctgatagttggggcgacacaaaaagaaccccaggggtcgggaaggaagacgccgctgaagagactgttaagcccggccccgaagaaggcacactggaaaaggaggagaaggtcccacccccacgatctccccaggcacaagaggctccagtgaatatcgacgagggtttaaccggatgcacaattcaactgctgcccgcccaagataaggcgatcgtgttcgagatcatggaggcgggagagcctaccggccccatactgggggctgaggcacttcctggcggcctgagaactcttccccaggagccagggaaacctcagaaggacgaggtgctaaggtacccagatagaagcctctctccagaagatgctgaatccctgtccgttctgagcgtcccctcaccagacactgcaaaccaggagcccactccgaaatctccatgcggcctaaccgagcaatacctacataaggataggtggcctgaggtgagtccagaagatacccagagtctcagtctgagcgaagagagccctagtaaggagacctctttggacgtctcttctaaacagctgagccccgaatctttggggactctccagttcggcgagcttaacctggggaaagaggaaatgggccacctgatgcaggccgaggatactagccatcatacggcacctatgagcgttcccgagccccacgctgctactgcaagtcccccaaccgatggcaccacccgctacagtgcccagactgatattactgatgattctcttgatagaaagagccccgcttcctcattcagtcatagcactccttcaggaaacggcaaatacctgccaggagctatcacatccccggacgaacatatcctcacccccgattccagcttctccaagagcccagaatcactcccaggacctgcgctcgaagacattgcaatcaagtgggaggataaagtacctggcctaaaggacagaacctccgaacagaagaaagaaccagaaccaaaggacgaagttctccagcagaaggataaaaccttagaacacaaggaggtggtagagcctaaggataccgccatctaccagaaggatgaagccctgcacgttaaaaatgaagccgttaagcagcaggacaaggcactcgaacagaagggccgcgatctagagcaaaaggacaccgcgctcgagcagaaggataaggcgctcgagccaaaggacaaagacctggaggagaaggacaaggccctagagcagaaggacaagataccagaggaaaaggacaaggctctcgagcagaaagacactgccctcgaacagaaagataaagccttagaacccaaagataaagatctggaacagaaggaccgcgtgttggaacagaaagaaaagatacctgaggaaaaggataaggcgcttgaccagaaagttaggagtgttgagcacaaggcccctgaagacacagtggcagagatgaaggaccgggatctggaacagactgacaaggcccccgaacaaaagcatcaggcacaggagcagaaggataaggtgtcagagaagaaagaccaagccctagagcagaagtactgggccctcggtcagaaagatgaagccttagagcagaacatccaggctctcgaagaaaatcatcaaacgcaggagcaggagagtcttgtgcaggaagacaagaccaggaagcctaaaatgctagaggagaagagcccagagaaggtcaaggcgatggaagagaagctggaggctttgctcgaaaaaacaaaggccttgggactcgaagaatcattggtccaggagggtagggctcgagagcaggaagagaagtattggaggggccaggacgtggtacaggaatggcaggagacaagtcccacgcgcgaggagcccgcaggtgagcagaaggagctggccccagcctgggaagacaccagccccgaacaagacaaccgttactggcgggggagagaggacgtcgcgttagaacaggacacatattggcgtgaactcagctgcgaacgtaaagtgtggttcccccatgagttggacggtcagggggcgcggccccattacacagaagaacgggagtcaacctttttagatgagggtccagatgatgagcaagaggtgcctctcagggagcacgcaacgcgaagcccatgggcctctgattttaaagatttccaagagtctagtcctcagaagggtctggaggttgaaagatggttggccgagtcaccagtggggttgccaccagaggaggaagacaagttgactaggagcccctttgagattatcagtcctcccgccagtcccccggagatggtagggcagagggtgccttccgcccccgggcaagagtctccgatccccgacccaaagttaatgccacatatgaagaatgagccaactactccctcttggctcgccgatatccccccatgggtaccgaaagaccgccctctgccccctgcgcctctgtcgcctgcccctggacctcccacgcctgcacctgaaagccacacgcccgctcccttcagttggggtacagcagagtacgatagtgttgtggccgccgtgcaggagggggccgcagaattggagggtggcccctattccccattgggtaaggactatagaaaggccgagggcgagcgcgaggaggaagggagggcagaggccccagataaatcaagccattcatcaaaagttcctgaggcatcaaagagccatgctacaacagagcccgaacagacagagcctgaacagagagaaccaaccccgtatcccgatgaacgcagttttcaatatgccgacatttacgagcagatgatgctgactggtctgggacccgcctgtccaactcgcgaacctcccctcggtgcagccggtgattggcctccttgtttatctaccaaggaagccgccgccggccgtaatacttctgccgaaaaggaactctcctctcccatatcccccaaaagtttgcagagcgacaccccgactttctcatacgccgcccttgctggacccacagtgcctccccgtcctgagcccggtccctccatggagccctctctgacgccaccagctgtcccgccacgtgcccctatcctgagcaaagggcctagcccaccgctgaatggaaacattctctcctgcagccctgacaggcgatccccaagcccaaaggagagcggccgcagccattgggacgatagcaccagtgatagtgagttagaaaagggcgccagggagcaacccgaaaaggaggctcagtctccctcaccgccacacccaattcctatgggatccccgaccttgtggccagagacagaagcccatgtgtctcccccactggattcgcatcttggacctgcaagaccgtccttggactttccagcttcagcttttggctttagcagcttacaacctgctccaccacagcttcccagtcccgccgagccaaggtctgctccttgcgggagtctcgcattttccggcgacagagcactggccctggctcccggcccacctactcgaacccgccatgacgagtatctggaagtcaccaaggccccttcactggattctagcctgcctcagctgccatctcccagctctcccggggcccctctactgtctaaccttcccaggccagcatccccggcactctctgaaggtagtagtagcgaagctacaactcctgtgatttcatcagttgccgaaagattctctcccagtctggaagctgcagagcaggagagtggggaactcgatccggggatggaaccagcagcccattccctatgggacctgacgccactgtcgccagcaccaccagccagtctcgatttagcactggctcctgccccctccttgccaggggacatgggagatggcatactgccatgtcacctggaatgttcagaagccgccaccgagaaaccatctccctttcaagtgcctagcgaggattgtgctgccaacggccctacagaaacaagccctaaccctcctgggcctgctccggccaaggctgaaaacgaggaagcagccgcatgccctgcatgggaaagaggtgcttggccggagggtgctgaacgcagttcccggccagacaccctgctctcccccgaacagcccgtgtgccccgccgggggaagcggcggccctccctcaagtgcctcccccgaggtggaggccggcccccagggctgtgctactgaacccagaccacaccggggagaactgtctccatccttcctgaacccccccttgccaccctccatagatgacagagatctgtctactgaggaagtgcgcctggtgggccggggcggtcgacggagagtcggcggaccagggaccactggaggtccctgccctgttacagacgaaacacccccgactagcgcctctgatagtggttctagccagtcagacagcgacgtgccgcctgaaacagaagaatgcccctcaattaccgcagaagctgcattggatagtgatgaggacggagattttctgcctgtagataaagcggggggcgtgagtggtacccaccacccacgcccaggacacgaccccccccccctgcctcagccagatcctcgaccttccccccctaggccggatgtgtgtatggcagacccagaggggctgtcttctgagtcaggtcgggtggaacgtctgcgcgaaaaggaaaaggtacagggaagggtcggaaggcgcgcccccggcaaagcaaaacctgcgagccccgcgcggcgtctagaccttaggggcaaacgctctccgacgccaggcaaagggccagcggacagggccagcagggctccccctaggccccgatccaccaccagccaagtgactccagccgaagagaaagacggccattcacccatgtccaagggtctagtgaatggcctgaaggctggcccaatggctctgtccagtaagggatcatcaggcgcccctgtgtacgtggacctggcctatatcccaaaccactgctccggcaaaacagccgacctagacttctttcggcgtgtgagagcttcctattatgttgtgtccgggaacgatcctgcaaatggcgaacctagccgcgccgtgttggatgccctgctggaaggaaaagcgcagtggggggaaaatctacaggtgaccctcatccctacacacgacacggaggtgaccagagagtggtaccagcagactcatgaacaacagcagcagctaaatgttctcgtactggcctcatcttccacagtcgtgatgcaggacgaatcatttccagcgtgcaagatcgagttttag

SEQ ID NO: 195153 - DNA, 8418 bp, synthetic construct
  misc_feature 1..8418: note = Description of Artificial Sequence: Synthetic coding sequence
  source 1..8418: mol_type = other DNA
atggacggcgtggccgagttcagcgagtacgtgagcgagaccgtggacgtgcccagcccttttgacctgcttgaacctcccacaagcggtggcttcctgaagctctctaagccttgttgctacatctttcccgggggtagaggagacagcgctctgttcgccgtcaacggcttcaacattctggtggatggcggctccgatcggaaaagttgcttttggaagctcgttcgtcaccttgaccgaatcgatagcgtactgttaacacacatcggggcagacaatctaccgggaattaatggcctgcttcagaggaaagtcgcagagttagaagaggagcagagccagggcagtagttcatacagcgattgggtcaaaaacttgatttcacccgagctcggggtcgtgttcttcaacgtccccgagaaattgcggctgcctgatgcctcacgaaaagccaagcgttcaatagaagaggcctgtctgaccctacaacatctgaatcggctgggcatacaggccgaacctctctacagggtggtgtccaataccattgaaccactgactttgttccataaaatgggcgtgggacgactggacatgtatgtactcaatcctgtgaaggattctaaagagatgcagtttcttatgcagaagtgggccggaaattccaaagctaagacgggtatagtcttacccaatggaaaagaggccgagatcagcgtcccatacttgaccagcattaccgcactagtggtctggcttcctgccaatccaacagaaaagattgtgcgcgtcctcttccccggcaacgccccccagaacaaaatcctggagggactcgagaaactcagacatctcgacttccttcgataccccgtggccactcagaaggacctggcatccggagctgtgcccacgaacctgaagccatcaaaaatcaaacagcgggcggactccaaggagtctcttaaggccactaccaaaactgccgtgtctaagctggccaaaagggaagaagtggtagaggagggagctaaggaggcaagatccgagctggcaaaggaactagccaaaactgaaaagaaagccaaggagtcctctgagaagccccctgaaaaacccgccaaaccagaacgcgttaagacagagagctcagaagcattaaaggctgagaaacgaaagctgattaaagacaaggtgggcaagaagcatttgaaggagaagatttccaagctggaagagaaaaaggacaaggagaaaaaggaaattaaaaaagaaaggaaggagctgaagaaagacgagggccggaaagaggaaaagaaagacgcgaagaaggaggaaaaacgaaaggacactaagccggaattgaagaaaatctccaagccggacctaaaaccattcactcccgaagtgagaaagacactgtataaggctaaggtgcctggaagggtaaagatcgacagatcccgcgcgattaggggcgagaaggaactctcttctgaaccccaaactccacccgcccagaaaggcacggtccctctgcccacgatctctggccaccgagagctagttctcagcagccctgaggaccttacccaagacttcgaggagatgaagcgagaagagcgggctctcctggccgaacagcgggacacaggcctgggggataaaccttttcccttggacacggccgaggaagggcccccttcaacagcaattcagggaacgcccccttccgtaccaggactgggccaggaggagcatgtgatgaaagagaaagagctggtgcccgaggtcccagaagaacagggatctaaggacagaggcctggacagcggcgcagagacggaggaggaaaaggacacgtgggaggagaagaagcagcgcgaggccgagagactgccagaccgcacagaggcccgggaggagtccgaaccagaggtcaaggaggatgttatagagaaggccgaactggaggaaatggaggaggtccaccccagtgatgaagaggaggaagatgccactaaagccgaaggcttctaccaaaaacatatgcaggagcctctgaaggtgacacccagaagtagggaggcatttggtggtagagaattgggcctgcaaggcaaagctcctgagaaggagacgagtctcttcctatcctctctgacaacacccgctggcgctaccgagcacgtttcttacatccaagatgaaactataccaggatactctgaaacagaacagactatctctgacgaggaaattcacgacgaaccagaggaaagaccagcccctcccaggttccataccagtacctacgatctgccgggacctgaaggcgctggaccatttgaggcttcacagccagcggattccgcagtcccagctacatccggtaaagtgtacggcacacccgaaactgagctaacgtacccaactaatatcgtagcagctcctcttgccgaggaggaacacgtctcctccgcaacatcaatcacagaatgcgataaactgtcttccttcgcaacatccgttgctgaggaccaaagcgttgcaagcctcactgcaccccagacagaagagacaggaaagagttccctgctgctggacacggtgacctccatcccaagcagccgaaccgaagccacccaggggctggactacgtgccctccgctggaaccatctctcccacttcctcactcgaggaagataaaggcttcaagagtccaccctgcgaggactttagtgtcaccggcgagtctgagaaacgcggtgaaattattggcaagggactgagcggagagagagcagttgaagaagaggaagaggagacagccaacgttgagatgtccgagaaactgtgctctcagtatggcacccctgtgtttagcgctcccggacacgccctgcacccgggcgaacctgctctgggtgaggccgaggaacgctgtctgtctcctgacgacagcactgtaaaaatggcttctccaccgccttccggacccccaagtgccacccacacccccttccaccaaagtccagtcgaggagaaaagcgagccccaggattttcaggaagcagattcttggggggacactaagcggaccccgggggttggcaaggaagacgcagcagaagagactgtcaagccaggacccgaagaggggacactggaaaaagaggagaaagttcctccaccccgttcaccgcaggctcaggaggcaccagtgaatattgacgagggactgacaggatgcacaatccaacttcttcccgcccaggacaaggccatcgtgttcgaaatcatggaagccggtgaacccacaggtcctatcctgggcgcggaggcactgcccggtggcctgcggacgttgcctcaggagcccggaaagccacagaaggacgaagtgttgcgataccccgacagaagtctatcacctgaagatgccgaatctctgagtgtactgagcgtgccgagtcctgataccgccaaccaagagccaacccccaaatcgccctgcggtctgacggagcaatacctacataaagatcgctggcctgaggtcagccctgaagatacacagagtctgtctttgtccgaggagagtccgagtaaagagacgtccctcgacgtctctagcaagcagctgagccccgaatccttgggcaccctgcagtttggagagctgaatctagggaaagaagagatgggtcacctgatgcaggcagaggacacttcacatcacaccgcccccatgtctgtgcctgagccccacgcagccacagccagcccccccaccgatggcactaccaggtactctgcccagacagacattaccgatgacagtcttgatcggaaatctccggcatctagcttctcgcacagcacaccatccggcaatggcaaatatctgcccggtgcaatcacatcacccgacgaacatattttaaccccagacagcagctttagtaagagcccagagtccctgccgggaccagccttggaggacatcgcgataaagtgggaagacaaggtccccggtttgaaggacagaaccagcgagcaaaagaaagagcccgaaccaaaagatgaggtgctccagcagaaggacaagacactcgagcacaaagaagtcgtggaacccaaagatacagccatttaccagaaggatgaggcattgcacgtgaagaatgaggcagtgaaacagcaggataaagcactagaacagaaagggcgcgacctggaacaaaaggacaccgcattggagcaaaaggacaaggcacttgaacccaaggataaagatcttgaagaaaaagacaaagccctcgaacagaaagacaagattccggaggagaaggacaaggccttagaacagaaagacaccgcactggagcaaaaagataaagccctggaacccaaggacaaggaccttgagcagaaggatagagtgctggagcaaaaagagaaaattcctgaagagaaggataaagccttggaccagaaagtgcgatccgtggaacataaagctcctgaagacaccgtggccgagatgaaagatcgggatcttgagcagactgataaagcacccgaacagaaacatcaggctcaagagcaaaaggataaggtgtcagaaaaaaaggatcaagcgcttgagcagaagtattgggctctcgggcagaaggacgaggcacttgagcagaatatacaggccctggaggagaatcaccaaacccaagagcaggagtcacttgtgcaggaggataagaccagaaaaccaaaaatgctggaggaaaagagccccgagaaggtcaaagctatggaagagaaacttgaagctctgctggagaagactaaggccctgggactggaagagtccctggtgcaagaaggtcgtgccagggaacaggaagaaaaatactggaggggccaagacgtcgtccaggagtggcaagagacatcccccactagggaagagcccgctggcgagcagaaggaactcgcccccgcctgggaggacacctcacctgaacaggacaaccggtattggcgaggcagggaggacgtagccctggaacaggacacatactggagggaactgtcttgtgagaggaaggtttggttcccccacgagcttgacggccaaggagcacggcctcactacaccgaagagcgggagagtaccttcctggatgagggccctgatgacgagcaagaagtaccgcttagggaacacgcaacgcgtagtccatgggcatctgattttaaagattttcaagagagttctccacagaaaggcttggaagttgagaggtggttagctgagagtccagtaggtttgcctcccgaggaagaggataagctgaccagatccccttttgaaatcatctcgcctcctgcaagcccacccgagatggtgggacagagggtgccatccgctccaggccaggagtctcctatacctgaccctaaactgatgccccatatgaaaaacgagcccactactccatcttggctggctgatattccaccctgggtccctaaagaccgaccactgcctcctgcacctctgtctcctgcccccggccctcctacaccagctccagagagccacaccccagcccctttctcttggggtaccgccgagtatgattccgtggttgcagcagtgcaggagggggccgctgagctcgagggggggccttactcaccgctcggaaaagactacagaaaggcagagggagaacgagaagaggaggggagagccgaagcccccgacaagtcctctcatagcagtaaggtcccggaggcctcaaagagccatgcgaccactgaaccggagcaaactgaacctgaacagagggagcccactccctatcccgatgaaagatcttttcagtatgccgatatatatgagcagatgatgctgactggcctcggacccgcctgccccaccagggagccacccttgggcgctgctggagattggcccccatgtctttccacaaaggaggcagctgcgggacgcaatacaagcgctgaaaaagagctaagctctcccatctcacctaaaagcctccaatcagatactcctacgttttcgtacgccgccctcgcagggccgactgtgccacccagaccagaacccggccctagcatggaaccatctttaactccccctgcagtgccacctcgggcaccgattctcagcaaagggccatccccgcctttaaatggaaatatcctgtcctgttccccggatagaaggtcaccttcacccaaggagagtgggagatcccactgggatgacagtacatctgacagcgagctggagaagggggctcgcgagcagccagagaaagaggctcagagcccatccccaccccatcccattccaatggggagtcccacactatggcccgagacagaggcacatgtgtctcccccactagacagccatctgggacccgcccgccctagcctggactttcccgccagcgcttttggattttcgtcgcttcagcctgcccccccacagctcccaagcccggccgagccgaggagcgccccatgcggaagcttagctttttctggggacagagccctggccctcgcgccaggcccaccaacgaggaccagacacgatgagtacctggaggtcacgaaagctccttctctcgactccagcctgccccaactgccatctcctagtagccccggggccccactgctgagcaatctacctcggccggcgtctcctgccctgtcggagggctcatcatcagaggccaccacgcccgtgatctcatctgtggcggagaggttctcccccagccttgaggcggccgagcaggaatctggtgagctcgaccctggcatggaacctgcggctcactcgttgtgggatctgactcccctgtctcccgcaccacccgcgtctctcgatctggccttggcccccgcccccagcctcccgggcgatatgggcgatgggatccttccctgccatttagagtgtagcgaagcagctaccgaaaagcctagccctttccaagtgcctagcgaggattgcgctgctaacggtcctacagagacgtcaccaaaccctccaggaccagccccagcaaaggccgaaaatgaggaggcagccgcctgccccgcttgggaacggggtgcttggccagaaggagccgagcgctcgagccggcccgacacacttctgtcacctgaacagccagtgtgtcctgccggcggcagcggaggaccaccctcttccgcatctcccgaggtggaggccgggccccaaggctgtgccaccgaacctcggccccaccggggagagctaagtccaagctttctgaatcccccattgcccccgtcgatcgacgatagagacctgtcgaccgaggaggtgcgccttgtgggacgcggaggccgccggagggtgggtggccccgggactacagggggaccttgccccgtaactgatgaaacacctccaaccagtgctagtgattccggttcttcgcagagcgattctgatgtccctcccgaaacagaagagtgtcccagcattacagccgaggctgctctggatagcgacgaggatggagacttcttgcctgtggacaaagccgggggagtgagcgggacgcatcacccaaggccggggcacgacccccctccactcccccagcccgaccctcggccttcacccccccgccctgacgtttgtatggctgatccagagggcctctcttctgagagtggccgggtcgagaggctgagagagaaggagaaagtgcaaggacgggtgggtagacgcgcccctgggaaggctaaacctgcttctccagctaggagactggacctgcggggcaagcggagtccaactccgggcaaggggccagctgatcgagccagcagagctcctcctagaccgaggagtactacgtcgcaggtgacacccgccgaagaaaaagacggacactcccctatgtctaaagggctcgtgaacggtttgaaagcgggccctatggcactgtcgtcgaaggggagttctggggccccagtttatgtggatttggcctacattcctaatcattgctcagggaaaacggccgatctggatttcttccggcgggtgagagccagctactatgttgtctccggaaacgaccccgccaatggggaaccgagcagagctgtgcttgacgctctgctggaaggcaaggcccagtggggcgaaaacttacaggtctccgtgacacttatacctacacacgatacagaagtgacacgggaatggtaccagcagacccacgagcagcagcaacagcttaatgtgctggtcttggcatctagctccactgtcgtaatgcaggacgaaagctttccggcctgtaagatagagttctag

SEQ ID NO: 195154 - DNA, 1884 bp, synthetic construct
  misc_feature 1..1884: note = Description of Artificial Sequence: Synthetic coding sequence
  source 1..1884: mol_type = other DNA
atggacggcgtggccgagttcagcgagtacgtgagcgagaccgtggatgtgcctagtcccttcgaccttttagaacctccgacttctgggggattcctgaagctgtcgaagccgtgctgttatatcttccccggagggcggggtgatagcgcgctctttgccgtgaatggctttaacatcctggtagatggcgggtctgatcggaagtcttgtttctggaaactcgttcgacatctagataggatcgactccgtgctgctgacccacatcggagcagataatctgcctggtatcaatggtctgttacagcggaaagtggcagagttggaggaggagcagtcccaaggcagcagctcctacagcgattgggtaaaaaatctgatctctcccgagcttggtgtggttttcttcaatgttcccgagaagttgagactgccggatgcatcccgcaaggcaaaacgatccattgaggaggcctgcctgaccctacagcatctgaaccggttagggatccaagccgaacccctgtatcgtgtcgtgagtaacaccatcgagcccctgaccttattccataagatgggcgtgggtagactcgatatgtatgtcctgaatcctgtcaaggactccaaagagatgcaattcctgatgcaaaaatgggctggaaatagtaaggcaaaaactggaatagtgctcccaaacggaaaggaagccgagatctcggtaccttatctcaccagcattactgccctcgttgtgtggctgccagcaaatcctacagaaaagatcgtgcgtgtcctgttccccggaaacgctccccagaacaagatcttggaaggcctggaaaagctccgtcacctcgacttccttcgctaccctgttgccacccaaaaggacctggcatccggcgctgtgccaacaaacctcaagccctccaaaatcaaacagagggccgacagcaaagagagtctgaaggcgacaacgaagacagccgtgtctaaactcgctaagagagaggaagtcgtcgaagagggggcaaaagaagcccgctccgagctggcaaaggagttagccaaaactgagaagaaagctaaggagtctagtgaaaagccaccggaaaaacccgccaagcctgagagggtaaaaacagaaagcagcgaggcgctgaaggcagaaaagcgaaaactgattaaggataaagtggggaaaaagcacctcaaagaaaaaattagcaaattagaggagaaaaaagacaaggaaaaaaaggaaatcaaaaaggaaagaaaagagctgaagaaggacgagggtcgtaaggaggagaagaaagatgcgaaaaaggaggagaagcgtaaggacactaagccagaactgaaaaaaattagtaagcccgacctgaagccttttaccccggaagtcaggaagacactttataaggctaaagtaccaggaagagtgaaaatcgatcggtcccgtgccatcagaggtgaaaaggaattgtcttccgagccccagacccctccggcccaaaagggtaccgtgccactcccgaccatttctggccatcgggagttggtactttcatcacctgaagacttgacacaggattttgaggaaatgaagagggaggaacgcgccttgctggccgagcagagggataccggcctcggtgataaacccttcccattggataccgccgaagagggtcccccttccaccgcgatccaggggacaccaccctccgtgcccggactaggccaggaggagcatgttatgaaagagaaggaactcgtgccagaagtgcctgaggaacagggatcaaaggacaggggtctggacagcggagccgagacagaggagaaaaaaaagaagaaaaagaagaagaagtag

SEQ ID NO: 195155 - DNA, 1680 bp, synthetic construct
  misc_feature 1..1680: note = Description of Artificial Sequence: Synthetic coding sequence
  source 1..1680: mol_type = other DNA
atggccgacgagcggaaggacgaggccaaggccccccactggaccagcgcacctttaactgaggcatccgcacatagccatccaccagagatcaaagatcaaggcggcgctggcgagggtctcgtgcgtagcgcgaatggatttccctaccgggaggacgaggagggagcttttggagaacacggcagccagggtacttattctaacaccaaggagaatgggatcaacggggagttgacgtcagctgacagggagactgcagaggaggtgagcgcccgaatcgttcaggtggtcacagccgaggccgtggccgtgttaaagggggagcaggagaaagaggcccaacataaggatcagaccgcggccctgcctctcgctgcagaagagaccgcgaatctgcctccttctccgcccccttcccctgcatctgaacagactgtcaccgtggaggaggccgcaggaggagaatcagctttagctccctcagtatttaagcaggccaaagataaggtatccaattcaacactctcaaagattcccgccctacaggggagtactaaatcgcctcgatactcttccgcgtgcccaagtactacgaagagggccaccttcagcgatagcttattgatccagccgacgagtgcaggcagcactgaccggctcccatacagtaagtcaggaaataaggacggtgtgaccaaaagcccagagaagcgttcctcgctcccccgcccaagtagcattctgcccccccggcggggagtgtctggcgaccgcgatgagaattcctttagcctcaattcctccatttctagttctgctcgtcgcactactaggtccgagccaatccgaagggcagggaaatctggcacatcgaccccaacaactccaggatctaccgcgattactcccgggacgccaccctcatattccagccgaacaccggggactcccggaaccccctcttaccctcgcaccccacacacacccgggaccccgaaaagtgccatactcgtgcccagcgaaaagaaggtggccattatccggactccccctaagtctcccgctactcctaagcagctgaggctgatcaaccaaccattgcctgacctgaagaacgtgaaatctaagatcggatctaccgacaacatcaaataccaacctaagggcgggcaggtgcgaatcctgaacaagaaaattgatttcagcaaagtccagtctagatgcggatcaaaagacaacatcaagcacagtgcaggggggggtaatgttcagatcgtgacgaaaaagatagatctgtctcacgtcactagtaaatgcggtagcctgaagaacatacggcaccggccaggcggcggcagggtcaaaatcgagagtgtgaagctcgacttcaaagaaaaggctcaagcaaaggttggatccctcgataatgctcaccatgtgcccggcgggggtaatgttaagatagacagccagaagcttaactttagggagcatgccaaggctcgagttgaccacggcgcggaaattatcactcagagtccgggacgttcttccgtcgcaagtccgcggcggctcagcaacgtctccagtagtgggtcgataaatctcttagaaagcccccagctcgcgaccctcgctgaggacgtgactgcggctctggctaaacaaggtctgtag

SEQ ID NO: 195156 - DNA, 5484 bp, synthetic construct
  misc_feature 1..5484: note = Description of Artificial Sequence: Synthetic coding sequence
  source 1..5484: mol_type = other DNA
atggccgacgagcggaaggacgaggccaaggccccccactggacctccgctcctttaaccgaggcttctgctcatagccatcctcccgaaattaaggaccagggaggtgctggtgaggggctggtcagaagtgcaaacggcttcccctatagggaagacgaggagggtgcatttggggaacatggctcccagggcacctattccaacactaaagagaatgggatcaatggtgagctgacaagcgcagatcgagaaaccgcagaagaggtctccgctcgcattgttcaggttgtgacagcggaagcagtggctgtactcaagggggaacaggaaaaagaagcacagcataaggaccaaaccgctgccttaccgctggcagcagaggagactgcgaacctgcccccaagcccacccccctcccccgctagcgaacagacggtgaccgttgaggaagatctgctcacggccagcaagatggaattccatgaccagcaagaacttaccccaagcacagcagaacccagcgatcaaaaggaaaaagagtcggagaaacagtccaagcccggagaagacctgaaacatgctgctttggtctcgcaaccagagacaaccaagacatatccggataaaaaggacatgcaggggactgaggaggaaaaggcccctctggccttattcgggcacaccctggtggcctccttggaggatatgaagcagaaaactgaaccgtccttggtggtgccaggaatcgatctccccaaggaaccccctactcctaaagaacagaaagactggttcatagaaatgcctacagaggctaaaaaggacgagtggggcctcgtggcccccatctctcctgggccgttaacccccatgcgggagaaagacgtgtttgatgatatccctaagtgggagggtaagcaatttgactccccgatgccatctccttttcaaggggggagctttaccctacccctggatgtcatgaagaatgaaatcgttacagaaacttctccctttgctccggcgtttctacaaccagacgataaaaaatctctacagcagacttcaggcccagcaacggctaaggactcctttaagatagaagagccccatgaggccaagccggacaaaatggcggaggcgccaccatctgaggctatgaccctccctaaagacgcacacattcccgtcgtggaggagcacgtgatgggtaaggtgctcgaagaagagaaagaggcgatcaaccaggagaccgtgcagcagagagatacctttactccaagcggacaagaacccattctcaccgagaaagaaaccgaattgaaacttgaagaaaaaaccaccatcagcgataaggaggcagtacccaaagaaagcaagcctcctaagcctgcggatgaggagattggcattattcagacttcaactgagcacacgttctccgagcagaaagatcaagagccaactaccgacatgcttaaacaagatagctttcccgtctctttggaacaggcggtgacagattcagccatgacaagcaagacgctcgagaaggctatgaccgagccatcagctctcattgagaagagttcgatacaagagctgttcgagatgagggtggacgacaaggataagattgaaggggtgggggcagctaccagcgcggagctggatatgcccttctatgaggataaatccggaatgtcaaaatatttcgagacctccgctttgaaagaggaagcgaccaagtcaatcgaaccagggtccgattattacgagctttctgatactcgcgagagtgtccatgaatcaatagacacaatgtcacccatgcacaaaaatggggacaaggagtttcagaccggcaaggaatcgcagccatcaccccctgcacaggaggccgggtattctaccctcgcccagtcatatccttccgatctaccagaggagccgtcttccccccaggagcgcatgttcaccattgaccccaaagtgtacggcgaaaaacgtgatcttcattccaagaacaaagatgacctgactctctcacggtcccttgggctcggagggagatctgccattgagcagagatccatgagcatcaacctgcccatgtcatgtttggactccatcgcgctgggcttcaactttggacgtggacacgatttgtctccgttagcctcggacatcctcactaacaccagcggtagcatggacgagggcgatgactacctgcctgccacaaccccagccctcgagaaagcgccatgctttcctgtggagtccaaagaggaagagcagatcgagaaagtcaaagctacgggagaggagtccactcaagcagaaataagctgcgagtccccttttctggccaaggatttctacaagaacggcacagtcatggcccccgacctgccagagatgctagatttggctggcacacggagtaggcttgcttcagtttccgccgacgcagaggtggcaagacggaagtctgtcccatctgagacagttgtggaagattctagaacaggtctgcccccagtgaccgatgagaatcacgtcattgtgaaaaccgatagccagttagaggacttaggctattgtgtatttaacaaatatacggtccctctgcctagtcccgtccaggattccgaaaacctgagcggcgagtccggaacattctatgaaggcaccgacgataaggtgcggcgcgatctggccacagatctgagtcttattgaagtaaaactagccgctgccggccgggtaaaggatgaattcagcgtggataaagaggcatccgcacacatcagtggcgacaaaagcggactctctaaggagttcgatcaagaaaagaaggccaacgatcgactggataccgttttagaaaagagcgaggagcatgctgacagtaaggaacatgcaaagaaaacggaagaagccggtgatgaaattgaaacttttggcctgggtgtgacctatgaacaggccctcgctaaggatctgtccatccctactgacgccagcagcgagaaggcagagaaggggctgagcagcgtacccgaaattgccgaggttgagccttcaaagaaggtagagcagggtctggattttgccgtgcagggacagctggatgtcaaaatttcagacttcggccagatggccagcggcctgaatatcgacgaccggcgggcgactgagttgaagctggaggctacacaggatatgaccccatcgagtaaggcacctcaagaagctgacgctttcatgggcgtcgagtcaggacacatgaaagagggtacgaaggtgagcgagaccgaagtaaaagagaaagtcgcgaaacccgacttggtacaccaggaagctgtggataaagaagagagctatgagtcttctggtgaacatgagagtcttacaatggagtcactgaaggccgacgaaggtaagaaggagacatctcctgaatctagcttaattcaggatgaaatcgccgtgaagctatcagtcgaaatcccttgtccccctgccgtgagcgaagccgacctggctacggacgagcgagccgacgttcagatggagttcatacaggggccgaaagaggagtcaaaagaaaccccagacatcagtattactccaagcgacgtggccgagcccctgcacgaaacaatagtgagcgagcctgccgagatccagtccgaagaagaggaaatcgaggctcagggggagtacgataagttgctgttccggagcgacactctgcaaataacggatctaggggtatctggtgcaagggaagagtttgtcgaaacgtgcccaagcgagcataaaggcgtaatagaatccgtggtcacaatcgaggacgactttatcacagtggtccaaacgaccaccgacgaaggggagtctgggtcccacagtgtacggtttgccgccctggagcagccggaagtggaaaggcggccaagcccacacgatgaagaggagtttgaggtcgaagaggctgcagaagctcaggctgagccaaaggatggatccccagaggcaccagcatctccagagagggaggaagtcgcgctttccgagtacaaaaccgaaacgtacgacgattataaagacgaaacaacgatcgatgactccatcatggacgccgactcactttgggtcgacacccaggatgacgatcgctcaatcatgacggagcagctagagactatccccaaagaagaaaaagccgagaaagaggccagacgatcaagtctcgagaaacacaggaaggagaaaccattcaagactggtaggggcaggattagcacaccagagagaaaggtcgctaagaaggaaccaagtaccgtttctcgcgacgaagtcaggcggaaaaaagcggtgtacaagaaagcagagctagccaaaaagaccgaagtgcaagcccactcccctagtaggaagtttatattgaaaccagccatcaagtacacccgacctacccatctgtcatgcgtgaaacggaagacaacagccgctggaggagaatctgccttggctccttccgtgtttaagcaggcaaaggacaaggtaagcgatggagtgaccaagagccccgagaagagatccagtctcccccggccttcaagtatcctgcctccgcgccgtggtgtgtctggagatcgggacgaaaattcttttagtctgaactcttcaatcagctcctcagcccggcgtacaacaagatccgaacccattagacgtgcaggtaagtctggaaccagcacacccactacacctggctcaacggcgatcactcccggcacgccaccatcctatagctcgcgaacaccgggcaccccgggaacaccaagttatccacgcaccccacacacacccggcacacctaagtctgctatccttgttccgtctgaaaagaaagtcgccatcattagaactccacccaagtcacccgctacgccaaagcagctacggctcatcaatcaacctctgcctgatctgaagaacgtgaagagcaaaatcgggtctactgacaatatcaaatatcagcccaaaggcggacaagtgcaaattgtgacaaagaaaatcgacctgagccatgtgacttccaaatgcgggagcctcaagaatatacgccacagacctgggggcggtcgcgtgaagatcgagtccgtgaagttagactttaaagagaaagcccaggcgaaggtgggcagcctcgataacgcccaccatgttccgggaggtgggaacgtgaaaattgactcccagaaactgaactttagggagcacgcaaaggcacgcgtggatcacggcgccgagatcataacccaaagccctgggcgctccagcgtggcgagtccccgccggctttccaacgtttcatcctcggggagtatcaacctgctggagagcccacagctcgctacactggccgaggacgtgacagcagccctcgccaaacagggactgtag

SEQ ID NO: 195157 - DNA, 1416 bp, synthetic construct
  misc_feature 1..1416: note = Description of Artificial Sequence: Synthetic coding sequence
  source 1..1416: mol_type = other DNA
atggccgacgagcggaaggacgaggccaaggccccccactggaccagcgcgccattgaccgaggcatcagcccactcacatcctcctgaaattaaagaccagggcggggccggcgagggtttggtccggtcggcgaacggattcccttatcgggaggacgaagaaggtgcttttggagaacacggaagtcaggggacatatagcaacaccaaggagaatggaataaacggtgagttgacatcagccgatcgtgaaacggcagaggaggtgtccgcccgcattgtccaagtggtgacggccgaagccgtcgccgtgttaaaaggcgaacaagaaaaggaagcacaacataaagaccaaacagccgcactgccactggcagcggaagagacggcaaacctccccccatctcccccaccctctccagccagtgaacagactgtgaccgtcgaagaggcagctgggggggaaagcgccctggccccttcggtgttcaagcaagcaaaagacaaggtatccgatggagtaacaaagtcccctgagaagcggagctccctgccaaggccgtcttccattctccccccacgacgcggtgtgtccggggacagggatgaaaactcattcagcctaaatagctctatatcttcaagcgctcggagaaccacccggtccgagcccatcagaagagccggcaagtctggcacaagtacaccaactacccctgggagtacggccattacaccagggactcctcccagctacagctccaggaccccgggtacgccaggtacaccctcttatccacgcacgccacacacccccggaacgccgaaatccgctattttagtaccctctgaaaagaaagtggccattatcaggacaccacccaagtcgcctgccacacctaagcagctacggctgataaatcagccattacccgacttgaaaaacgtcaagagcaaaattgggagtaccgacaacataaagtaccaacctaaagggggacaagtacagatagtgacaaaaaaaatcgacctgagccacgtgacatcaaagtgcggttccctaaagaacatccggcatcgtccaggaggaggcagggtgaaaattgaatcagtgaaactcgattttaaggagaaggcgcaggctaaagtaggatccctggacaatgcgcatcacgtgcccggaggaggaaacgtgaagatagattctcagaaattgaacttccgcgaacacgctaaggcgagagtggatcacggggcggagatcattacacagagtccagggaggtcttcagtcgcgtcaccaagacgcctttctaacgtgagctcatccggtagtattaacctgctcgagtctcctcagctagcgactctagctgaggacgtgacagcagcactggccaagcagggactttag

SEQ ID NO: 195158 - DNA, 321 bp, synthetic construct
  misc_feature 1..321: note = Description of Artificial Sequence: Synthetic coding sequence
  source 1..321: mol_type = other DNA
atggccgacgagcggaaggacgaggccaaggccccccactggacctccgctcccctgacagaggcctcagcacactcccacccccctgaaatcaaggaccaaggtggagcgggagaggggctggttagatccgccaatgggttcccctacagggaggatgaagaaggcgcttttggtgaacacggctctcaaggtacctatagcaacaccaaggagaatggcatcaatggcgagctgacatccgctgaccgcgagactgccgaggaagtgtcagccagaatagtccaagtcgtcacggctgaggccgttgcagtgctgtag

SEQ ID NO: 195159 - DNA, 1416 bp, synthetic construct
  misc_feature 1..1416: note = Description of Artificial Sequence: Synthetic coding sequence
  source 1..1416: mol_type = other DNA
atggccgacgagcggaaggacgaggccaaggccccccactggacctcagcgcccctgactgaagccagcgcgcactcccacccacccgagataaaggaccagggaggcgcaggtgagggcctcgtccgctccgccaatggttttccctatagagaagacgaagaaggcgcgtttggagagcatggcagccagggcacttactctaataccaaagaaaacggcatcaatggtgagctgacctccgccgatagggaaactgcggaagaagtctctgcccgaatagtgcaggtggttaccgccgaggctgtcgcagtcctgaagggagaacaagaaaaggaagcccaacacaaggatcagactgctgccctgccactggcagctgaagaaaccgctaatctgcccccttccccaccaccgtctcccgcttctgagcaaacagtaaccgtggaggaagccgcaggtggggagtccgcattggcccccagcgttttcaagcaggcgaaagacaaagtatctgatggggtgaccaaaagtccagagaagcgtagtagcctgccgaggccaagcagtatattacctcctagacgcggggtgtccggagatcgagacgaaaacagcttttctttaaactccagtattagcagctccgcaaggcgcaccaccagatcagaaccgattagacgggctggtaaatctggcacgagcactccaacgacacccggatctaccgcgataacccctggcactccaccctcctactcatcgcggacccctggaactcctggaactcccagttacccacgtacgccccataccccgggtactcctaaaagcgctattttggtgcccagcgagaaaaaggtggccattattaggaccccacctaaatctcctgccacacctaagcagcttcggctcattaatcagccgttgcccgatctgaagaacgtgaagtctaagatcggcagtacggacaacattaagtaccagcctaaaggcgggcaggttcagattgtcactaagaagatagacttgtcacacgtgacttcgaaatgtggctccttgaaaaacatcagacaccgacccggcgggggccgggtgaaaattgaatctgttaaacttgattttaaggaaaaggctcaggccaaggtggggtccctcgataatgcccaccatgtgccaggcggcggaaatgtaaagattgatagccagaaactcaatttccgggagcacgcaaaagcgcgcgtggaccatggggctgaaatcatcacgcagtcgccaggtaggtccagtgtggcctcccctcgccgactctcaaacgtgtcatcttctggttccatcaaccttctagagtctccgcaactcgccactctggcggaggacgttaccgcagccttggccaagcagggcttgtag

SEQ ID NO: 195160 - DNA, 5472 bp, synthetic construct
  misc_feature 1..5472: note = Description of Artificial Sequence: Synthetic coding sequence
  source 1..5472: mol_type = other DNA
atggccgacgagcggaaggacgaggccaaggccccccactggacctcagcccccctaaccgaggcttcagcccactcccatccacctgaaatcaaggaccaaggcggagccggcgagggcctcgtgcgtagtgccaacggattcccttacagggaggacgaagagggcgcttttggcgaacatggaagtcagggcacctactccaacaccaaagaaaacgggatcaatggcgagctcacgtcggcggatcgggaaactgcagaggaggtctcagcacgaattgttcaggtggtcactgctgaggccgtggcagttttgaagggtgagcaggagaaggaggcacaacataaggaccagacagccgcccttcccctcgcggccgaggagacagctaatctgcccccaagcccaccacctagccctgccagcgaacaaacagtgaccgtagaggaagccagtaagatggaattccatgatcaacaggagctgacccccagcaccgccgagccatcagaccagaaggagaaggagtctgagaaacagtccaagcctggagaggatttgaagcatgccgcactggtcagccagcccgaaactacaaaaacctaccccgacaaaaaggatatgcaaggaacagaagaagaaaaggcgcctttagcactcttcggtcatacgctcgtcgcctctcttgaggatatgaagcagaaaactgaaccttcactcgtggtcccgggcattgacctcccaaaagaaccaccaacccctaaggagcaaaaagattggttcatcgaaatgccaacagaggctaagaaagatgagtgggggttagtcgcccctataagtcctggccccctgacaccaatgagggagaaggatgtatttgatgatattcctaagtgggaggggaaacagtttgactcgcctatgccctccccgttccagggcggctccttcaccctgcccctagacgtgatgaagaacgagatcgtcactgaaacgagcccatttgctccggcattcctgcagcccgatgataagaaatccttgcagcaaacctcagggcctgccaccgccaaggactctttcaagatcgaagaaccgcatgaagctaagcctgacaagatggccgaagccccaccatctgaggccatgactctccccaaagacgcgcacatccccgtggtggaggaacatgtgatgggtaaagtgttggaagaggagaaagaagccattaaccaggaaacagttcagcagcgagatacatttactcctagtgggcaggagcccatactcacagagaaggagacggaacttaagcttgaggagaaaacgaccataagcgacaaggaggctgtccccaaagagagcaaaccgcccaagccagctgacgaagagatagggatcattcaaacttctaccgaacacactttcagcgaacagaaagaccaggagcctactactgacatgctcaagcaggactcctttcctgtcagtctcgaacaggccgtgacggattccgccatgacttcaaaaactctggagaaggccatgaccgagccctcggctctgatcgaaaaatcatcaattcaagagctgtttgagatgagagttgatgacaaggacaagattgaaggcgtcggtgccgccacttctgctgaattagacatgcctttttacgaagataagtctggcatgtccaaatacttcgagacttcagctcttaaagaagaggccactaagtccattgaaccggggtctgactattatgagctgtctgacaccagggaaagcgttcacgaatctatcgacacgatgtcacctatgcacaaaaacggggataaggaattccagaccggcaaagagagccaacctagtcctcccgcacaggaagcaggatattctactctcgcacagagttatccaagtgatctgcctgaagagcccagcagtccccaggaacgcatgttcacaatcgacccgaaggtgtacggcgaaaagcgcgatctccactcgaaaaataaggacgacctgactctaagcaggtctctggggttaggaggcaggagcgctatcgagcaacgatcaatgtctatcaacctgcccatgtcctgcctggattcgattgcacttggctttaactttggacgaggacatgacctcagtcctctggcgagcgacattctgactaacacctctgggtcgatggatgagggagacgattacctgccagctactacccctgccctggaaaaggcaccgtgcttcccagtggagtccaaagaagaagagcagatcgagaaggtgaaggctaccggtgaggaatccacgcaggcagaaattagctgtgaatcaccttttctggcgaaagacttttataagaacggcaccgttatggcgcctgacctgccagaaatgctggacctcgcgggcactcgttcgaggctggcgtcggtttctgccgatgccgaggtcgcacgccggaaatccgttccaagtgaaactgttgttgaggatagtcgcacagggctgccccccgtgaccgatgagaatcatgtaatcgttaaaaccgatagccagctggaagacctcgggtattgcgtgtttaacaaatacacagtaccactgcccagccctgtgcaagatagtgaaaacctttctggcgagtcaggcacattttacgaggggaccgacgacaaagtaagacgggatctggccactgacctgagtctgatcgaggttaagctggccgcagcagggcgagtgaaggacgaattcagcgtggacaaggaagcgagcgcccacatctctggagataagtccggattgagcaaagagtttgaccaagaaaagaaagcgaacgacaggctggatacagttttagaaaagagcgaggaacacgccgattccaaagagcatgccaagaagacagaggaagctggggatgagatcgagaccttcgggctcggcgtgacatatgaacaggcgttagcaaaggatcttagcattccaactgatgcgtcttcggagaaagccgagaaaggactgtctagtgttcccgaaattgccgaagtggaacctagtaagaaggtggagcaaggcttggacttcgccgtgcagggccagctggatgtgaaaatttccgatttcgggcaaatggcctcaggattaaatatcgacgataggagagcgaccgaactcaagttggaagccactcaggacatgacgcccagctccaaggccccacaggaggcagacgcgtttatgggagtggaatcgggtcacatgaaggagggcaccaaggtttcggaaactgaggtgaaggagaaagtagccaaacccgacctggtgcatcaagaagccgttgataaagaggagtcctacgaaagctctggcgagcacgaatccttgactatggaaagtctgaaggccgacgaagggaaaaaagagacctcccccgagagctctctgatccaggatgaaatcgctgtgaaactatcagtcgaaatcccttgtcccccggcagtctccgaagcagatttggcaacagacgaaagagccgacgttcagatggagtttattcagggtcccaaggaagaatctaaagaaacacccgatatcagcatcactccctcagacgtggctgagcctctccatgagacaattgtgtcagaacctgccgagatacagtccgaggaggaggaaattgaagctcagggggaatacgacaagctgctgtttcggtccgacacactgcagatcacagatttgggtgtgagcggagccagggaagaattcgtggaaacctgtccatccgaacataagggtgttattgaatcagtggtgaccattgaggacgactttatcaccgtagtccagacaacaaccgatgaaggagagtccggatcccattctgttcgtttcgcagccctggagcagcccgaggtagaacgcagaccttccccccacgacgaggaagagttcgaggtggaagaagcggcggaggcccaggcggagccgaaggatggttcacccgaggcaccagctagtcccgagcgtgaagaggtagcccttagcgagtacaagaccgaaacatacgatgactataaagacgaaaccacaattgatgatagcattatggacgcagactccctgtgggtcgacacacaggatgatgaccggtcaattatgacagaacagctagaaaccataccaaaggaagagaaagccgagaaggaggctaggcggtccagtctggagaagcaccgcaaagaaaagcctttcaaaacaggtagaggacgtatcagcaccccagagcgaaaagtggctaagaaagagccctctactgtgagccgggatgaggtccgacgaaaaaaggccgtgtataagaaggctgagctggctaagaagaccgaagttcaggcccactctccatcccgtaaatttattcttaagcctgcaattaagtacacacggcccacccatctgagttgcgtgaagcgcaagaccaccgccgccggcggtgagtcagcactggcaccttccgtgttcaagcaggcaaaagataaagtttccgacggcgtgaccaagagcccagaaaagcgaagtagcctgccacgcccctcctctatcctcccacctagaaggggcgttagcggggatagagacgaaaactccttcagcttgaatagtagtatttctagctccgctcgccgcacaacgcgctctgaaccaatacgacgagctggcaaatctggcactagcactccgaccactccgggaagcactgcaattaccccaggcacgcccccgtcttattcaagccgaacccctggcacccctggcacacccagttatcctcggacgccgcacacccctggcacaccaaaaagcgccatcctcgttccatcagaaaagaaagtcgcaatcatccgtacccctcctaagagccctgccacaccaaagcagctgagactcataaatcaacctctgcctgacctgaagaatgtgaagtctaagatcggctctactgacaacatcaaataccagccaaagggcggccaggttcagattgttacgaagaagatagacctgtcccatgtcacttcaaaatgcggaagtctgaagaatattcgccacaggcccggaggcggacgggtcaagattgagtctgtaaaactcgacttcaaggagaaagcacaagcaaaggttggcagcctggataacgctcatcacgtgccgggaggcggaaatgtgaaaattgattctcagaaattgaatttcagagaacacgcgaaggctcgcgtggatcacggagcggagatcatcacccagtcgcctggaagaagcagcgtggctagcccacgacgcctgagcaatgtttccagctccggatctattaacttgcttgagagtcctcagttagccacgctggcagaggatgtgaccgccgcactggctaagcagggactgtag

SEQ ID NO: 195161 - DNA, 2664 bp, synthetic construct
  misc_feature 1..2664: note = Description of Artificial Sequence: Synthetic coding sequence
  source 1..2664: mol_type = other DNA
atggagaccaccggcgaccagggcatcgagggcatggcctacatggatgagaaccgtaacatcacattcacctgtccccgcaccccatctgagcttattaataaaagttcaccccttgaagttttagaatctgctgcttgtgaaaaactgccaacaccgacaccacaggtggtgaaagagggcgattcattcccagacaccctggcgaaaaacgggcaggaaattgcacccgctcaaatttccaaaagtctcatggtcgataactatacgaaagacggggtaccagggcaagagcgtccaaaaggccccagtgcagtggtgcctagcacttcaactggtggagtggccctcccaattacaaccgccattgagactgtcaacattcatggggaccattcactgaaaaataaggctgagcttgcagatagcatgaaaaacgaagccggaatagacgagggccatgtgatcggcgagtctgagagtgtacactccggagccagcaagcacagtgtggagaaggtgacagagttagctaagggacaccttttgcccggtgtgcctgtggaagatcaatccttgcccggcgaagcccgcgcactcgaggggtacgccgacagggggaactttcccgctcaccccgttaacgaagagaaggagaccaaggaaggatctgtggcagtgcaaatacctgatttgttagaggacaaagcccagaaactctcgttttgcgaagatcagaatgcacaagatcgcaacagtaaagggtcagacagtttgaacaaaaaggttgatctcaccttgttgtcaccaaagagtgagaatgataagctgaaagagatctccctggcttgcaaaatcacagaattggagagcgtcagcttgccgacccctgagatacaaagcgatttcctccactctaaggtggaagccccgccgtcagaggttgcagacacccttgtgatcatgacagccagcaagggcgtacgattgcccgaaccaaaggacaaaattcttgagaccccacaaaaaatgacagaaaaatcggaaagcaaaacccccggcgaggggaaaaaagaggacaagtcacgaatggctgaacctatgaagggctacatgcggcctaccaagagcagggggctgaccccgctgctcccaaagagcactatccaggaacaagagcgccataagcaactgaagtctgctggcattgcacgccccgaggagggccgccctgttgtgtctggaacagggaatgacataacaacgcctcctaacaaggaactgccccccagtcctgagaaaaaaactaagcccctggctacaacccagccggctaaaacatccacaagtaaggctaaaactcagcctacatctcttccgaaacagcccgctccaactactataggcggactcaataaaaagccaatgtcactggcctcaggtcttgtacccgcggcccctcccaagcgccctgcggttgccagcgcacgaccatcaattctgccttctaaagacgtcaagcctaagcctattgcagatgccaaagcacccgagaaacgcgccagcccatcaaaacctgcaagtgcacccgccagcaggagcggctcaaagagcacccaaaccgtggcaaaaactactactgcagccgctgtggcaagcacggggccctcatcgcggtccccctctactctgctgcctaagaaaccgaccgctatcaaaaccgaaggcaaaccagccgaggtgaagaagatgactgcaaaaagcgtgcctgctgatctgagtcgacctaaaagtactagtacatcttccatgaagaagaccaccaccctctccggaacagcacccgctgccggtgttgtgccaagccgagtcaaggcgactcccatgccctcacgcccgtcgaccaccccttttatcgataagaagccaacctctgcaaagcccagctccaccactccacgcctctcccgattggcaaccaacaccagtgcaccagaccttaagaacgtgaggagtaaggttgggagcactgagaatatcaagcaccaacccggcggcggaagagctaaggtcgagaaaaagaccgaggccgctgctacgacccgcaaacccgaaagcaacgccgtgaccaagaccgccggacctatcgccagcgctcaaaagcagcccgccggcaaagttcagatagtatccaaaaaagtgagttattcacacatacaatcaaagtgtggaagcaaagataatataaaacacgtgccaggcggtggtaacgtgcagatccagaataaaaaagtagacatctccaaggtcagctcaaagtgcggttctaaagccaacattaagcacaagcctggcggcggggacgtgaaaattgagagccagaaacttaattttaaagagaaggcccaggccaaagtgggatccctggataatgtaggccatttgcctgctggaggcgccgtgaagaccgaaggcggaggatccgaggctccgttgtgcccaggtcccccagccggcgaggagcccgcaatcagcgaagccgctcccgaagcaggggcccccacaagcgccagcggtttgaatggtcacccgaccctaagcggaggcggggaccaacgagaagcccagacattggacagccaaatacaagaaaccagcatttag

SEQ ID NO: 195162 - DNA, 1392 bp, synthetic construct
  misc_feature 1..1392: note = Description of Artificial Sequence: Synthetic coding sequence
  source 1..1392: mol_type = other DNA
atctgcgaggagcccgtggccaagaagcgggaggagctggcccacttctctaattccagttctaattcaggaaaaaaagagctgggaactgcaggattatacctccacagcaagctcgagcagatcccggaggggtcctccaaggagaagggccaggaagactttagtgagaccaggattgattcttgtagccaagtatgccagcgcggagaaaaacagcccggtcagaccgctctggctggtaagaaagagatagaggtcaccgcaactcagagcactccctccttcctgttcgagaagccacctagggatggcatcgcgcggcctgaggaaggccggcccgtggtgagcgggacagggaatgatattaccacccctccaaataaagagctgccaccaagcccagagaagaaaaccaagcctattgccgacgccaaggcccctgagaaaagggctagccctagcaaaccagcctccgcaccagcctcgagaagcggatccaagtccacccagactgtcgcgaagactactactgccgcggcagtagctagcacgggacctagttcccgatccccttctaccctgcttccaaaaaagcccacggcaataaagacagagggcaagcctgccgaagtgaaaaaaatgacggcaaaatccgttccagccgatctttccagacctaaatcaacgagcacatctagtatgaagaagactacaacactctctggcacagctcccgcagccggggttgtccccagcagggtcaaggcaacgccgatgccaagccggccatctactacacctttcattgataaaaagccgactagcgccaaaccgtcctcaactaccccaagactgtcacggttagccactaacacttccgcgccggacctcaagaatgtcaggtccaaggtggggagtaccgaaaatataaagcatcagcccggaggtggtcgtgttcagatcgtctcaaaaaaggtgtcatactcacacatccagtcaaaatgtgggtccaaggacaacataaaacatgttccgggaggcggcaacgtacagatccagaacaaaaaagtggacatcagcaaggtgtcttcgaagtgcggcagtaaggcaaacatcaaacacaaacctggggggggtgacgttaagatcgagagccagaagctcaacttcaaggagaaagcccaggctaaagtcggatcccttgacaacgttggccacctgccggcgggtggtgctgtgaaaatagagacatatcgattgacgttccgcgcgaacgcgagagccaggacggaccacggagcggatatcgtaagcaggcctcctcacttcccaggaggcccaaactcaggctctagagtactcggccctttgtcaagggctgttcactag

SEQ ID NO: 195163 - DNA, 3459 bp, synthetic construct
  misc_feature 1..3459: note = Description of Artificial Sequence: Synthetic coding sequence
  source 1..3459: mol_type = other DNA
atggccgacctgagcctggccgacgccctgaccgagcccagccccgacatagagggtgagatcaagagagacttcatcgccacccttgaagctgaagctttcgacgatgttgtgggcgaaaccgtgggcaagaccgactatatcccactcctggacgtggatgagaagaccgggaacagcgagtccaagaagaagccatgttctgaaacatcccaaatcgaagatacgccatcatcaaagcctaccttactcgcaaacgggggacatggcgtggagggatcggacacaaccgggtcacccacagaatttttagaggagaagatggcttatcaagaataccccaactcacagaactggcccgaggatacaaacttctgctttcagccggagcaggtcgtggacccaatacagacggatcccttcaaaatgtaccacgacgatgatcttgccgatctcgtgttccctagcagcgcaacagctgatacatccatttttgctggccagaacgatcccctgaaagattcatatggtatgagtccctgtaacaccgcagtggtcccacagggttggtcagtggaagccctcaattcaccccatagcgagtcatttgtgagccctgaggctgtggccgagcccccccagcccaccgctgtcccactagagctcgccaaggaaatagagatggcgtccgaggagaggcctcccgcccaggcgttagagatcatgatggggctgaagactaccgacatggccccttccaaagagacagagatggccctagccaaagatatggcactcgcaactaagaccgaggtggctctggccaaagatatggagtcgcccaccaaattggatgtgacactcgctaaagacatgcagccttctatggagagtgacatggctttggtcaaggatatggagcttcctaccgagaaggaggtggctctcgtgaaggacgttcgctggcccaccgagacagatgtctccagcgccaaaaacgtggtcctcccgactgagaccgaggttgcgccagccaaggatgttacgcttctaaaggaaaccgaaagggcctcccccataaagatggacctggccccgtctaaggacatggggccccccaaggaaaacaaaaaagagaccgagagagcatcacctataaagatggatttggcaccgtccaaggacatgggcccaccgaaggagaacaagattgtgcctgctaaggacctggtgcttcttagcgagattgaggtggcccaagccaacgatataatttcttcgacagaaatctctagcgctgaaaaggtggctttaagttccgaaaccgaggtggccttagcccgcgatatgacgctccccccagagacaaatgtcattcttaccaaggataaagcactgccattggaagctgaagtggctcccgtgaaggacatggcccagctgccggaaaccgaaatagcccctgcgaaggacgtggcccctagtacagtaaaagaagtcggcctgctgaaggatatgtcgcccctctctgaaaccgagatggcgttggggaaggatgtcactcctccccctgagacagaggtggtgctcattaaaaacgtgtgccttccacctgaaatggaagtcgcccttaccgaagaccaggtgcctgccctaaagactgaagcacccttggctaaggacggggtgctgaccttagccaataacgtgaccccggccaaggatgttcctcctctgagcgagacggaggctactcccgtgcctatcaaagacatggagattgctcagactcagaaggggattagcgaggatagccacctcgagtccctgcaggacgtcgggcagtccgccgctcccacgttcatgatctcacctgagactgtgacaggcacaggcaagaaatgtagtctgcccgccgaagaggattcagtgcttgaaaaactgggagagaggaaaccctgtaactcccagccaagcgagctgagttcagaaacatctggcatagcccgtccggaggaaggacgccctgtcgtgtctggcaccggcaatgacatcaccacccccccaaataaagaactaccacccagccctgaaaagaaaacgaagcctctggcaaccacacagccggctaaaacctctacatccaaagctaaaactcagcccacctcccttccaaagcaacctgctcctaccaccatcggaggcctgaataagaagccgatgtcattagcctcaggcctggtccctgccgcccctcccaagcgcccagcggtggcgtcggctcgaccttcaattctgcccagtaaagacgtgaaacccaaaccgatcgcagacgcgaaagcccccgagaagagggcatcccccagcaagccagcatctgctcctgcctcacgctccggtagcaagtccactcagaccgtcgcgaagacaaccaccgctgctgcagtagcttccacggggccaagctcccggagtccatccaccctcctgcccaagaagccgacagctataaagacagaagggaaacctgctgaggttaaaaaaatgacagcaaaaagcgttccggctgatctgagcagaccaaagtccactagcacgtcctccatgaagaaaacaacaaccttaagcggtactgccccagcggccggggttgttccgagcagagtgaaagctacccctatgccttctcggcccagcactaccccattcattgataaaaagccaacgtctgcaaaaccaagcagcacaacacctaggctgtctcgattggcgactaatacaagcgccccagatctcaaaaatgtgaggtctaaagtcggttccacagaaaacattaagcaccagcctggcgggggaagggcaaaggtggagaagaaaactgaggcagccgccaccaccagaaagcccgaatctaacgctgtgaccaagacggctggtcctatcgccagtgctcagaagcagcctgcgggcaaagtacagattgtgtcaaagaaggtgtcttattctcatattcagagtaaatgcggctccaaggataacatcaagcatgttcccgggggcgggaatgtgcagatacaaaacaagaaggtggatatcagcaaggtgagctccaaatgcggaagtaaagctaacattaagcataaacctggagggggagatgtgaaaattgagagtcagaagttaaatttcaaggagaaggctcaggcaaaagttgggtcactcgataacgtcggtcatctacctgccggaggtgcagtcaagaccgagggaggggggtccgaagccccgctgtgtccagggcctccggctggggaggagcccgctattagtgaggccgcccccgaagccggagcccccacctccgcaagtggactaaacggccatccaacattgagtggaggcggcgatcaaagagaggcacagacgctagatagtcagatccaggaaacatccatttag

SEQ ID NO: 195164 - DNA, 2139 bp, synthetic construct
  misc_feature 1..2139: note = Description of Artificial Sequence: Synthetic coding sequence
  source 1..2139: mol_type = other DNA
atggagaccaccggcgaccagggcatcgagggcatggcctacatggatgaaaaccggaacatcacgtttacatgtcctagaacccccagcgaacttattaataagtcatcccctctggaggtcctagagagcgcagcctgcgagaagctgcctactcccactccccaggtcgtcaaagaaggagattcctttcctgacacccttgccaaaaatggccaggaaatagctcccgcacagatcagcaaatcccttatggttgataattacacaaaagatggtgtcccaggccaggagagacccaaaggtccttctgcagtggttccatctacctccactggaggggtggccctgcccatcactactgcaatagagacagttaacattcacggcgaccactccctgaaaaataaggcggaacttgcagattcaatgaagaacgaagccggcattgatgaaggccacgtcatcggcgaatcggaaagcgttcattcaggcgccagtaagcactctgtggaaaaggtgaccgaattagcgaaaggtcacctgctcccgggcgttccagtggaggaccaatcacttcctggggaggcccgcgccctggaaggttacgctgacagagggaacttcccagctcaccccgtcaatgaggagaaggaaactaaggagggaagtgtagcggtgcagattcccgatctgctggaggacaaggcgcagaaactctccttctgcgaggatcagaacgcacaagatagaaacagcaagggatcagattccctgaacaaaaaggtggatctgacattactctccccgaaatctgaaaatgacaagctgaaagagatcagtttggcctgtaagatcactgaactggagtccgtctcactgccgaccccagaaattcaatcagatttcttacactccaaagtggaagcccctccttccgaggtcgcagatacccttgtgattatgactgcgagcaagggtgtgaggctgcctgaacccaaagataaaatattggagacgccacagaaaatgaccgaaaagtctgagtcaaaaacgccaggcgaaggaaagaaagaggacaaaagccggatggccgaacccatgaaaggatatatgcggcctaccaagagcagaggcctcacccccctgctgcccaaatcaacaattcaggaacaggagaggcacaaacaactgaaatcggcaggtattgctcggccagaagaaggcaggcctgtggtgagcggtactggcaacgatattaccactccacctaacaaagagcttccgccctctcccgaaaagaaaactaaacctctcgccaccacccagcccgctaagacctctacctccaaagctaaaacacagcccacctctcttcccaagcagcctgccccaacaacgattggcgggcttaataagaagccaatgtctctcgcctctgggctcgtgcctgcagctccccctaaacggccagctgtggcttcagctcgcccatctatattaccttcgaaggacgtcaaacctaagcccattgctgacgcaaaggcgccggaaaaaagggcaagcccttcaaaacctgcttcggcccctgcatcgagatctgggagcaaatcaacccagaccgtggcgaaaacgacaaccgctgccgccgtggcatcgaccggcccctcttcaagatccccttctacactgctcccaaagaagccaaccgccataaaaaccgaaggaaagccagcagaggtgaaaaaaatgaccgcaaagagtgttcctgctgacctcagtcgaccaaaatcaacaagtacaagctccatgaagaagactactaccctgtctgggaccgcccctgctgcaggagtcgtgccctcccgtgtgaaagcaaccccgatgccatctagaccttctactacaccattcattgataagaaaccgaccagcgctaagccgagcagtactacacccaggctctccaggctggctacaaacacctcagcgcctgatcttaaaaacgtgcggtctaaggccaaggtagaaaaaaagaccgaggccgccgctacgactcgcaaaccagagagtaatgctgtgaccaagaccgcaggccccatagcgtccgctcagaaacagccagctgggaaggtatag

SEQ ID NO: 195165 - DNA, 2436 bp, synthetic construct
  misc_feature 1..2436: note = Description of Artificial Sequence: Synthetic coding sequence
  source 1..2436: mol_type = other DNA
atggccgacctgagcctggccgacgccctgaccgagcccagccccgatatcgagggtgagattaagcgtgattttatcgccactctggaagccgaggccttcgacgatgtggtcggggaaaccgtggggaaaaccgattacataccccttttggacgtcgacgagaagaccgggaattcagagtcaaagaaaaaaccctgcagcgagacctctcaaattgaggataccccctcgtctaaaccaacactcctcgccaatggcggccatggtgtcgagggctcagataccacagggagccctactgagttcttagaagagaaaatggcttaccaagaatatcccaattctcaaaattggcccgaagatactaacttttgctttcaaccagaacaggtagttgatcccatacagacagatccattcaaaatgtatcacgacgatgacttggcggacctggtgttcccttcgtccgctacagccgacacctccatctttgccggtcagaacgatcctctgaaagatagctacggtatgtcaccatgcaacaccgccgtagtcccacagggctggagcgttgaagcactcaactcgcctcatagtgaatcatttgttagtcctgaagctgtggccgagcccccgcagcccaccgctgtgcctctggagctggccaaggagattgaaatggcctctgaggagcggccacctgctcaggcactggaaattatgatgggcttaaagaccaccgacatggcccctagcaaggagacggagatggctctcgccaaggatatggcattggccaccaagaccgaagtggccttggcgaaggacatggaatctcccacaaagctcgacgtaaccctcgcaaaggatatgcagccttcaatggaaagtgacatggcacttgtgaaggacatggaactgccaactgagaaggaagtggctctggtgaaagatggcgtgcgccttccagagccaaaggacaagattctggagactcctcagaagatgaccgagaagtctgaaagcaagacacctggcgaaggcaaaaaagaggacaagtcccggatggctgagccaatgaaggggtacatgaggcccactaaatccagggggctcacccccttgctgcccaagagcactatccaggagcaggagagacacaagcagctgaagagtgccggaatcgctaggcccgaggagggcaggcctgttgtatctgggacaggcaatgatatcaccacaccccccaataaggagctgcctccaagtccagaaaagaaaacaaaaccactggctacaacccagccggcgaagacgtctacttcaaaggctaaaactcagcctaccagcctgccaaagcagcccgcgcctacaacaataggcgggttgaacaaaaagccgatgagtctagctagcggcttggtgccagcagcaccaccgaagaggcccgccgtggcgtcagccagacctagcatactccctagtaaggacgtaaaacccaagcccatcgctgatgccaaagctcctgagaaacgcgcctctccctctaagccggccagtgcgcccgccagcagatcggggagcaagagcacccagacagtggctaagactactacagccgccgccgtggcttccacaggaccctcatcaagatctccctccacgctgctgccaaaaaagcccaccgccataaagaccgagggaaagcccgcagaggttaaaaaaatgacagccaaatccgtccccgcggacctaagtcgccctaagtctaccagcacaagttccatgaaaaagacaaccacactttccggaacagctcccgccgcaggtgttgtcccgagccgggttaaagcgacgccgatgccatcacggccaagcacgacacccttcattgacaaaaagcccacaagcgccaaaccatcatccaccaccccaaggttgagtagactcgctaccaatacctccgcccccgatcttaagaacgtgcggtcaaaagtaggttcaactgaaaatattaagcaccaaccaggcggcggacgggtgcagatccaaaataaaaaggtcgatatttccaaggtgtcttcaaagtgcggaagtaaggctaacatcaaacacaagcccggaggcggggatgtcaagattgaatcccaaaagctgaattttaaggagaaggcacaggccaaggttggctcactcgacaacgtagggcaccttcccgccggcggggccgtcaagactgaaggcggtggctctgaggcgccgttgtgcccaggtcctccagcaggagaagaacccgccatatctgaggctgcacctgaggcaggcgccccgacctctgctagtggtcttaatggtcatcctaccttgtctggcggcggcgatcaacgggaagcccaaacattggactcacagattcaggagacgtccatttag

SEQ ID NO: 195166 - DNA, 3408 bp, synthetic construct
  misc_feature 1..3408: note = Description of Artificial Sequence: Synthetic coding sequence
  source 1..3408: mol_type = other DNA
atggccgacctgagcctggccgacgccctgaccgagcccagccccgacattgagggcgagattaagcgcgactttatcgccaccctggaggccgaagcctttgacgacgtggtgggcgagacggttgggaagaccgattacatcccgttgctggatgtggacgagaagacgggaaattcggagtcgaaaaagaagccatgctcagaaacgtcacagattgaagacacgccgagtagcaaacccacgttattggccaacggcgggcacggtgtggagggcagcgacaccactgggagcccaactgaatttcttgaggagaagatggcttaccaggagtatcctaactcacagaattggccggaagataccaacttttgctttcagccggagcaagtggtggaccccattcagactgatcccttcaaaatgtaccatgatgacgatctcgcggacttggtcttcccttcctcagccactgctgacacgtccatcttcgctggacaaaatgacccactcaaagattcttacgggatgagcccatgtaacactgccgtcgtccctcagggttggtctgttgaggcgctaaattcaccccactccgagtcttttgtgtcccctgaagccgtcgccgagcctcctcaacccacagccgtgccccttgaactcgcgaaagagattgagatggcttctgaggagcgccccccagcacaggcactcgaaataatgatggggctgaagaccaccgacatggccccatccaaggaaaccgagatggctcttgccaaggacatggccctcgccacgaagaccgaggtggctctggcgaaagacatggaatcacccactaaactggatgtaacccttgctaaggacatgcagccctcaatggaatccgacatggccctggtcaaggatatggagctcccaaccgagaaggaagttgcactagtaaaggacgtacgatggcctaccgaaaccgacgtcagtagtgccaagaatgttgtgcttcccaccgaaacagaagtagcccctgccaaagacgtgactctgctgaaggagacagagcgggccagcccgattaagatggacctggccccatctaaagacatgggaccacctaaagagaataagaaagagacagaaagagcttctcccataaagatggatctggccccctccaaggacatgggtcctcccaaggagaacaaaatagtgcctgccaaggacctggtgctgctgtctgaaatcgaagttgcccaagctaatgatattatatcaagcactgagatctctagcgccgagaaggtggccctgagcagcgagaccgaagtggctctcgctagagatatgacactgccacccgagaccaacgttatcttaacgaaagacaaggctctgcccctggaagcggaggtcgcgcccgtgaaggacatggcccagttacccgagaccgaaatagcgccggctaaggatgtggctccatccaccgtgaaggaggtgggcctcctcaaagatatgtctcctctgtcagagaccgaaatggccctcgggaaggacgtgaccccacctcccgaaacggaagtcgtgcttatcaagaatgtgtgtctgccaccggaaatggaagtggcattgacagaagaccaggttccagccctgaagactgaagcccccctcgctaaggacggtgtcttgactctcgctaacaatgtcacacccgccaaggatgttccccctttatcggagactgaggctacccctgtcccaataaaggatatggaaattgctcagacacagaaagggatttctgaagacagtcacctggagagcctgcaggatgtcggccagtcggcagctccaacatttatgataagcccggaaacggtcaccggcactggcaaaaagtgttcgctacccgccgaggaggacagcgtgcttgagaaactgggcgaaaggaagccgtgtaacagccaaccgtccgagctgtcttcagaaacatccggcatcgctcgccccgaagaggggcgacccgtcgtcagtgggactgggaacgatatcactacacctcccaacaaagaattaccaccgagccctgagaaaaagactaaacctctcgccactacacagcccgctaagacttcgacaagcaaggcaaaaactcagcccacctctttgcctaagcagcctgcccccactacaatcggtgggctgaataagaaacctatgtctctggcttccgggttagtgcctgccgcccctccaaaaagacctgccgtggcatccgctcgtccatctatactcccatccaaggatgtgaaacctaagcccattgcagacgccaaggctcccgaaaaaagagccagccccagcaagcccgccagcgccccagcgtctaggagcggctcaaaaagcacacagaccgtggctaaaaccaccacagccgccgcggtggcctccaccgggccctcaagccgatccccttccaccctgttgcccaaaaaacccaccgccatcaaaacagagggtaagccagccgaggtgaaaaagatgacagccaagagcgtgccagccgaccttagccgcccaaaatccacttccacatcttccatgaagaagactaccaccctgagtgggacagcccccgcggccggagttgttcccagccgagttaaagccacccccatgccatcccgcccttctaccacaccctttattgataagaagcccacatctgccaaaccatcaagtaccaccccgcgactgagcaggcttgcaactaacacttctgccccagatcttaagaatgtaagatcaaaggtgggcagtaccgagaacattaagcatcagcccggaggcgggcgcgcaaaagttgagaagaagaccgaggccgctgccaccacaaggaaacctgaatctaacgctgtgactaagaccgccggacccatcgcctctgcccagaagcagccagccggtaaggttcagatcgtgtctaagaaagtaagttacagccacattcaaagtaagtgcgggtctaaggataatatcaagcacgtacccggcgggggtaatgtccagatccagaataaaaaggtggacattagtaaggtgtcctctaaatgcggttccaaagccaacatcaagcataagcccggtggcggtgacgtcaagatcgagtcgcagaaactgaatttcaaggagaaagcccaagccaaggtaggaagcctcgacaatgtgggtcatttacccgctggcggagctgtgaagattgagacgtaccggctcacctttagagctaatgcccgcgcgcggacagatcacggagcagacattgtgagtcgcccccctcactttcccggcggaccaaattccggttcccgggtgctgggacctctctctcgggctgttcactag

SEQ ID NO: 195167 - DNA, 2487 bp, synthetic construct
  misc_feature 1..2487: note = Description of Artificial Sequence: Synthetic coding sequence
  source 1..2487: mol_type = other DNA
atgagcctgagcgacaagcagaccgccagcctgaccgccgcctacggacagctgtccaagggaaaacccgccgagtgtagaatggatagtccaaaggaaattagccaggccgggttcgagtggcagaggacagaaggaaagctcaatgagatcggcctgaatgtgtcgatggatggccaaccaaaggatggattggttaagaacgcctcctttctggagcagaataaactgtgtttctttgaaggcaaactggacaaagagctaagcatcgagatgcaagacaaggattgccaggaagcctcgggacatctggagtcccgctacgtgatctctgagacttgccatccgcttgagggcaattccgtgcaccagaaaacctcagagttccatctgggcctgatagagggccctgacaaaaacaagaccatacctgtgcaagggaaggtggctgggaagaacggtctggagacaaagtctcaatcagacctggattttcctggggctgctgatatccccactaggtacgtgaaagaacaggaaacaagcgtttggaatccttcttttcatcctgtcgcacagggatcactcggttcaagagaagcaacgcccggggaaatggagaactctataaccccaggctgccccgtcataggcgttgtgaacgataactcagaacagctcaagtgcgaatccccactgttagtcagcctggcacatcccgctcctattatagagcattcacctacaactattcctccaataaccatggtgtttacccaagagcacttaaatgcctcatgccatatacgcgaccacgacaaagaactcgaaaagctgagtagcacagaggaagccgtcctgaatcaggctccccagcaaaagaaggccgtgcggagggctctctctgagtgctcacatctctcagtgcccccagcagtcaatctggccgataagtatccggaactcccagcgagggaagaaccgtctagcggcctcttaccccctccgagcagcccgatgccttcacctacgcccggtaaactgggcgcacccgcgatgaaacggagcatgacagtgggtgaagagcagactgccagctacaaactgtctcctgggaaacttcctatactatctaccaaggagatcccgcccttcatttgcgaggagccagttgctaagaagagggaggaacttgctcatttctctaattcctcatccaattctggaaaaaaagaactgggcaccgccggattatacctacattctaaactggagcagatccccgaaggtagctccaaagaaaaaggtcaggaggactttagcgagactcgtatcgacagttgctcccaggtgtgccaacgcggagagaaacagccaggacagacagctctagccggtaagaaagaaatcgaagttactgctacacaatcgactccatcttttctttttgaaaagcctcccagagacggcatcgcccggccagaggagggccgtccagtcgtgtcaggcacgggaaatgatattaccacccctccaaacaaggagctgcccccctcaccagaaaagaagaccaaaccaattgcagatgctaaggcacccgaaaagcgcgccagcccatcaaaaccagccagcgctcctgcctcgagatccggcagtaagagcacgcagactgttgcaaaaaccactacagccgccgctgtggcgtctaccggacctagcagccggtccccctccactctgcttcctaagaaacctacagctgatctgagcagaccaaaatccacatctacatcaagtatgaaaaagactacgaccctgtcaggcaccgccccggccgctggtgtggttccgagcagagttaaggctactccaatgccctctcgcccttctaccactccttttatcgataaaaaacctacttcggccaagcccagcagcaccacaccccgactgagcaggttggccactaatacctcggcacccgacctgaaaaatgttaggtctaaggtgggatcgacagagaacatcaagcaccagcctggtgggggcagggtgcagatagtaagcaagaaggttagttactctcatatacagtctaaatgcggatccaaggacaacatcaaacatgttcccggaggcggaaatgtgcagatccagaataagaaagtggacatttccaaggtcagctccaagtgcgggtcaaaagcaaatattaagcacaagccagggggcggggatgttaagattgagagccagaagttgaatttcaaggaaaaggcccaagctaaggtaggctccctcgacaacgtgggccaccttccagctggtggggccgtgaagattgaaacctatcggctcacgtttagagccaacgcccgcgcacgcacggaccatggtgccgatatcgtgtcgagacccccacattttcccggcggacctaattcaggcagtcgtgtgctggggcccctttcccgtgcagtccattag

SEQ ID NO: 195168 - DNA, 6894 bp, synthetic construct
  misc_feature 1..6894: note = Description of Artificial Sequence: Synthetic coding sequence
  source 1..6894: mol_type = other DNA
atggccgacctgagcctggccgacgccctgaccgagcccagccccgatattgagggcgagattaagcgagattttatcgccaccttggaggcagaggcctttgacgacgtggtgggggagacagtcgggaagacagattacatccccctgctggatgtggacgagaagacagggaatagcgagtctaagaaaaaaccctgcagcgagacgtcccagattgaggacctcccccttcccccgcatcccgcaagcctttccttccatctgccacttgataccccttcctccaagccaacattgctagctaatggaggccatggggtagagggtagcgatactaccgggtctcctactgaattcctggaagaaaaaatggcgtatcaggaatatcctaacagccagaattggcctgaggacacgaacttctgttttcagcccgagcaagtggtggacccaatccagaccgacccttttaagatgtatcacgacgacgacctcgctgatcttgtcttcccctcctcagcaactgccgacacaagcatcttcgctgggcagaatgaccctcttaaagatagctacggtatgtcaccctgtaacaccgctgtggtaccccagggctggagcgtcgaggcgctaaatagtccacactccgagtcctttgtgtcccctgaagctgtagccgaacctccacagcctacagcagtgccgctggagctggccaaagaaatcgagatggcttctgaggaacgccctcccgctcaggccctggagatcatgatgggcctgaaaaccacagacatggccccttcaaaagagaccgagatggccctcgccaaggatatggcccttgccaccaagacggaagtggccctcgcgaaggacatggaatccccgacgaaactggatgtgacgttagctaaggacatgcaaccctctatggaaagcgatatggcactggtgaaggacatggagctccctaccgaaaaggaggttgccttagtcaaagacgtccgttggcccacagagaccgacgtgtcctctgccaaaaacgtggtcctgccaaccgaaacagaagtcgctccagcgaaagacgtcacacttctcaaagaaacagaacgagcgtcgcctataaaaatggacctggcgccttccaaggatatggggccgcctaaggagaataagaaagagacagaaagggcctcgcctatcaaaatggacttggccccctccaaagacatgggccctcctaaagagaacaaaattgttccagccaaagacctagtcttactgagtgaaattgaggtagcccaagccaacgacatcatatcaagcacagagatttccagcgctgaaaaggtagccctttccagtgagacggaagtcgctctggcacgggacatgacgctcccccctgagacgaatgtcatccttactaaggataaggcattgcctctggaagccgaggtggcaccggttaaggacatggcccagctccctgaaacagaaatcgccccagcgaaggatgtcgcaccaagcactgtcaaggaggtaggtctcttgaaagacatgtccccactctccgagacagaaatggctctgggaaaagatgtcacccctcctcctgagacagaggtcgtgctgatcaagaacgtgtgcctgccgcctgagatggaggtggcactcacagaagaccaggtacccgcgctcaaaactgaagcccccctggccaaggatggcgtccttacccttgccaataatgtgacaccggccaaagacgtaccacccctctccgagacagaagccactccagtgccaatcaaggatatggagattgcccaaacgcagaaaggaatatcagaggacagtcatctcgaatcactgcaagacgttggtcagtcagcagctcctacgttcatgattagccctgaaaccgttaccggcacgggaaagaaatgctcactgcctgccgaggaggactcagtactagagaaactgggtgagagaaagccttgtaatagccaaccgtctgaactttcgagcgagaccagcgctaacttcatgtactgcggcacaccgccaacccaagcaaaacaagtgtgccggccctccgacaggcggagcacccgaccaaaacctgcccgggtgccccccgagctgctcggcggttcccccccgtggaagactttagaccacaggctcgggcattgttctctttccgagtctggctgggtttccggttcatcatcttgtggtggacctggcaaccagcggaagagtattcatgtggactctctcgagccccagagagatctcggtcgggaggcctgggacattgagagcacaccgatcatgatgaagaagaagaagaagaaaccaaagcagaagcgatacagccagccccgcgctggtgggccctcggatgacgacaacgctgataagcccaaggggcacccatttgccgcggatacccagaagtcaggggtcctccctagtcagcctaccacgatggggactgaatacggcctggtatccggcgaaaacctgaagcgcgaatgcctggtgaattcctccgctgcgcgcctggtggccgagaactttgtcagcgagtccctgagaatacccttgtatccaagtgaagaagcccccaagaccgccatttcctcacagtccaagctgagggtggaagaagaatccaaatccaataagagcgtcctacagaaccaggacaaaaaactgctcaaacagcatgagtacaaaccacagcccgctccccatctgaagactcccgtcgataaatctcagtcagtggggcctcttaacctgaagggtccactagcagaggtgtcagcatataacgtggagacacctctggacattcggttaaaggagggctgtagtccttttttggaccaggaggtgatgggagtggtcagcaaaccgaccgctgcaaaagagatccccaatttggtgccaacacttattgcttcaaatcctctggaatgcaacctgaaggaggggaataatgaatcgaagatgacaaagctccagaatgttaaactgaaagaattcccggaaggcgccgaagaggataaagagctcaagaaggaggccttccctaacgaaagacaggagattagtattttcacctcagaacagctgcagggacaggtgctggtgcaggtccctggcgtcgaaaatgaaccatttaaacggatggctggcgacggcaagtctagaaagggtagaggatcctcaggtaagatgaggacagattcaggtaaagtaaaagctaaatcggagctcccctttttattggactcacagaaagatggcagggcagtcctgattcccagcgaacctgtctctaaaaccgagggaatgaccacacaagataaatcagaagagctagggctaaactcaagcaagcaaccagggaccaaggccgacctgactgaggctgtggttatgggggaacctaaggagatgacgcaaccaaaagtggcgggcaccatgcaagctctcattcccctagagagcggttcaggtatgacacagacatcaggcgtcagcaccgagactggcgacgtcgtaaaggatatgggggtcaataatcaaagcaaagagggccgttgcccatggaaagaccatgaagcagccccttggatttcagaaaagccaaagaagcgcggaaacgaaggcaaatccaagaaattcaagaataattacagcacgcagcctgctagaatggagcggaaggaggaaatcctgaatccacctttcgagggtaaggacggagatactggctccatcccacacaaatctaaagagatcggcttcacttttcctaaaatgcatgattcctcattctcacacactcctgataccccgacggtcgaggccgtcgaccgcaaggggggcaacttccaggtgaactttgttgagttaggaacattgggagagaataaaattagtactgtgaaagcatctaccgtcactgagccacccgccaaagtgactgacgtgtcctgccaagagcagatacagggggcgggcttcgtgccatctgtggtgagcgaagaaaacaagacggatgcagctaataggtatacggctgtggcagacaaaccctccaagcgcagcaatgatggcaagtctaagaaagtcaagaattcttctcctgagaagcacatactggagaacaaaattgacgcgactaagatccatgtgcctatggaaacaactggtgatcagggaatcgaaggtatggcttacatggacgaaaatcggaatatcactttcacatgcccaagaactccatctgagctgattaataaatcctcaccgttagaagtgctggagagcgccgcatgcgaaaagctaccgaccccaacaccccaggtggtgaaagagggagattccttcccggacacccttgcgaagaacgggcaggaaatcgccccagctcagatctctaaatctctgatggtggataactatacgaaagacggggtgcccggccaagagcgacccaaagggcccagtgcagtagtgcccagtacgagcaccgggggggttgccctcccaattactacagcaatcgagacagtaaacatccacggagaccactctcttaaaaacaaagctgagcttgccgactccatgaaaaatgaggccgggattgacgagggacatgtgatcggggaaagcgagagcgtccactctggcgcctctaaacattctgtggagaaagtcacagaactggctaaaggtcacctgctcccgggagtgcctgtggaggaccagagtctgccaggcgaggcgcgagcactggagggatacgccgaccgtgggaactttcccgcccaccctgtcaatgaggaaaaggaaactaaggaaggctcagtggccgtgcaaatcccagacctgctggaggacaaagcccagaagttgtccttttgtgaggaccagaacgcccaggacagaaattcgaagggttccgactcactaaacaaaaaggtagatcttaccctgctgagccccaaatccgaaaacgacaagctaaaggaaatcagcctcgcctgcaaaatcactgagctcgagtctgtttcactccccacacctgagattcagagcgacttcctgcattcaaaggttgaagccccccccagtgaggtggcggataccctggtgatcatgacagcttccaagggggtccgccttcccgagcccaaggacaaaattcttgaaactcctcagaagatgaccgaaaaaagcgaatcgaagacccccggtgagggaaaaaaggaagacaagagtcgcatggctgagcccatgaagggttatatgagacctactaaatcaagaggactgacccccctgctgccaaaatcgaccatccaggagcaggaaagacacaaacagctgaaatcagccgggattgcgcgccccgaggaaggtcgccctgtcgtgtctggaaccggtaacgacataaccacacccccaaacaaggagctgccaccctctcccgagaagaaaacgaagccgctagctacgactcagcctgccaagacttccactagcaaggccaagacacagcccaccagtctgcccaaacagcctgctccgactacaatcggtggcctgaacaagaagcctatgagcctggcctcgggccttgtccccgcagcaccccccaaacggcctgcagtggcctcagccagaccatctatcctaccaagcaaagatgtgaaaccaaagccaatagccgacgctaaggcccccgaaaaacgcgcctccccttccaaacccgcttctgcacctgcatctcggtcgggctctaaatctacacaaaccgtcgccaagaccaccaccgcagcggcggtcgcgtcaaccgggccgagctctaggagtccatctacccttcttcctaaaaaacccaccgccatcaagactgaagggaagcccgctgaggtgaagaaaatgaccgctaagtctgtccctgctgacctcagtcggcctaaatctacgagcacgagcagcatgaagaaaacaacaacactgagtggaactgccccagcggccggggtcgttccttcgcgtgtgaaggcaacccctatgccgagtcgcccctctactacgcctttcatcgacaagaagcctacatccgcaaaaccctcaagcactaccccgagactgtcccgcctcgcgacaaacacttccgcccctgacctgaaaaacgttaggtcaaaagtcggctcaacagaaaatatcaaacaccagcctgggggcggccgcgctaaagtcgagaaaaagacagaggccgccgccaccacaaggaagcctgagtccaacgctgtaactaagactgccggaccaatcgccagcgcccagaagcaaccggccggcaaagtgcagattgtgagcaagaaggtgagctactcacatatccagtctaaatgtgggagcaaagacaacatcaaacacgtccctggaggtggtaacgtgcaaattcagaacaagaaggtcgacatctcaaaggtgtcttctaaatgcggaagcaaggcgaacattaaacacaagccgggcggaggtgacgtaaagatcgagagtcagaaactcaacttcaaggagaaggcacaagccaaagtggggagcttagacaacgtcgggcatctgccggctgggggggcagtcaaaaccgagggggggggctccgaggcccctctgtgcccgggccctccggctggagaggaacctgcaatctccgaggcagcaccggaggccggagcccccacctccgctagcgggctcaacggccatccaacgctctccggaggaggcgaccagagagaggctcagaccctggacagccagattcaagagacttctatttag

SEQ ID NO: 195169 - DNA, 750 bp, synthetic construct
  misc_feature 1..750: note = Description of Artificial Sequence: Synthetic coding sequence
  source 1..750: mol_type = other DNA
atgaccgccaagagcgtgcccgccgacctgagccggcccaagagcacgagcacaagtagtatgaaaaagactacaaccctcagtgggaccgccccggctgcaggggtcgttcctagtagagtgaaggcaactcctatgccctccagaccttccactacgcccttcatcgataagaagcctacatccgcaaagccctcgtccacaaccccccgcttgtccagactcgccacaaacacctctgcgcctgaccttaagaacgtgaggtctaaagtcggctccaccgaaaatattaagcatcaacctggcggtggcagagtacaaatcgtgtctaaaaaggtgtcctattcccacattcagagcaagtgcgggtcaaaagacaacatcaaacacgtgccaggcgggggcaatgtgcagatacaaaataagaaggttgacatttctaaggtctcctccaaatgcggctccaaggctaacattaaacacaaacccggaggaggggacgtaaaaatcgaatcacaaaagctcaactttaaggaaaaagcacaggcaaaagttggctctttggataatgtgggtcaccttcccgcgggaggtgcagtgaagattgaaacgtacaggctgacatttagggccaatgcacgggcacggactgaccacggcgcagatattgtgagccgccctcctcacttccccggcggacccaacagcggttctcgagtgctcggacctctatcccgggccgtgcactag

SEQ ID NO: 195170 - DNA, 300 bp, synthetic construct
  misc_feature 1..300: note = Description of Artificial Sequence: Synthetic coding sequence
  source 1..300: mol_type = other DNA
atggccgacctgagcctggccgacgccctgaccgagcccagccccgacattgaaggagagataaagcgggactttattgctactctcgaggccgaggctttcgacgacgtagtcggagagaccgtcgggaagaccgattacattcctcttctggacgttgatgaaaaaacgggcaattccgagtcgaagaagaaaccctgctctgaaaccagccaaattgaggacacacctagttctaagccaactctgctggctaatggcgggcacggagtcgaagggagcgacaccactgaggcctag

SEQ ID NO: 195171 - DNA, 2277 bp, synthetic construct
  misc_feature 1..2277: note = Description of Artificial Sequence: Synthetic coding sequence
  source 1..2277: mol_type = other DNA
atggccgagccccggcaggagttcgaggtgatggaggaccacgccggtacatatggattgggagacagaaaggaccagggcggttacaccatgcaccaagatcaagagggcgatacagatgcaggactgaaagagtctccactgcagacccccacggaagacggcagtgaggagccagggtcagagacctccgacgcaaaatctactcccaccgccgaagacgtgactgcaccattggtcgacgaaggggcaccaggtaagcaggcagccgcccagcctcatactgaaattcctgaggggaccactgccgaagaggccggcataggggatactcccagtttggaggacgaagctgctggtcacgtcactcaggagccagaaagcggtaaggtcgtgcaggagggttttctacgggaacctggaccaccaggcctgtctcatcaactcatgagcggaatgccaggagctcctttattgcccgagggaccccgcgaggccacgcggcagcccagcggcactggacctgaagataccgagggcgggcgccacgctcccgagctgctcaagcaccaactgttgggagacttgcaccaggagggaccccccctgaagggcgcagggggaaaagagaggccggggagcaaggaagaggtggatgaggacagagatgtggatgaatcctctcctcaggactcacctcccagtaaggcgagcccagcacaggatggccgaccccctcagacggctgccagggaagccacctcaattccaggtttccccgcagagggagcaatccctctgcccgtcgactttctcagcaaagttagcactgaaatccctgcatcagagccagacggccctagcgtgggtagagccaagggacaggatgcacctctggagttcaccttccacgtagagattacacctaatgtgcagaaggagcaggcccattcagaagagcatttggggagagccgccttccccggggcgccgggtgaagggccagaggctagaggacccagcctgggagaggataccaaagaggccgatctgcccgagccatccgaaaagcagcctgccgcggcgccgaggggaaagcccgtaagccgggtgcctcagctaaaggcccgcatggtttcgaagtctaaggacggaaccggaagcgacgataagaaagcaaagaccagcacacgatctagtgcaaaaacattgaaaaatagaccatgccttagcccgaagcaccccacaccaggctccagtgaccctctcatccaaccaagctcacctgccgtgtgcccagagccgccatctagccccaagtacgtctcgtcagtcaccagcaggacagggagcagtggggctaaggagatgaagctgaaaggcgcagatggaaagaccaaaattgcaaccccacgcggcgccgcgcctcctggacagaagggccaggctaatgccacgcggatccccgcaaaaacgccacccgcccccaaaacaccacctagtagtggagaaccccctaagtccggtgatcgctctggctactcctcgcccggtagccccggtacacccgggagtcgctctcgcacaccttcactgccgaccccccccacgcgcgagcccaagaaggttgccgtcgttcggacgcctcctaaaagtcccagctctgccaagagtcggctgcagacagccccagtccctatgccagacctgaaaaacgttaaaagcaaaatagggagtactgagaatctaaaacatcagcccggaggcgggaaggttcaaattatcaataaaaagcttgacctttcgaacgtgcaaagcaagtgtgggagtaaagataatataaagcatgtgcccggggggggctcggtacaaattgtgtataaaccagtggacctcagcaaagtcacttcaaaatgtggttcactgggcaatatacatcacaagccgggtggcggacaggtggaagtgaaatcagagaaattagactttaaggaccgagtccagtccaaaatcggctccttagacaatataacccatgtgcctggagggggaaacaaaaaaattgaaacccataaacttacctttcgtgagaacgccaaggcaaagacggaccacggggctgaaatagtttacaaatccccggtcgtgagcggcgatacaagtcctagacacttgtctaacgtgtcttccactggatctatcgacatggttgacagcccccagctggccactctcgctgacgaggtgagcgcgtcccttgcaaagcaaggtctgtag

SEQ ID NO: 195172 - DNA, 1152 bp, synthetic construct
  misc_feature 1..1152: note = Description of Artificial Sequence: Synthetic coding sequence
  source 1..1152: mol_type = other DNA
atggccgagccccggcaggagttcgaggtgatggaggaccacgccggaacctatgggcttggagaccgcaaagaccagggcggttatacaatgcatcaagatcaagagggcgataccgatgccggattgaaggccgaggaggcagggatcggtgacactccgtccctggaagatgaagccgccggacacgtgacccaggcacgcatggtgtccaagtcaaaggatggtactgggtccgacgataaaaaggccaaaggcgcagatggcaaaactaagatcgctactccacgcggggccgcccctcctggccagaagggccaggccaacgccacaaggatcccagcgaagacccctcctgctcctaagacaccaccatcttccggcgaacctccaaagagcggggatcgaagtggatattcctctcccgggtcacccggcacccccggcagccgctccagaactccaagcctgcctactccacccacccgcgaaccaaagaaagtcgcagttgtacgtaccccacccaagtccccttcgagtgcaaaaagtcgacttcagacagctccggttccaatgcctgatctgaagaacgttaaatccaagatcggcagcactgaaaatctgaaacaccagcccggggggggaaaagtacaaataataaataaaaaactggacctgtccaacgtccaatccaagtgcggaagcaaagacaacattaaacacgttcccggcggaggctcagtacagatcgtttacaagcctgtggatctgtccaaagttactagtaaatgcggcagcctaggtaacatacatcataagccaggcggcggccaagtggaagtgaagtctgagaagttggattttaaagaccgagtgcagtcgaaaatcggaagtctcgacaacatcactcatgtgccagggggcgggaacaaaaaaatcgaaacacacaaacttacctttcgtgagaatgccaaggcaaaaaccgaccatggagccgagatagtgtataagtcgcccgtggtatccggcgacacatcacctcggcacttatccaacgtctcatcaacaggatctatcgatatggtcgatagcccccagctggctactctggctgatgaagttagtgcttcgcttgctaagcagggcctgtag

SEQ ID NO: 195173 - DNA, 1239 bp, synthetic construct
  misc_feature 1..1239: note = Description of Artificial Sequence: Synthetic coding sequence
  source 1..1239: mol_type = other DNA
atggccgagccccggcaggagttcgaggtgatggaggaccacgccggcacctacggactcggcgatagaaaagaccaggggggctacactatgcaccaggatcaggagggcgacaccgatgctggattgaaggagtcgccactacaaacccctactgaagatggtagcgaggagcctggcagtgaaacctcagatgctaagtccactccaacggctgaagcggaagaggctggaatcggggacacaccctccctagaggacgaggcagccggacacgttacacaggccagaatggttagcaaatcaaaagatgggaccggcagcgacgacaagaaagcaaagggcgctgacggcaagactaaaattgccacccccaggggagcagccccgcctgggcaaaaagggcaggcaaacgcaacacggattccagccaaaactcccccagccccgaaaaccccccctagctccggagagccaccgaagtctggagatcgatcagggtacagtagtccgggctccccagggactcccgggtctcgatcgaggaccccctctctgcccacgccacctacaagagagccaaagaaggtcgctgtagtgcgcactccgccaaaaagcccttcctccgccaagagtcggctgcagacggcgcccgtccctatgcctgatctcaagaacgtaaaaagcaagatcggatctaccgagaatctaaagcaccaaccaggaggcggtaaggtgcaaatcatcaataaaaagttggacctaagcaacgtacaatcaaaatgtggcagcaaagacaacattaagcatgtaccagggggaggaagcgtccagattgtgtataagcctgtggacctgtcaaaagtgacctcaaagtgtgggtcccttgggaacattcaccacaagccaggcggaggtcaagtggaggtgaaatcagagaaactcgatttcaaggaccgcgtccagtccaaaatcggcagcctcgacaatataacacacgtgcccggaggaggtaataagaagatcgagacgcacaagttgacatttcgagaaaacgccaaggccaagaccgatcatggtgccgaaattgtgtacaagtctcctgtggtcagtggagatacgtcccccagacacttgagcaacgtgtctagcacgggaagcatcgacatggttgattcaccacagctggccaccctggctgacgaggtgtctgcttctctcgctaaacaaggtctgtag

SEQ ID NO: 195174 - DNA, 2331 bp, synthetic construct
  misc_feature 1..2331: note = Description of Artificial Sequence: Synthetic coding sequence
  source 1..2331: mol_type = other DNA
atggccgagccccggcaggagttcgaggtgatggaggaccacgccggtacatatgggcttggcgaccgtaaggaccagggcggctatacaatgcaccaggatcaggagggcgatacggacgcaggcttgaaggaatctccattgcaaacaccaacggaggatgggagcgaggagcccggctcggagacatctgatgccaaaagcacaccaacagctgaggacgtcaccgccccgctggtggacgagggtgctccaggtaagcaagccgccgctcagccacatactgagatccctgaaggaacgacagctgaggaggccggcattggtgacacgccgtccttggaggacgaagctgccggccacgtgacccaggaaccagaatcaggtaaggtcgtgcaggagggtttcctccgcgaacctggcccgcctgggctgtctcaccaactcatgagcggcatgccaggcgcgcctctgctgcccgagggccctcgcgaagctactagacagccgtctggaacaggaccagaggatactgaggggggtcgacatgcaccagaactgctgaaacatcagttactcggcgaccttcaccaggaagggccaccactgaaaggagctggaggcaaagagcgacccggaagtaaggaggaagttgatgaggatcgagatgtcgacgagtcatctccccaggactcacctccatcaaaagcctcccccgcgcaagatggccgaccaccgcagacagcagcaagagaggccacgagcatcccaggtttcccagctgaaggcgcgatcccccttcccgtggattttctgtcaaaggtgtctacggagatcccggcaagcgagccagatggcccaagcgttggccgggcaaagggacaggacgcgcctctcgagtttacatttcacgtggagattacaccaaatgttcagaaggagcaggcgcattctgaggaacacctggggcgggctgctttcccaggtgcgccaggcgaaggccctgaagctaggggcccatctctgggggaagatactaaagaggcagatctgccggagccttctgaaaaacagcccgccgcggccccaaggggaaagcctgtctccagagttcctcagctgaaggctaggatggtatctaagtccaaggatggaaccggcagcgacgataagaaggctaaaaccagcactagaagtagcgctaaaacactgaaaaaccgtccctgccttagtccaaaacatcctacaccaggatcgtccgatcccctcatccaaccatcctcaccagcagtgtgccctgaaccaccatcctcaccgaaatacgtctcgtcggtgacatccagaaccggctcttctggcgccaaagagatgaagttgaagggggctgacggaaaaacaaaaatagccacccctcggggggcggccccaccgggacagaagggacaagcgaatgctactcggattccggccaaaactccgcccgccccaaagacaccaccaagctccgccaccaaacaggtccagcggagaccaccccctgcaggacctagatctgagcgtggtgagccccccaaatctggagatcgcagtggctattcctccccaggctcccccggcaccccgggcagccgttccaggactccttctttgcctaccccgcccacccgcgagccaaagaaggtcgccgttgtcagaacccctcctaagagcccctcctccgctaaatcgcggctccagacagcccccgtgcctatgccagacctgaagaatgtgaaatccaagatcgggtccaccgagaatctgaagcaccagcccggcggagggaaagtgcagattataaacaaaaagctggacctgtcaaacgtacagagcaagtgtggaagcaaagacaacattaaacatgtcccaggaggaggctcagtgcagatcgtctacaaaccagtggatttatctaaggtcacctccaaatgcggcagtctcggaaatattcaccataaacccggggggggccaggtggaggttaagtccgaaaagctggattttaaggatagggtgcagtccaagatcggttcattggataacattacccacgttcccgggggcggtaataaaaagatcgagactcataagctaaccttcagggaaaacgctaaagccaaaactgaccacggcgcagaaatcgtttacaaatccccagtggtaagtggagatacatcccctcgccatttgtcaaatgtctcttcaaccggatctatagatatggtggactctcctcagctagcgaccctggccgacgaagtaagcgcatcactcgccaagcaaggactatag

SEQ ID NO: 195175 - DNA, 951 bp, synthetic construct
  misc_feature 1..951: note = Description of Artificial Sequence: Synthetic coding sequence
  source 1..951: mol_type = other DNA
atgctgcgggccctgcagcagcggaagcgggaggccggcatcggcgacacaccttctctcgaggatgaagctgcggggcacgttacacaagcacgcatggtgagcaagtctaaagacggaaccggcagtgacgacaagaaagcgaaaggagcggatggaaaaacgaagatcgccacgccccgaggggcggctcctcccgggcagaagggacaggcaaacgcgacgcgaataccagcaaagactcctcccgccccaaaaacccctcccagttcaggtgagccccccaaaagtggtgatcgctccggctattctagccctggcagcccgggaactcccgggagccgaagccgaaccccatctctccccacgcctcctacacgcgagcccaagaaagtggcagtggtacgcacacctccaaagtccccaagttctgctaagtcaagactgcaaacggcccctgtgcctatgcctgatctcaagaatgtaaaatccaaaatcgggagtaccgaaaatctaaagcatcagccaggaggcggcaaagttcagatagtgtacaagcctgttgatctgtctaaggtgacatccaagtgcggtagcctcgggaacatacatcacaagcccggaggcggccaggtggaggttaagagtgagaagctcgatttcaaagaccgtgtccaaagtaaaattggaagtttggacaacattacacacgtgccaggtggtggaaacaagaaaattgaaactcataagcttactttcagagaaaacgccaaagctaagacagatcatggcgccgagattgtttataagtctcctgtggtctccggtgacacaagccccaggcatcttagcaatgtgagctcaaccggtagcatcgatatggtggacagcccacagctggctactctcgcagacgaagtgtccgcatcactcgccaaacagggcctgtag

SEQ ID NO: 195176 - DNA, 1326 bp, synthetic construct
  misc_feature 1..1326: note = Description of Artificial Sequence: Synthetic coding sequence
  source 1..1326: mol_type = other DNA
atggccgagccccggcaggagttcgaggtgatggaggaccacgccggcacgtacggtctgggcgataggaaggaccagggcggatatacaatgcatcaggatcaggaaggagacaccgatgctgggctgaaagaaagcccgcttcagacccctacagaggatggctctgaggaaccaggatcagagacttctgacgcaaagtctacacccacagccgaggacgtgactgccccccttgtggacgagggcgctcctggaaagcaagcggctgcccaacctcatacggaaatcccggagggcaccacagccgaagaagcgggcattggagatacccccagtctcgaagacgaagccgcgggtcacgtcacacaggctcgcatggtgtctaagagtaaggatggcacgggctcagatgacaaaaaggccaaaggtgcggacggcaagactaaaatcgccacccctagaggcgcggccccgcctggtcagaagggtcaggcgaacgctacccgaatccctgccaaaacacctcctgcaccaaagacacctccttctagtggagagccgcccaagtcgggcgatcgaagcgggtactcgtcccccggatcgcctgggacgcctggcagtcgctccaggacaccatccctgccaacacctcctacaagagaacccaaaaaggttgccgtggtgcgtactccgcctaagtccccaagcagcgccaagagtcgacttcagacagcgcctgtccctatgcctgatcttaaaaatgtgaagtctaagatcggatctaccgagaacctgaagcatcaaccaggcggagggaaagtgcagattattaacaaaaagctggacctttcaaacgtgcagtcaaagtgcgggagtaaggataacatcaaacatgtgccaggtggggggagcgtccagatagtttataaaccagtcgacctgtctaaggtcacctccaagtgtgggtccctcgggaatatccaccataagcctggagggggacaggtggaggtgaagagcgaaaagctggattttaaagaccgagtccagtcaaagatcgggagtctggataacatcacccatgtccccgggggaggaaataaaaagattgagacacataagctgacttttagggagaatgccaaggccaagacggatcacggcgccgagatagtctacaagagtccagtagtgagcggggatacctccccacggcatctctctaacgtgagcagcactgggtctatcgacatggttgatagccctcagttggccaccttggcggatgaagtttccgcctctctggccaagcaaggcctctag

SEQ ID NO: 195177 - DNA, 1080 bp, synthetic construct
  misc_feature 1..1080: note = Description of Artificial Sequence: Synthetic coding sequence
  source 1..1080: mol_type = other DNA
atggccgagccccggcaggagttcgaggtgatggaggaccacgccggaacctacggcctgggggatcgtaaagaccaaggaggatacaccatgcaccaagatcaggaaggtgacacagacgccggattgaaagaatcaccactccaaacgccaacagaagacggttccgaagaaccgggatctgaaacctccgacgccaagagtacaccaacggcggaagctcggatggtgtcaaagtcgaaagatgggactggatcagatgacaagaaggcaaaaggtgccgacggtaaaacaaagatcgcgacccctcgcggcgcggccccccccggtcaaaaggggcaggcgaatgctacacggattcccgccaagacaccgcctgcacctaagaccccaccatcctctggggaacccccaaagagtggcgatcgttctggatacagctcccccggtagcccaggaacccccggaagtcggagtcgaacgccctccctccccaccccccctacccgcgagcctaaaaaagtggccgtcgtgagaacgccacccaagagcccttctagtgccaagtcaaggctgcagactgcgcccgtccccatgccagatttaaaaaatgtaaaatctaagatcggctcaacagagaatctcaagcaccagccaggcggcggaaaggtgcagatcgtctacaagccagtcgatctgtccaaagtgacgtcaaagtgcggatccttgggtaacattcaccataagcctggcgggggacaggtggaggtgaagtccgaaaagttggacttcaaagacagagtgcagagtaagattggaagcctggacaatatcactcacgtcccaggggggggcaataaaaaaatagaaacccacaagctcacgttccgcgaaaatgccaaagctaaaaccgaccacggcgctgagattgtttacaagagtccagttgttagtggtgacacgtctccccgccacctgtccaacgtgtcctcgaccgggtctatcgacatggtcgactccccacagttggccacactggcagatgaggtgtcggcttcattagcaaagcagggcttatag

SEQ ID NO: 195178 - DNA, 2331 bp, synthetic construct
  misc_feature 1..2331: note = Description of Artificial Sequence: Synthetic coding sequence
  source 1..2331: mol_type = other DNA
atggccgagccccggcaggagttcgaggtgatggaggaccacgccgggacctacgggctcggagatcgcaaggatcagggaggctacaccatgcatcaagatcaagagggggacactgacgccggactgaaagaatcaccactccagacacccaccgaggatggctcagaagagcccggttccgagacatctgatgctaagtccacaccgacagccgaggacgtcactgcaccactggtcgatgagggcgcgcctggcaaacaggccgccgctcaacctcacactgaaatccccgaagggactacggctgaagaagccggcattggcgatactccatccctggaggacgaggcggcagggcacgtgactcaagaaccggagagcggtaaggtcgtgcaagaaggtttcctgcgtgagccaggaccccccggcctgtcccatcaattaatgagcggaatgcccggcgcgccactccttcctgagggcccgcgcgaagcaacgcggcagcctagcggtaccggtccggaggataccgagggaggccgtcacgctcctgaactgctgaagcatcagctgctgggcgatctgcatcaggagggcccacctctgaagggcgccggaggcaaggagagacctggctctaaggaggaagtggatgaggatcgcgatgtggacgagtccagccctcaggatagccccccttccaaagcctccccagcacaggacggaaggcccccacagaccgcagcacgagaagctactagtattcctgggttccccgccgagggagctatcccactacccgtagacttcttgagcaaagttagcacagagattcctgccagcgagccggatggaccatctgtgggacgtgctaagggtcaggacgcacctctggaattcacattccatgtggaaatcacccctaacgtgcaaaaagagcaggctcactcagaggaacatctaggccgcgcggccttccctggagcccctggcgaaggaccagaagccaggggaccaagtcttggcgaggatacaaaagaggcagacttacctgagccgagtgaaaagcagccggccgctgctccgcggggcaagccagtctctcgggttccacagctgaaagcccgaatggtgagtaagagcaaggatggcacagggagcgacgacaaaaaagcaaagaccagtacacgaagttcagcaaagactctgaagaaccggccctgcctgagcccgaagcatccaacccctggctcatccgaccctctcatccagccctctagtcccgccgtatgtccggaacctcctagcagtccaaagtacgttagttcagttactagtaggactgggtcatctggcgccaaggagatgaaactgaaaggagccgatgggaaaactaaaatcgccactccaagaggcgccgccccgccaggtcaaaaaggccaggctaatgccacccgtatcccagctaaaaccccgccagcccccaagacacccccaagctccgcgaccaagcaggtgcagaggaggccgccaccagccgggcctcggtccgaaagaggcgaacctccaaaaagtggcgatcggtctggttattcctccccaggctctccgggcacaccaggatcccggtctaggacacccagcctgcctacaccacccaccagagaacctaagaaggtggcagtcgtgcgcactccccctaaaagcccaagttcggcgaagtcccggttgcaaacagcgccagtgccaatgcctgacctgaaaaatgttaagagcaagattggaagcaccgaaaacttgaaacaccaaccgggaggtggaaaggttcagatcattaataaaaaactggatctttctaacgttcagtctaagtgcggtagcaaagataacattaagcatgttccaggtggtggaagtgtccagatcgtgtacaaaccagtggacctgagcaaggtaacatcaaaatgcgggtccctgggcaacatacatcataaaccggggggcgggcaggtcgaggtgaaaagcgaaaagctggactttaaggatcgtgttcaaagcaagatcggttcgctggacaacatcacccatgtgcccggcggcgggaataagaaaatcgaaacccataagttgacctttagggagaacgctaaggccaaaaccgatcacggcgctgagatcgtctacaaaagtccagtcgtgagtggggacacgagcccccgacacctgagcaacgtgtctagtactggctctattgacatggttgactctccacagctggccaccctcgccgacgaagtgagcgcgtcccttgccaagcagggcctgtag

SEQ ID NO: 195179 - DNA, 1239 bp, synthetic construct
  misc_feature 1..1239: note = Description of Artificial Sequence: Synthetic coding sequence
  source 1..1239: mol_type = other DNA
atggccgagccccggcaggagttcgaggtgatggaggaccacgccggcacttatggccttggcgatcgtaaggatcagggcggatataccatgcaccaagaccaggagggggataccgatgcaggcctcaaagagagcccactccagacccccacagaggatgggtctgaagagccaggatctgagacctccgatgccaagtccacccccacggccgaagcagaagaagcaggcattggcgacacccctagccttgaagacgaggcggccggccatgtaactcaggcccgcatggtgagcaaatcaaaggatggaacgggctcagacgacaaaaaggctaaaggcgccgacgggaaaactaaaatcgcaacccctaggggcgccgcgccacctggtcagaagggccaagccaacgctactagaattcccgcgaaaaccccacctgcccccaaaacacctccatcctcgggcgaacccccaaaatcaggagacaggagcggatattcctcacccggaagtccagggacaccaggctcacggtcaaggaccccatctctgcccacaccaccaaccagggagccaaagaaagtcgctgtcgtacggactccgcccaaatcgccgagtagcgccaaatctcgactgcagactgctcccgttccaatgcctgatttgaagaacgttaaatccaagataggctccaccgaaaaccttaagcatcagcctggcggaggcaaggtacaaattattaataaaaaactggacctgtctaatgtacagagtaaatgtggtagcaaagacaacatcaagcatgtccccgggggcggtagcgtccaaattgtgtacaagcctgtggacttgtccaaggtgaccagcaagtgcggctccctggggaacattcaccacaagccgggaggaggacaggtggaggtgaaaagcgagaagctggacttcaaagaccgcgtgcagagtaagattgggtcactcgacaacatcacccatgtgcccggcggtggtaacaagaaaattgagacacacaagttgaccttcagggaaaacgccaaggcgaagactgaccacggcgcagagatcgtgtataagtcacctgtagtatccggagatacttccccccgccacttgagtaacgttagctcgacagggagtatcgacatggtggacagtcctcagctcgccaccttggccgatgaggtgtccgcctccttggccaaacaaggcttgtag

SEQ ID NO: 195180 - DNA, 795 bp, synthetic construct
  misc_feature 1..795: note = Description of Artificial Sequence: Synthetic coding sequence
  source 1..795: mol_type = other DNA
acccgggaggccgagggcgccgacggcaagaccaagatcgccaccccaaaagggcaggctaacgctacacgcatccctgccaaaacccctccagcaccaaaaactcccccgtcttctggagagccccctaagtccggcgataggtccggctactcgtcccctggcagccccggaacacctgggagccgctcccgcacacccagtttgcctacccctcctaccagagagccgaaaaaagttgcagtggttaggactccacctaagagcccatcttccgccaagtcgcgtttgcaaaccgccccagtacccatgccggacctcaagaacgtcaaaagcaaaatcggatctacagagaaccttaagcatcaaccaggggggggaaaggtgcagatagtatataagccagtggatctgtctaaggtgactagtaagtgcggatcacttgggaacattcaccataagccaggagggggccaagtggaagtaaagtccgagaagctcgatttcaaggaccgagttcagtcgaaaattggcagtctggacaatatcacgcacgtgcctggaggtggcaataagaagatcgaaacacataaactcacctttcgcgaaaacgccaaagccaagaccgatcacggggcggagatagtctacaaaagcccagttgtctctggagacacttcaccccgccatttgtctaacgtttcgagcactggaagtatagacatggtggactcaccacaacttgcaacacttgctgatgaagttagtgccagtttggccaagcaggggttatag

SEQ ID NO: 195181 - DNA, 1059 bp, synthetic construct
  misc_feature 1..1059: note = Description of Artificial Sequence: Synthetic coding sequence
  source 1..1059: mol_type = other DNA
atggccgagccccggcaggagttcgaggtgatggaggaccacgccggaacgtacggcctgggggaccggaaggaccagggtggatacactatgcatcaagatcaggaaggtgatacagacgcaggcctgaaggccgaggaagccggaattggtgatacaccctctctcgaagatgaggctgccggtcatgtaactcaggcccgcatggtttccaaatctaaggacggtaccggatctgatgacaagaaagcgaaaggcgccgacggaaagaccaaaatcgccacaccgagaggagccgccccccccggacagaagggccaagctaacgccacgcggattccagccaagacacctcctgctcccaaaacgcccccgagttctggagaaccgcccaagtccggagatcgtagcggctattcatctccaggctcccctggcacacctggaagccgcagcagaactccatctctccctactcccccgactagggaacccaagaaggtggccgtcgttaggacaccacccaaatcaccttccagcgctaagagccggttgcaaaccgccccagtccccatgccagatcttaagaacgttaagagcaagatcgggtcaactgaaaatctgaagcaccagccgggaggaggcaaagtgcagatagtgtataagccggttgatctcagcaaggtgactagcaagtgtggatcactgggtaacatccaccataaacctgggggaggccaggtcgaagtgaagagcgaaaagttggattttaaagatcgtgttcagagtaagataggctcgctcgacaacatcactcacgttcccggcggcggcaacaagaagatcgagacccataagcttacgttcagagaaaatgccaaggccaaaacagaccacggcgccgagatagtgtataaatcacctgtggtcagtggcgacacttccccacgccacctctccaacgtgtcaagtacaggctctattgatatggttgactccccccagctcgccactctcgctgatgaggtgtcggctagtctggccaagcagggtctgtag

SEQ ID NO: 195182 - DNA, 1233 bp, synthetic construct
  misc_feature 1..1233: note = Description of Artificial Sequence: Synthetic coding sequence
  source 1..1233: mol_type = other DNA
atggccgagccccggcaggagttcgaggtgatggaggaccacgccggaacttacggtcttggtgatagaaaggatcaaggcggctacaccatgcaccaggatcaggagggagataccgacgccgggttaaaggagtctccactccagacgcctacggaagatggcagtgaggagcccggctccgagacctctgatgcgaagtcaacccccactgcagaggacgtgactgccccactagtagatgagggagctccaggaaagcaggccgcagcgcagccacacaccgagattccagaaggcaccacagccgaagaggccgggatcggagatacaccatcactcgaggacgaggctgccgggcatgtgacacaggctcgcatggtgtccaaatcaaaagacggcacgggtagtgatgataaaaaggcaaagggcgctgatggcaagacaaagatcgccacccccaggggcgcagccccacctggacaaaagggacaagctaatgccaccaggatacccgccaagacaccccccgcacctaagacaccccccagtagcggcgaaccacctaaatccggcgaccgctcaggttactcctccccggggtcccctggtacccctggtagccgctcacggacaccttccctccctacacccccaacccgcgagcccaagaaagtggctgtggtaaggacccctcctaagagtccaagtagtgcaaagtctagactccaaactgcaccggtgcctatgcccgatttaaagaacgtcaagtctaaaataggttccacagagaacctcaaacatcagcccggagggggcaaagtgcagattgtgtataaacccgtggacctgagtaaggtgacctctaaatgtggcagcctcggtaacatacaccacaagcccggcggaggccaggtggaggtgaaatccgaaaaattagactttaaggatcgagtgcagtccaaaattggaagcctcgacaatatcacacacgttcccggtggaggaaataagaaaattgagactcataagttaacctttagggaaaatgccaaagctaagactgatcacggagcggagatcgtatataaaagtcctgtggtgtccggtgacaccagcccacgccatttaagcaatgtttctagcacgggatcaatcgacatggtggattcgccacagctcgctaccctggctgacgaagtctccgcctcactcgccaagcagggtttatag

SEQ ID NO: 195183 - DNA, 807 bp, synthetic construct
  misc_feature 1..807: note = Description of Artificial Sequence: Synthetic coding sequence
  source 1..807: mol_type = other DNA
atggccgtgaacgtgtacagcaccagcgtgaccagcgacaacctgagccggcatgatatgctggcctggatcaacgagtcccttcagttgaacctgaccaagatcgagcagctctgttccggtgctgcgtactgtcagttcatggatatgctcttccccggtagtattgccctgaaaaaggttaagttccaagcaaaactcgagcacgaatatatacagaattttaaaattcttcaggcggggttcaagcggatgggggtggataaaattatacctgtagacaagctcgtcaagggcaagtttcaagataatttcgagttcgtgcagtggttcaaaaaatttttcgacgcgaattatgatggaaaggactatgaccctgtagcagcacgacaggggcaggaaacggcggtcgcgccgagtctggttgcgccagcccttaacaaacctaagaagcctctcacttccagcagtgccgctcctcaacgcccaatctctacacagagaactgctgccgcccccaaagcaggtcctggcgtggtgagaaagaaccccggcgtaggaaatggggacgatgaagctgcggaacttatgcaacaggtgaacgtcctgaaattgactgtggaagacctggagaaggagagggacttttattttggtaagctgcggaacatcgagttgatttgtcaggaaaatgaaggggagaacgatccagtcctgcagagaatcgtcgatatcttatatgcgaccgacgaggggttcgtgattcctgacgaaggcgggccccaagaagagcaggaggaatattag

SEQ ID NO: 195184 - DNA, 984 bp, synthetic construct
  misc_feature 1..984: note = Description of Artificial Sequence: Synthetic coding sequence
  source 1..984: mol_type = other DNA
atgcccggccccacccagaccctgagccccaacggcgagaacaacaacgatatcatacaagacaataacggtactatcattccattcaggaaacataccgtgcggggcgagcgaagttattcgtggggcatggccgtgaatgtctacagtacatctattactcaggaaactatgtcccgccatgacatcatagcttgggtcaatgatatcgtttccctcaattacacaaaggtcgagcagttatgcagcggggccgcttattgccagtttatggacatgcttttcccaggctgcattagtttgaaaaaggtgaagtttcaggccaagcttgaacacgagtacattcataactttaaactgctgcaggccagcttcaaacggatgaacgtcgataaggtgatccctgtggagaaactggtcaaggggcgatttcaggacaatcttgacttcatccagtggttcaagaagttctacgacgctaactatgacggtaaagagtacgaccccgtggaagcgcggcagggccaggatgccattcctccccccgaccctggggagcagatctttaatcttcccaagaaatcacaccatgctaacagtccaaccgctggtgccgccaagtcatctcctgcggccaagcctggctcaacaccaagccggccgtcatctgccaaaagagcttctagctctggctctgcttcgaaaagcgataaggatctcgagacacaggtcatccagctcaatgagcaggtacacagcttgaagttggcccttgaaggtgtggaaaaagagcgggacttttattttggcaagctgagagagatcgagctattgtgtcaggaacacggacaggaaaacgacgatcttgtgcaacgccttatggacattctgtacgcctctgaggagcatgaagggcacaccgaagaacccgaggccgaagaacaagcgcacgaacagcagccgccccagcaggaggaatattag

SEQ ID NO: 195185 - DNA, 855 bp, synthetic construct
  misc_feature 1..855: note = Description of Artificial Sequence: Synthetic coding sequence
  source 1..855: mol_type = other DNA
atggccgtgaacgtgtacagcaccagcatcacccaggagaccatgtcccggcatgatatcattgcctgggttaacgatattgtctctcttaattacacaaaagtagaacagctgtgctcaggagctgcgtattgtcagttcatggacatgctgtttcccggctgcatttccctgaagaaagtgaaatttcaggccaaactcgaacatgagtatatccacaactttaaactcttgcaggcgtcctttaagcgtatgaacgtggacaaggtcatcccggtagaaaagctggtcaagggcaggtttcaagacaacctcgacttcattcagtggttcaaaaaattttatgatgctaattatgacgggaaggagtacgatcccgtcgaggctaggcaggggcaagacgccatacccccacctgatcctggagaacagattttcaatctgccaaaaaagagccaccatgcaaactccccgaccgcaggggccgccaaaagttcacccgcagctaagcccgggagtaccccctccaggccctcgagcgccaaacgggcttccagttctggatccgcgtctaaatccgacaaggatctagaaacacaagtgatccagctaaacgaacaggtacacagtcttaagctggcccttgagggagtggagaaagagagggatttctattttggaaagctgagagagattgagcttctttgccaggaacatggtcaggagaacgacgacctggtacaaaggctcatggatatcctgtatgccagcgaggagcacgaaggacacaccgaggagccagaggccgaagagcaggcacacgaacagcagcctccacagcaggaggagtactag

SEQ ID NO: 195186 - DNA, 948 bp, synthetic construct
  misc_feature 1..948: note = Description of Artificial Sequence: Synthetic coding sequence
  source 1..948: mol_type = other DNA
atgaagcagaaccgggaccagaagtgccccgtgagccagcggaactcatcattccaacagccaggccgtaaacccggctgctcttcctggggtatggccgttaacgtatactcaacctcaatcacccaggaaacgatgtcacggcacgacattatcgcgtgggtgaatgatatcgtgagtttaaactatacaaaagtggaacagctgtgtagcggagcagcctattgtcagtttatggacatgctgttccccggttgtatttcactgaagaaggtaaaatttcaggccaaattggaacacgagtacatccacaattttaagttactgcaggccagctttaaaaggatgaacgtggataaggtgatcccagtggaaaaactggtgaaggggagatttcaggataatctggacttcatccaatggttcaagaagttttacgacgctaattacgatggcaaggaatatgatccagtggaggccagacagggccaagatgctattccgccaccagatcccggagaacagatcttcaaccttcccaaaaagtcccatcatgccaattcccctacggccggcgctgctaagtcctcccctgccgccaaacctggatctacgccgtcccgaccctcaagcgccaagagagcctcgtcatcggggagtgcgagcaaaagtgataaggatctagaaacgcaggtgatccagttgaatgagcaggtccatagtctgaagttggctctagaaggcgtagagaaggagcgtgacttctatttcgggaagctgcgtgagatcgaactgctctgtcaggaacacggacaggaaaacgacgatctggtccagcgtctcatggatattctgtatgcatcagaagaacacgaaggccataccgaagaacctgaggctgaggaacaggcccatgagcagcaaccaccacagcaggaggagtactag

SEQ ID NO: 195187 - DNA, 825 bp, synthetic construct
  misc_feature 1..825: note = Description of Artificial Sequence: Synthetic coding sequence
  source 1..825: mol_type = other DNA
atggcccggaccaccaccaccagcagccggatcatcaccggcccctctttcctaagtgggagtacgcagtgcgctggtagcgttcctaccggcgccgcctattgtcagtttatggatatgttattcccagggtgtatctccctgaagaaggtgaaattccaagccaagcttgagcacgaatacatccataattttaagctgctacaggcgtcattcaaacgcatgaatgtggacaaagtgattccagttgagaaactggtcaaaggacgctttcaggacaacctggactttatccagtggttcaagaaattttatgatgctaattatgatggtaaagagtatgacccagtagaagccagacagggccaggatgccatccccccaccagatcccggcgagcagatttttaacctccctaaaaaaagccaccacgctaatagtccaaccgccggggccgccaaatcttctcctgccgcaaagcctgggtcaactccatcaagaccttcgtccgcaaaacgagcctcatcttctggtagtgccagcaagtctgacaaggatctggagacccaggtcatccagctgaacgaacaggtccattcactcaagttggctctcgaaggcgtagaaaaggagcgtgacttttacttcgggaagctgagagaaatcgaactgttgtgtcaggagcacgggcaagaaaacgatgatctcgtacagaggctcatggacatcctgtacgcctccgaagagcatgaaggccacacggaggagccggaggccgaggaacaggcccacgagcagcagcccccgcagcaggaggagtattag

SEQ ID NO: 195188 - DNA, 1005 bp, synthetic construct
  misc_feature 1..1005: note = Description of Artificial Sequence: Synthetic coding sequence
  source 1..1005: mol_type = other DNA
atgagcgagcccatccgggtgctggtgaccggcgccgccggccagatcgcttattcgctgttgtacagtattggtaacgggtctgtgttcggcaaggatcagcctatcattctcgtgctcctggacatcactcctatgatgggtgtgctcgatggagtgctgatggagttacaggattgtgcattgcccttgctgaaggacgtgatcgccactgacaaggaagacgtggcatttaaggacctggacgtggccatcctagtagggagtatgccgaggcgtgaaggcatggagcgtaaggacctgttaaaggcgaacgttaaaattttcaagtctcagggggccgcgttagataaatacgctaaaaagagcgtgaaagtcatcgtggtcggcaaccctgctaacaccaattgtcttactgccagtaagtcggcacccagcatcccgaaagaaaatttctcctgcctgactaggctggaccacaatcgtgccaaagcccagatcgccttaaaattgggcgtgactgccaatgacgtcaagaacgtaataatctggggtaatcactcctccactcagtatcccgatgtaaatcacgctaaggtcaagctgcaggggaaggaagtcggagtatatgaagcactgaaggatgattcttggttgaaaggcgagtttgtcacaacagtccagcagagaggggctgcagtgatcaaggcccgaaaactgtcctccgctatgtccgccgcgaaggccatttgcgaccacgtaagagatatatggtttggcacgcccgagggagagttcgtgagcatgggcgtgatatccgacgggaactcatacggggtccccgacgatctgttatatagttttccggtggtgattaagaacaagacctggaaatttgttgagggtttacccattaatgattttagtagagagaagatggacctaactgctaaggagctaacagaagagaaggagtccgcattcgagtttctgtcatctgcctag

SEQ ID NO: 195189 - DNA, 801 bp, synthetic construct
  misc_feature 1..801: note = Description of Artificial Sequence: Synthetic coding sequence
  source 1..801: mol_type = other DNA
atggccgtgaacgtgtacagcaccagcgtgaccagcgagaacctgtcaaggcatgatatgttggcctgggtgaatgattctttacacctgaattacaccaaaatcgaacagttgtgttccggtgcagcttattgccagtttatggacatgctgtttccgggctgcgtacacctgcgcaaagtcaagtttcaagctaagctcgaacacgaatacatacacaactttaaagtactccaggccgcttttaagaagatgggggtcgacaagattattcctgttgagaaattggtgaagggaaagtttcaggacaattttgaatttattcagtggtttaaaaaatttttcgacgccaactacgatgggaaagactacaaccctttactcgcaagacaaggccaggatgtcgcccccccaccaaatccagttcctcaaaggacctctcctaccggccctaagaatatgcaaacttctggccgattatccaacgtggctcctccatgcatcctcaggaagaatcccccttccgcccgcaacggtggtcacgagaccgacgcacagatcctggaactgaaccaacagctggttgacctgaagcttacggtagatggcctcgaaaaggaacgtgacttctacttttctaaattacgggatattgagctgatctgtcaggagcatgagtcagaaaactcgcccgtaatctcaggtatcatcggcatactctatgccactgaagaaggattcgccccaccagaagatgatgaaattgaggaacaccaacaagaggatcaggacgaatactag

SEQ ID NO: 195190 - DNA, 801 bp, synthetic construct
  misc_feature 1..801: note = Description of Artificial Sequence: Synthetic coding sequence
  source 1..801: mol_type = other DNA
atggccgtgaacgtgtacagcaccagcgtgaccagcgagaacctgtctaggcatgatatgctggcctgggtgaacgacagcctgcacttaaactacactaaaattgagcaactttgctcaggtgcagcctactgtcaattcatggacatgttgttccctggctgcgtgcatttaagaaaagtgaaatttcaggccaaattagagcacgaatacatccacaacttcaaagttctgcaggcagcctttaagaagatgggggtagataagattatccctgtcgaaaaacttgtgaaaggtaagtttcaggataacttcgagttcatccagtggttcaaaaaattcttcgatgcaaactatgatggaaaagactacaacccacttctcgcaagacagggccaggatgtcgcgcctccacccaatcctgttccccagcgaacctcccccaccggccccaagaacatgcagacgagtgggcggctcagcaacgtggcaccaccttgtatactgcgcaagaatcctccttctgcgaggaacgggggccacgagacagacgcccagattttggaactcaaccagcagctggtggatctgaaactcaccgtggacggacttgaaaaggaacgcgacttttacttcagcaaattgagagacatcgagctaatctgccaggaacatgagagcgaaaactcaccagtgatttccggtatcataggcatcctctacgcgactgaagagggatttgctccaccagaggatgatgagatcgaagagcaccagcaagaagaccaagacgagtattag

SEQ ID NO: 195191 - DNA, 657 bp, synthetic construct
  misc_feature 1..657: note = Description of Artificial Sequence: Synthetic coding sequence
  source 1..657: mol_type = other DNA
atggccgtgaacgtgtacagcaccagcgtgaccagcgagaacctgagcaggcacgatatgctggcatgggttaatgatagtctccatcttaactatactaagattgaacagctttgctctggagccgcgtactgtcagtttatggatatgctgttcccagggtgcgttcaccttcggaaggtaaagtttcaggccaaacttgagcacgagtatattcataactttaaggtattacaggcagcatttaagaagatgggcgtcgataaaattatacccgtggaaaagctggtgaagggtaaattccaggacaacttcgaattcattcagtggtttaaaaagttctttgatgccaattacgatgggaaggactataacccacttctcgcccgccaaggccaggatgttgcacccccccccaaccctggcgatcagatttttaataaatcaaagaaactgatcggcacagccgtgccacagcggaccagccctaccggccccaagaatatgcaaacatccggccgcctgagcaatgtggcgcccccctgtatactccggaagaacccccctagcgctagaaatggcggtcatgaaaccgacgctcaaatattggagcttaaccagcagctggtcgatctcaagttgaccgtggacggctag

SEQ ID NO: 195192 - DNA, 2004 bp, synthetic construct
  misc_feature 1..2004: note = Description of Artificial Sequence: Synthetic coding sequence
  source 1..2004: mol_type = other DNA
atggagaccctggagagcgagctgacctgccccatctgcctggagctgtttgaagatccgctgctgctgccctgtgcgcactccctgtgtttcaattgtgctcacagaattctcgtttcacactgtgctactaacgagtctgtagaaagtatcacagcattccaatgccccacctgcaggcacgtaataacgctgagccaaagaggacttgatggtctgaagagaaacgtgaccttgcagaacattatcgatcggtttcaaaaagcttctgtgtctggccctaactctcctagtgagacgcggagggaacgggccttcgatgccaacaccatgacaagtgccgagaaggtcctctgccagttttgtgatcaggacccagcccaggatgcagtaaaaacatgcgttacctgcgaggttagctactgtgacgagtgtctgaaggctactcatccaaataaaaagccgtttactggccatcgtcttattgagcccatccccgatagccatatcagaggtttgatgtgcctggagcacgaggacgagaaagttaatatgtactgtgtgacggatgatcagttaatctgcgcgctgtgcaaactcgtgggccgccatcgggaccaccaggtcgctgccctgtcagaaaggtacgacaagctaaaacagaacctcgagtcaaacctgaccaatctcattaagcggaatacagagctggagacgctcttggctaagctgattcaaacatgtcaacatgtcgaggtgaatgcctcccgtcaggaggctaagctcacagaagagtgtgatctattaatcgagatcattcagcagcgacggcagattatagggacgaagattaaggaggggaaagttatgagattacgcaagctggcccaacagatcgctaactgtaaacagtgcattgagcgctccgcctctctcattagtcaagcagaacattctctgaaggagaatgatcatgcccggtttttgcagacggctaagaatatcacagaaagggtctccatggccactgcgtcctcacaggtcctgatccccgaaatcaatctcaacgatacattcgacacttttgccctggacttctcaagggaaaaaaaactgcttgagtgtctggactacctgaccgctcctaatccccctaccattcgagaggagctgtgcacagcctcatacgacaccatcacggtgcattggacaagtgatgatgagttttccgtagtgtcatatgaactccagtacacaatcttcacgggacaggccaatgttgtctcattgtgcaatagcgctgattcgtggatgatcgtgcccaatattaagcagaaccactacactgtgcacgggttgcagtctgggacaaagtacatcttcatggtgaaggccataaaccaagccgggtcccgaagttccgagccaggtaagttgaaaacgaattctcagccattcaagttagaccctaagagcgctcataggaagctcaaagtgagccacgataatttaacagtggaacgcgacgaaagttcaagtaagaaatcacacactcccgaaaggtttaccagccagggaagctacggcgtagccggtaatgtgtttattgattcaggtcggcactattgggaagtggtgatctccgggagcacttggtatgccattggcttagcatataaatcagcacctaagcacgagtggattggtaagaattcagcgagttgggccctgtgtcgctgtaataataactgggtggtgaggcataattccaaagagatccccatcgagcctgcacctcatctgcggagggtcggaattttgctggattacgacaatggttccattgcgttctatgatgccctgaactccatccacctctacacatttgatgtggccttcgcccagcctgtgtgtcctacgttcacagtgtggaataaatgccttacaatcattacgggcctcccgatcccagaccaccttgactgtacagaacagctcccttag

SEQ ID NO: 195193 - DNA, 2004 bp, synthetic construct
  misc_feature 1..2004: note = Description of Artificial Sequence: Synthetic coding sequence
  source 1..2004: mol_type = other DNA
atggagaccctggagagcgagctgacctgccccatctgcctggagctctttgaggatcctttactgctaccttgtgcccactcactatgcttcaactgtgcccatcgcatcctagtgagtcactgtgctacaaacgagtcagtggagagtattaccgccttccagtgcccgacgtgtcgccatgtgattacgctgagccagagaggtctcgacggcttgaagcgaaacgtgactctgcaaaatatcatagacagatttcagaaggcgagtgtaagcggacctaacagcccttcagaaaccaggagggaaagagcgttcgatgccaacacaatgaccagtgcagagaaagtgctttgccagttttgcgaccaggacccagcacaagatgcagtaaaaacctgcgtgacctgtgaggtgtcctactgcgacgaatgtttgaaggccacacatcctaacaaaaaaccctttaccggccatagactgatcgaaccgattcccgatagtcacatacgaggattaatgtgcctcgagcacgaggacgagaaagtaaacatgtattgcgtgacggacgatcaactgatttgcgccctgtgcaagctggtaggaaggcaccgcgaccatcaagtggcggccctgtcagaaagatacgataagctgaagcagaatttggaatcgaacctcaccaatctcattaagcgcaacacagaactcgagacgctgttagccaaactcatccagacatgtcagcacgtggaggtcaacgcaagtaggcaagaggcaaagcttacagaggaatgcgacctgttgatcgagattatacaacagcggcgtcagattataggaactaagatcaaggagggcaaagtgatgcggctccgcaaactggcacagcagattgccaactgcaaacaatgcattgaacggtccgctagcctgatctcccaagctgagcactctttgaaggaaaacgatcatgcccgcttcctccaaacagctaaaaacattacggagcgggtgtccatggctacggcctcatctcaggttttgatccctgaaattaacctaaatgacacctttgacacctttgcactggacttttcgcgggagaaaaaactgctcgagtgcctggattatctgacagcccccaatccacctactatccgtgaagaattatgtacagctagctacgacactatcacagtgcattggaccagcgacgacgagttctccgtcgtctcatatgagctccagtacacgatctttacaggccaggccaatgttgtgtcactgtgtaactccgcggatagctggatgatcgtgcccaatataaaacaaaaccactacacggtgcatggcctccaatccggcactaaatatatttttatggtgaaagcgataaaccaggctggatcaagatctagtgagcccggtaaacttaaaaccaactctcagccgtttaaactggacccaaagtcagctcatcggaaactgaaagtgagccacgacaatcttacagtcgagagggacgagagtagtagcaagaagagccatactccggagaggtttacttcacaagggtcttatggcgttgcgggaaatgtttttattgattccgggcgacactattgggaagtggtaattagcggaagcacgtggtacgcaatcggcttggcatacaaatccgcccccaagcatgagtggatcggaaagaacagcgcgtcatgggccctctgccgttgtaacaacaactgggttgtccggcataattctaaagaaattccaatagagcctgccccacacctgcggcgcgtcgggatcctcctagattatgacaacgggtcgatcgccttttatgacgcactgaattctatccacctgtacacatttgacgtcgctttcgcccagccggtgtgccccactttcaccgtgtggaataaatgtctgactatcattaccggcctacctataccggaccatctggactgcactgagcaactcccctag

SEQ ID NO: 195194 - DNA, 2004 bp, synthetic construct
  misc_feature 1..2004: note = Description of Artificial Sequence: Synthetic coding sequence
  source 1..2004: mol_type = other DNA
atggagaccctggagagcgagctgacctgccccatctgcctggagctctttgaggaccccctgctgctgccctgcgcacactccctttgcttcaactgtgctcaccgcatccttgtgtcccactgtgctactaacgagtccgtagaatcaattacagcattccagtgcccaacatgccgccatgtgataaccttgtcccaaagagggctcgatggactaaagcgtaacgtgactttacagaatattatcgatcggttccaaaaggccagtgtgagtgggcctaactcaccctctgaaactcgaagggaaagagcgttcgatgccaataccatgacgtctgctgaaaaggtcctgtgtcagttctgcgatcaggaccctgcccaagacgctgttaagacatgtgtcacctgcgaagtctcctactgcgacgagtgtctcaaagcaacgcacccaaacaaaaaacccttcactggccacagactgatcgaaccaatccccgatagccacattcggggtctcatgtgcctggaacacgaggacgaaaaagtgaacatgtattgtgtgactgatgaccaactgatctgtgccctgtgtaaacttgtaggccgtcaccgggaccaccaggtcgccgccctttcagaaagatacgacaagctgaaacagaatctagagtcaaatcttactaatcttatcaaacgcaataccgagcttgagaccctgctcgccaagctcatccagacttgccaacatgtggaagtaaatgcaagcagacaggaggccaaactgacagaagaatgcgatttgttgatcgagataatccagcagagacgccagatcataggcacaaagataaaagagggtaaagtgatgcgtctgcgaaaactggcccaacagatcgcgaattgtaaacagtgtatcgaaagaagtgcgagcctgatttctcaggccgagcactctctcaaggagaatgaccacgctcggtttctgcagacagcaaaaaacataacagagcgagtgagcatggcaacagcaagctcacaggtgctgatacctgagattaatctaaatgacacattcgacacctttgcattggatttttcaagggaaaagaagctcctcgagtgtctggactatcttactgcaccgaacccccccaccattagagaggaactgtgcaccgcctcttatgacacaatcactgtgcattggacgagtgacgacgaatttagcgtggtctcttacgagctgcagtacacaatctttaccggtcaagcgaatgtcgtgtcattgtgtaactcggcagatagttggatgattgttcccaacattaagcagaaccactataccgtgcacggattgcagagcggcaccaaatatatctttatggtgaaggccattaaccaggctggttcacggagctctgaacctggtaagttaaagaccaacagtcagccatttaagttagatcccaagtccgcccaccggaaactcaaagtgtcccatgacaatcttacagtcgaacgggacgagtcttcttctaaaaaatcccacactcccgagcgctttacctcacagggaagctatggggtggcggggaacgttttcatagattcagggcgccactactgggaggtcgtcatcagcggctcaacctggtacgctatcggacttgcgtataagtccgcacccaaacatgagtggattggcaagaactcagcatcatgggccctctgccggtgtaacaataattgggtggtgaggcacaatagtaaggagataccaatcgaaccagccccccaccttcggagggtagggatcttattagactatgacaacgggagtattgccttctacgacgctcttaattccatccacctctatacattcgacgttgccttcgcccagccggtgtgtccaacattcaccgtgtggaataaatgtctgaccatcatcaccggtctgccgattcccgaccacctggactgcacggaacaactaccatag

SEQ ID NO: 195195 - DNA, 1659 bp, synthetic construct
  misc_feature 1..1659: note = Description of Artificial Sequence: Synthetic coding sequence
  source 1..1659: mol_type = other DNA
atggagaccctggagagcgagctgacctgccccatctgcctggagttattcgaagatccactgctgctcccctgtgctcactctctgtgcttcaattgtgcgcataggatcctggtgagccactgcgccaccaacgagtctgtggagtccattaccgcctttcagtgtcctacttgtcggcacgttattactctctctcagcgcggtctcgacggactgaaacgaaacgtcacactccagaacatcattgacaggtttcagaaggcatccgtgagcggcccgaattcacccagtgagaccaggagggagagagccttcgatgctaataccatgacatcggctgagaaagtcttatgccagttctgcgatcaggatcccgcacaggacgccgtgaaaacttgcgtgacttgcgaggtgtcatattgtgatgagtgcttgaaggcaacgcacccaaacaaaaagccattcacgggccatcggcttatcgagcccatcccggacagccatatccgcggcctgatgtgcctggaacacgaggatgaaaaggtaaacatgtattgtgtgaccgatgatcagctcatttgtgcactgtgtaagctcgtagggaggcacagagatcaccaagtcgccgccctgtcagaacgctacgataaactcaaacagaatttggagtcaaatctcaccaatcttatcaagcgcaatacggaactggaaacgttgcttgctaagcttattcagacttgccagcacgtcgaggtaaatgcctctagacaggaggccaagttaactgaagagtgcgatctgctgatcgagatcatccagcaacgccggcagattattgggaccaagatcaaggaggggaaagtgatgcggcttcgaaaactggcacagcagatcgctaactgcaaacagtgtatcgagcggtcagcaagccttatctcccaagcagagcattccctcaaagagaatgaccacgctagattcctgcagactgccaaaaacattaccgaacgggttagtatggcgacggccagttctcaggtgttgatccccgaaatcaacttgaatgacacttttgacacattcgcccttgattttagcagagagaaaaagctgctagagtgtctcgattatctaactgcacccaatcctccaacaattagagaagagctttgtaccgcttcctacgataccattaccgttcactggaccagcgatgacgagttttcggtggtgagttacgaacttcagtacacaattttcacagggcaggccaacgtggtttccctgtgcaactctgccgacagttggatgatcgtaccaaatatcaagcaaaaccactacactgtgcacgggctgcagagcggaacgaaatacatcttcatggtcaaggccataaatcaggctgggagtagatcatccgagcccgggaagctgaagacaaactcccagccttttaagctggatccaaagtccgcccacagaaagctgaaggttagtcacgacaatctgacagtggaaagggatgagagctcctccaaaaagtctcacacccctgagaggttcacaagtcagggaagctatggggtagcgggcaacgtgtttatagactccgggcggcattactgggaagttgtcatctctgggtccacctggtag

SEQ ID NO: 195196 - DNA, 2004 bp, synthetic construct
  misc_feature 1..2004: note = Description of Artificial Sequence: Synthetic coding sequence
  source 1..2004: mol_type = other DNA
atggagaccctggagagcgagctgacctgccccatctgcctggagctcttcgaggacccgctcctgctgccttgcgcccattctctgtgttttaactgcgcgcataggatcctggtaagtcactgtgctaccaatgagtcagtagagtccatcacagctttccagtgccccacctgccgacatgtgatcaccctgagtcagcgcggcctggacggcttgaagcggaacgtgactctgcagaatattatagacaggtttcagaaggcgagcgtcagtggccccaattcaccatccgagacacggagggagcgagcgtttgatgctaacactatgacgagcgcggagaaggttctgtgtcagttttgtgatcaagatccggctcaggacgcggttaaaacctgtgtaacctgcgaggtgagttattgcgatgaatgtctgaaggcaacacatccgaataaaaagcccttcacaggccaccggctcatcgaaccaattccggactcccatatcagagggctaatgtgcctggaacatgaggacgaaaaggttaatatgtactgcgttaccgacgatcagcttatttgcgcgctgtgtaagctggtgggaagacatcgggaccatcaggttgccgcactctcagagcggtatgacaaactaaaacagaatctggagtctaatctaacaaacctgataaagcgtaacaccgagcttgagaccctcctggcgaagctcattcaaacatgccaacacgtggaggtgaatgcatcacgccaggaagccaaactgaccgaggagtgcgatttgctgatagaaattatacagcagcgtcgccaaatcattgggacgaaaatcaaagagggcaaagttatgcggctcaggaagttggctcagcagattgcaaactgcaagcaatgcattgagcgctctgcaagcctgatctcacaagctgaacactcactgaaagaaaacgaccatgcccgttttttgcagaccgccaagaacattactgaaagagtttcaatggcaactgccagcagtcaggtcctgatccccgagattaatctgaatgatacctttgatacctttgctttggattttagccgtgaaaagaagctgcttgagtgcctagattacctgactgccccaaacccccctactattcgagaggagctgtgtaccgcctcttacgatacaatcactgtgcattggacaagtgatgatgagttctccgtggtgtcgtacgaactccaatatacgatattcactggacaggctaatgtcgtttcactgtgcaactctgccgatagctggatgattgtgccaaatattaaacaaaatcactatactgtgcacggcctgcagagtgggactaagtacatttttatggtgaaggctatcaatcaggcaggctcccggtcttcagaaccaggcaaactaaagactaattctcagcccttcaaacttgacccaaagtccgcacacaggaagttgaaagtcagccatgacaatctgactgtggaacgagatgagtcttcgagcaagaagtctcatactcctgagcggttcacatctcaggggagctatggagtggctggtaatgtttttatcgactccggccggcactattgggaggtggtcattagtgggtccacctggtatgccatcgggctggcctataaaagtgcaccgaagcacgagtggatcggcaagaactcggcgtcttgggccctctgtaggtgtaataacaattgggttgtaaggcacaattctaaggagatccccatcgaacccgcaccgcatttgagacgtgtggggattctgctagattatgacaacgggtccatcgccttttacgacgctctgaacagcatccatctatataccttcgacgtggcttttgcacaaccggtgtgtcccacttttacagtgtggaacaaatgccttacgattatcaccggcctaccaataccagaccacctggactgcacagaacagttaccgtag

SEQ ID NO: 195197 - DNA, 2004 bp, synthetic construct
  misc_feature 1..2004: note = Description of Artificial Sequence: Synthetic coding sequence
  source 1..2004: mol_type = other DNA
atggagaccctggagagcgagctgacctgccccatctgcctggagctttttgaagacccattgcttctcccttgcgcacacagcctctgctttaattgcgcgcaccgaattcttgtgtcccactgcgctacgaacgagagcgttgagagcataactgcatttcagtgccctacttgcaggcacgtgattacccttagtcagcggggcctcgatggtcttaaaaggaacgttacccttcagaatatcatcgatcggttccagaaagcctctgtgtctggacctaacagtccgagcgaaaccagaagggagcgcgctttcgatgccaacacaatgacatccgctgaaaaggtgctgtgtcagttctgtgaccaagaccctgcccaggacgccgtcaagacttgtgtgacatgtgaggtgtcttactgtgacgagtgtctgaaagctactcaccctaataagaaaccatttaccggccacaggctgatcgagccaatcccagattcacatatccgggggttgatgtgtctcgaacacgaagacgagaaggtgaacatgtactgcgttactgacgaccagctgatctgtgccctgtgcaaactcgtgggaaggcatagagatcaccaggtcgcagctctgagcgagaggtacgacaagctgaagcaaaatcttgagtctaacctgaccaacctaatcaagaggaacacggaacttgagaccctgctggcaaagctgatccagacatgccagcacgtggaggttaatgcctcccgacaggaagccaagctcactgaagaatgcgaccttctgatcgagattattcaacagaggaggcagattattggcaccaagattaaagagggtaaggtgatgagactacgcaaattagcccagcagatagcaaattgtaagcaatgcattgaacgcagtgcttccctgatttcccaggctgagcactcacttaaagaaaatgaccacgccaggtttctacagaccgccaagaacataacagaaagagtgtctatggccaccgcctcgtcccaggtcctcatccccgaaattaacttgaacgataccttcgacacatttgcattagatttcagccgagaaaagaagctgctggaatgcctggattacctgaccgctcctaacccacctaccattagggaggagttgtgtacagccagttacgacaccattacagtgcactggacctccgacgacgagttttcggtggttagttatgagctgcaatacacaatcttcacagggcaggctaatgtggtctcgctgtgtaactccgccgattcttggatgatcgttcccaatattaaacagaatcattacacagtgcacggcttgcagagcggcactaaatatatttttatggtgaaagccatcaaccaggccgggtctaggtccagcgaaccaggcaaattgaagactaattcgcagccattcaaacttgaccctaaatccgcacaccggaaactgaaagttagccacgacaatttgaccgtcgagcgcgatgaatcttcctcaaagaaaagtcacacccccgagcgcttcacctcccaaggctcatacggagtggctggaaatgtattcatcgattctggaaggcactactgggaagttgtgatatctgggtctacttggtacgcgattgggttagcctataaatcagcccctaaacatgaatggatagggaaaaactctgcatcctgggccctttgccgctgcaacaacaattgggtagtaaggcataatagcaaggaaattcccatcgaaccagccccccatcttcgacgggtaggcattctcctggactacgataatggaagcattgcgttctatgatgcgctgaacagtatacacctgtatacgtttgacgtggctttcgcacaacctgtatgtcccacctttaccgtgtggaacaagtgcctcacaataatcaccgggctcccgatccccgaccacctggattgtaccgaacagttaccttag

SEQ ID NO: 195198 - DNA, 1452 bp, synthetic construct
  misc_feature 1..1452: note = Description of Artificial Sequence: Synthetic coding sequence
  source 1..1452: mol_type = other DNA
atggagaccctggagagcgagctgacctgccccatctgcctggagcttttcgaggaccctctcttgctcccctgcgcccacagcctgtgtttcaactgtgcacatcgtattctcgtgtcacactgcgctactaatgagagtgtagagtccataactgcctttcagtgtcccacttgcagacatgtcatcaccctttctcagaggggcttggacggtctcaagcggaatgtaacactccaaaacatcatcgatcgattccaaaaagcatccgtgagcggaccaaattctccttctgagacccgaagagaaagagcattcgacgccaataccatgacttctgccgaaaaagtgctgtgccagttctgcgatcaggatccggcccaagacgctgtgaaaacttgcgttacctgcgaggtgagctattgtgacgagtgcttgaaagcgactcatcctaataagaaaccattcacaggccataggttgatcgagccgatccccgacagtcacattcgaggcctaatgtgtctcgagcacgaggacgagaaggttaacatgtattgtgtgacagatgatcagttgatctgtgccctttgtaaattggtgggccgtcatagggaccatcaagttgcagctctctcggagaggtatgacaagttgaagcagaaccttgagtcaaatctgactaacctgatcaaacggaacaccgagttggaaacactcctggctaagctcattcagacatgccagcacgtggaagtcaatgccagtcgtcaggaggccaaactgactgaagaatgtgatctgctgatcgagattatccagcaacgtagacagataattgggactaaaatcaaagaaggcaaggtgatgcgactgcgtaaattggcacaacagatcgccaactgcaagcagtgtatcgaacggagcgccagcctgataagtcaggccgagcactcactgaaagaaaacgaccacgcacgttttctgcagacagcaaaaaatatcactgagcgagttagcatggccactgctagctcccaggtgctcattccagaaataaatttgaatgacactttcgatacatttgccctagactttagcagggagaagaagctgcttgaatgcttagactatctaaccgcacccaatccacccacaatccgagaagagttatgtacagcgtcttatgacacaattaccgtgcactggacatctgatgatgaatttagcgtggttagctacgagctgcagtacaccatctttactggacaggctaacgtggtttctctttgcaacagcgccgattcctggatgattgtccccaacataaagcagaatcactataccgtccacgggctgcagagcgggactaaatacatcttcatggtcaaagccattaatcaagccggctctaggtcaagtgagcccggtaaactgaaaactaactcttag

SEQ ID NO: 195199 - DNA, 594 bp, synthetic construct
  misc_feature 1..594: note = Description of Artificial Sequence: Synthetic coding sequence
  source 1..594: mol_type = other DNA
atggagaccctggagagcgagctgacctgccccatctgcctggagctgttcgaggaccctctactgctgccctgtgcgcactccttgtgttttaattgcgcacatagaatcctcgtgtcacattgtgccacaaacgagtctgtggaaagcattaccgcattccaatgcccaacatgtcgccacgtcataactctgtcccagaggggcctcgatggtctcaaaagaaacgtcaccctgcagaacatcatagaccgttttcagaaagcctcggtaagcggccctaattcccccagcgaaacacggcgagaacgagccttcgatgcgaacacaatgaccagcgctgagaaagtgctatgtcagttctgcgaccaggatccggctcaggatgccgtcaagacctgcgtaacgtgcgaggtctcttattgcgacgagtgtctgaaggcaacccatcctaataaaaaaccctttaccgggcacaggttgatcgagcccatccctgatagccatatccggggtctgatgtgcctggagcacgaagatgagaaggtcaatatgtattgcgtgactgatgaccagcttatttgcgcactgtag

SEQ ID NO: 195200 - DNA, 2004 bp, synthetic construct
  misc_feature 1..2004: note = Description of Artificial Sequence: Synthetic coding sequence
  source 1..2004: mol_type = other DNA
atggagaccctggagagcgagctgacctgccccatctgcctggagctgttcgaggacccactgctcttgccttgcgcacacagtttgtgttttaactgtgcccatcggatactggtgtctcattgcgccaccaacgagtctgtggagtctataacagcctttcagtgtccaacgtgtagacacgtgatcaccctctcccaacgtggactggacggactgaagaggaatgtcacccttcagaacattatcgatcgcttccagaaggcgtcggtgagtggccccaatagtccttctgagacaagaagggagcgggccttcgacgctaataccatgacatctgccgagaaggtgctgtgtcagttttgcgatcaggaccctgcccaggatgcggttaagacttgtgttacgtgcgaggttagctattgtgacgagtgtctgaaggcgacccatccaaataagaagccctttactggacatcggctgatcgaacccatcccagatagtcatatcagaggactcatgtgcttagagcatgaggatgaaaaggtaaatatgtattgtgttacagacgaccaattaatatgcgcactatgtaagctcgtggggaggcatagagaccaccaagttgccgccctgagcgagcggtatgataaattaaagcaaaacctggaatctaatctgaccaatttaattaaacgtaatactgaactggagacactgctcgccaagctgatccagacctgccaacatgtggaggtgaatgcctcgaggcaggaagccaagctcaccgaggaatgtgacttgcttatcgaaatcatccagcagcgcagacagattatagggactaaaattaaagagggtaaggttatgcgattgaggaagctggcacagcagatcgctaactgtaagcagtgtatcgaacggtcagcatctctgatatcacaggctgagcattccttgaaggagaacgaccacgcccgattcctgcagactgccaagaatattaccgaacgagtctccatggcaacagcgtctagccaggtgctgatccctgagattaacctcaatgacacgtttgatacctttgctctcgacttttcccgtgaaaaaaaattgctggaatgtttggattatttgactgccccaaaccctcccactatccgggaggagttgtgcactgctagttacgatacaattactgtgcattggacatccgatgatgaattttcggtcgtgagttatgaactccaatatactatctttaccggccaggcgaatgtagtttccctatgtaactctgccgatagctggatgattgttcctaatatcaaacagaaccactatactgtccatgggctgcagtcgggaaccaaatacattttcatggtgaaagccatcaatcaggctggctctcgatctagtgaaccaggtaagctgaaaaccaattcacagcccttcaaacttgatcccaaaagtgcgcatcggaagttgaaggtctctcacgataaccttactgtagagcgcgacgagagttcttcaaaaaaaagccacacgcccgaacggtttactagccagggttcctacggcgttgcaggcaacgtgttcatcgacagcggacgccattattgggaggtcgtgatcagcgggtctacatggtatgcaattggtctggcgtataaatccgcgccgaagcatgaatggatcggtaagaactcagcaagttgggccctgtgtcgttgcaataataattgggtggtaagacacaatagcaaagagattccaatagagccagccccacacctgcggcgagtgggaatcctgctcgattacgataatgggtccattgctttctacgatgctctgaactcgatccacctctatacattcgacgtagcgttcgcccagcctgtctgcccgactttcacagtctggaacaaatgccttactatcatcaccgggctccccattcccgaccatctggactgcacagaacagctgccctag

SEQ ID NO: 195201 - DNA, 1854 bp, synthetic construct
  misc_feature 1..1854: note = Description of Artificial Sequence: Synthetic coding sequence
  source 1..1854: mol_type = other DNA
atggagaccctggagagcgagctgacctgccccatctgcctggagctgttcgaggaccctctgctgctgccatgcgctcatagcctctgctttaactgtgctcatcgaattctagtatcacattgcgccacgaatgagtcagttgagagtattacggccttccagtgcccaacatgccgacacgttataacactctcgcagcggggcctggacggccttaagcgcaacgtgaccctacagaacataatagaccgattccagaaagccagcgtatccggccctaactcccccagtgagacttctgccgagaaggttctgtgccagttctgcgaccaagatcccgctcaggacgctgtcaagacctgtgtaacatgcgaagttagttactgtgacgaatgcttaaaggccactcatccgaacaaaaagccctttacggggcataggctgatcgaacccatcccagattcgcatattagaggtctcatgtgcctcgaacatgaagatgagaaacagaaccttgaatctaacctcacaaatctaataaagagaaatacagaactcgaaactctgctcgccaagttaatccagacatgccagcacgttgaggttaatgctagtcgccaggaggcaaagctaacagaagagtgcgatctgcttatagaaatcatccagcaacgcagacaaatcatcggaacaaagatcaaggaaggcaaagttatgcgcttgcgcaagctcgctcagcaaattgcgaattgtaagcagtgtatcgaaagaagtgcctctctgatatcccaggcagagcactctctcaaagagaacgatcatgccaggttcttacaaaccgcaaaaaatatcaccgaaagggttagtatggcaacagctagcagtcaagtcctgattcccgaaattaatcttaacgacaccttcgataccttcgctctggacttctctagagagaagaaactgttggagtgcctggattatttaactgctccgaatccacccacgattagggaagagctgtgtactgctagctatgatacaatcacggtccattggacaagtgacgacgaatttagcgtggtgagctatgaactacagtacactatctttactgggcaagcgaacgtggtgtcactttgtaactcagcggatagctggatgatagtgccaaacataaagcagaatcactatactgtgcacggcttacagtctggtactaaatacattttcatggtaaaggccataaaccaagcagggtctcgctcttccgagcccggcaagctgaagacaaattcacagccctttaaacttgatcccaagtccgcccacaggaagcttaaggtctcgcacgataacctgacagtggaacgagatgaaagtagttcgaagaagagtcacacccccgagcgcttcacatcacaagggagttacggggtggccggcaacgtgtttatcgattcgggccgccattattgggaagtcgttatttctggaagcacatggtatgccattggtttggcgtataaatccgcacctaaacacgagtggatcgggaagaattctgcatcttgggccttgtgccgctgcaacaataactgggtagtgcggcacaatagtaaagaaataccgattgaacctgctccccaccttagacgcgtgggcatcctgctcgactacgacaatggctcaatcgccttttatgatgcactcaactctatccatctctacaccttcgacgtcgcctttgcccagcctgtgtgccctaccttcactgtatggaataaatgtttgaccataatcacaggtcttcccatccctgaccaccttgattgcaccgaacagttaccatag

SEQ ID NO: 195202 - DNA, 2208 bp, synthetic construct
  misc_feature 1..2208: note = Description of Artificial Sequence: Synthetic coding sequence
  source 1..2208: mol_type = other DNA
atgggcgagagccccgccagcgtggtgctgaacgccagcggcggcctgttctcgcttaagatggaaactctggaaagcgagctgacatgccctatctgtctggaattgtttgaggatccactgctcttaccctgtgctcacagcctatgtttttcgtgcgcgcacagaatcttagtctcttcatgttcttcaggggagtccatcgagcccattaccgcatttcagtgtcccacttgccggtacgtcatttcactcaaccataggggactggacggactcaagaggaacgtgactctgcagaatattatcgatcgcttccagaaggcctcagtcagcggccccaattctccatctgagtctcggcgggagcggacctaccggccaactaccgcgatgagtagcgagagaatagcctgccagttttgtgagcaggatcctccacgcgatgcagtcaagacatgtattacctgcgaggtaagctactgtgatcgttgtctgagagcaactcaccccaataaaaagcccttcacctcccacagattagttgagcctgtgccagacacacatctgcgcggcatcacatgtttggaccacgagaatgaaaaggtcaacatgtactgtgtttcagacgaccaactcatctgtgctttgtgcaaacttgtcggaaggcacagagaccaccaggtcgcctctctgaacgatagattcgaaaagctgaaacaaaccctggaaatgaacttaactaatttggtgaagagaaactcagagctcgagaatcagatggcaaaactcatccaaatttgtcagcaggtcgaggtcaacacggccatgcacgaagcaaagcttatggaagaatgcgacgaactggtggaaatcattcaacagcgaaagcagatgatcgcagttaaaattaaggagaccaaagtgatgaagcttcgcaaattggcccagcaggtggcgaattgtcgacaatgcctggagaggagcactgttctgatcaaccaggcagagcatatcctgaaggaaaacgatcaagctcgtttcctgcaatcagccaaaaatatcgccgagcgagtagccatggcaacagctagttcgcaggtgctgatacccgacatcaattttaacgacgctttcgaaaattttgccctagacttctccagagaaaaaaagcttctggaaggcctggattacctgacagcacctaaccccccctcaattagggaggagctgtgtacagccagccatgacaccattactgtgcattggatcagtgatgacgaattctcaatctcttcctacgagcttcagtacactatctttaccggccaagctaattttatctctaagtcttggtgttcgtggggcctgtggcctgaaatccggaagtgtaaagaggctgtctcatgtagcaggctggcaggcgctccgcgcggactgtataactcggttgactcatggatgattgtgccaaatattaagcaaaatcactatactgtgcacggcctccaaagcgggacacgctacattttcatcgttaaggccattaatcaggcgggttccagaaatagcgagcccacccggttgaagacaaatagccagccttttaagctggatccaaagatgacccacaagaaactgaagatcagcaatgatggtcttcaaatggagaaagacgagtccagtctgaaaaagagccataccccagagcgcttttcaggtactgggtgctacggtgccgccggtaacattttcatcgattccggctgtcactattgggaagtcgtgatgggcagttctacttggtacgctatcggcatcgcctataaaagcgctcctaagaatgagtggattggcaagaacgcctcttcctgggtgttttctcgctgcaatagcaactttgtcgttcgtcacaataacaaagagatgctggtggatgtgccacctcacctgaagcgcctcggcgttctgcttgattatgacaataacatgctatcgttctacgaccccgctaactccctccacctccacaccttcgacgttacattcatactccccgtgtgccctacttttacaatttggaacaagtccctaatgattctttctggtttaccagcccccgatttcattgattaccccgaacggcaagagtgtaattgccgcccgcaggagtcgccttatgttagcggcatgaagacctgccactag

SEQ ID NO: 195203 - DNA, 2118 bp, synthetic construct
  misc_feature 1..2118: note = Description of Artificial Sequence: Synthetic coding sequence
  source 1..2118: mol_type = other DNA
atgggcgagagccccgccagcgtggtgctgaacgccagcggcggcttgtttagcctgaagatggagaccctcgagagcgaactgacctgcccaatatgtttagaactctttgaagatcctctcctgttgccctgcgcccacagcctgtgtttttcctgcgcccatcggatattagtgagttcttgctcctcaggggaatctattgaacccataactgcttttcaatgtcccacatgccgatatgtcatatccttgaatcacaggggactggatggactgaagagaaatgttactctccagaatataattgacagattccagaaagcttctgtatccggcccgaattctccttctgaatctaggcgtgaacgtacctataggcctacaactgccatgagttccgaacggattgcttgccagttttgtgaacaggacccgccccgagatgcagtgaagacgtgcatcacgtgcgaggtctcttactgcgaccgatgtctacgggcaacacatcccaacaagaagccgttcacatctcacaggttggttgagccagtacctgatacacacttgagaggaattacctgcctggatcatgaaaacgaaaaggtgaatatgtactgcgttagtgatgaccagcttatctgtgctctgtgcaagctcgtcgggcgtcacagagaccatcaggtagcttcactgaacgacagatttgaaaagctcaagcagactctcgagatgaacttgactaacctggtgaaacgaaacagcgaactggagaaccagatggccaagctgatacagatttgtcaacaggtggaggtgaacactgccatgcacgaggctaaactcatggaggaatgcgacgaattggtcgagataatccaacagcgcaaacaaatgattgccgtgaaaataaaagagaccaaggtgatgaagttaaggaagctcgcccagcaagtggctaattgtagacagtgcctggagcgctccaccgtgttgattaatcaggcagaacacattctcaaggaaaacgatcaagctaggttcctccagagtgccaagaacatcgcagaacgagtggccatggcaactgccagtagccaggtgctcattccggacattaatttcaatgatgcatttgaaaactttgcactcgacttcagccgtgagaaaaagctcttagaggggctggactacctcacagctccaaacccaccaagtattcgagaggagctctgcacagcctcgcatgatactattacagtgcactggatttcagacgacgaatttagcatttcttcatatgaacttcaatatacaatcttcaccgggcaggccaacttcatctcactctacaattccgtggactcctggatgatcgtgcctaacataaaacagaatcattacaccgttcacggcctgcagtctggcaccaggtatatctttattgtcaaggcgattaatcaggcaggctcacgaaattccgagccaacaaggttgaagacaaattcccagccctttaagctggatccgaaaatgactcacaagaagctcaagattagtaatgacggcttgcagatggagaaggatgagagtagtttgaaaaaaagtcacacccctgagcgcttctcaggaactggatgctatggggcggcaggaaatatctttatagacagcggatgccattactgggaggtggttatgggctcttctacttggtacgccataggtattgcttacaaatcagctccaaaaaacgaatggatcggtaaaaatgcctcatcctgggtgttctcaaggtgtaactccaattttgtggttaggcacaacaacaaggagatgcttgtggatgttcctccgcacctgaagcgcctcggggtgctgttagactacgataacaatatgctcagcttttatgacccggccaattctctgcacttacacaccttcgacgtgaccttcatcctgcctgtatgccctacattcactatttggaacaagtctctaatgatcctgagcggcctacctgcccccgacttcatagactaccctgagcgccaggagtgtaactgtagaccacaggaaagcccatatgtgtcagggatgaaaacgtgccactag

SEQ ID NO: 195204 - DNA, 660 bp, synthetic construct
  misc_feature 1..660: note = Description of Artificial Sequence: Synthetic coding sequence
  source 1..660: mol_type = other DNA
atggagaccctggagagcgagctgacctgccccatctgcctggagctattcgaggacccattgctgctcccctgcgctcacagtctgtgtttctcatgtgcccacagaatactggtcagtagctgtagcagcggggagagtatcgagccaatcacagcctttcagtgtcccacctgccggtatgttattagtctgaaccacagaggcttggacgggttgaaaagaaatgtcacactacaaaatataattgatcgatttcaaaaggcgtccgtatctggacctaattcccccagcgagtctcgtcgcgagcggacctacagacctaccaccgcaatgtcttctgagagaattgcttgtcagttctgtgagcaggatccaccaagggatgcggtgaaaacctgtatcacctgtgaggtttcatattgtgacaggtgcctaagggctacacaccccaataagaaaccattcacatcccataggctcgtggagcctgttcccgacacccatctgagggggatcacttgtctggatcacgagaacgagaaagtcaatatgtactgcgtctccgacgaccaactgatctgtgccctctgtaagcttgttgggcggcatagagatcatcaagtggcttcactgaatgatcggttcgagaagctatag

SEQ ID NO: 195205 - DNA, 1407 bp, synthetic construct
  misc_feature 1..1407: note = Description of Artificial Sequence: Synthetic coding sequence
  source 1..1407: mol_type = other DNA
atggagccccagcccggcggcgcccggagctgccggcggggcgcccccggcggagcctgcgagctcggacctgctgccgaagctgctccaatgtccctagcaatccatagcaccaccggaacgcgatatgacctggcagtgccaccggacgaaactgtagaagggctaagaaagcggttatctcagaggctgaaggtgccaaaggagcgcctagccctgctgcacaaggacactcgtttgagtagcggaaagctgcaggaattcggtgttggagatggttcaaagcttactctagtcccgacagtggaagccggccttatgtcccaggcaagtcgtcccgaacagtccgtgatgcaggccttggagtctttaactgaaacccaggtttctgattttctcagcggccgctctcccctcactcttgccctgagggtgggggaccatatgatgtttgtgcaacttcagttggccgcccagcatgccccgctgcagcaccggcatgtcctggcagccgccgccgccgccgccgcagcccgtggcgatcccagtatagcctcgccagtgagctcgccttgccggccagtcagcagtgcagcaagagtccctccggtgccaacctccccatccccagcaagccctagcccgatcacagcgggctctttcaggtctcatgccgcatcaaccacatgtcctgaacagatggactgcagcccaacagcttcctccagcgccagccccggggccagcactacaagtactccaggtgctagccctgctcctcggtctaggaagcccggggcagtcatagaatctttcgttaaccatgcccccggagtcttctccggaaccttcagcgggactctccatcctaactgccaggattcatctggcaggccacggcgagacataggaaccatacttcagatccttaatgacttactctccgctactcggcactatcaggggatgccccctagcctcgctcaattgagatgccacgctcagtgtagtcctgcatcccccgccccggatctggcacctaggaccacctcttgtgagaagctgacagccgccccaagcgcctcgctgctgcagggtcaatcacagattagaatgtgcaaacctcctggggatcgcctgcgccagacagagaatcgggcaactaggtgcaaggtggagagactgcagctgttgctgcagcagaagaggttaagacgtaaagcccgacgcgacgctagaggtccctatcactggtccccttcgcggaaggccggaagatccgacagctcatccagcggaggagggggtagcccaagcgaagcctctggcctggggctggattttgaggactcagtatggaagccagaggtgaatccggatatcaaaagcgagtttgtggtggcttag

SEQ ID NO: 195206 - DNA, 771 bp, synthetic construct
  misc_feature 1..771: note = Description of Artificial Sequence: Synthetic coding sequence
  source 1..771: mol_type = other DNA
atgggcgagcccagccgggaggagtacaagatccagagcttcgacgctgagactcagcaactcctcaaaacagccctaaaagtggcgtgcttcgaaacagaggatggcgaatactccgtttgtcagcgcagctactcaaattgctccaggctgatgcctagcaggtgcaatacccaatacagggacccaggagctgtagacctagaaaaggtggcgaatgtgattgtggaccattccctccaggactgcgtcttctccaaagaggcaggacgtatgtgttatgccatcatccaagccgaatcaaagcaggcaggacaaagtgtgttccgaagaggtctgcttaataggttgcaacaggagtaccaggcccgggagcaactacgcgccagaagtctgcaagggtgggtctgctacgttacgttcatctgcaatattttcgactacctacgggttaacaacatgcctatgatggctttagtgaatcccgtgtacgactgcctgtttcggctcgcacagcctgattctctgagcaaggaagaagaggtggactgcctggtacttcagctgcatagggtgggcgagcagctggaaaaaatgaatggtcagcgcatggacgagctgttcgtgttaatacgcgatggtttcttgctgccaacgggactcagctcattggcccagctcctgttgctggaaattatagaattcagggccgccggttggaagacgacacccgcggcgcataagtattactattccgaggtgtccgattag

SEQ ID NO: 195207 - DNA, 669 bp, synthetic construct
  misc_feature 1..669: note = Description of Artificial Sequence: Synthetic coding sequence
  source 1..669: mol_type = other DNA
atgggcgagcccagccgggaggagtacaagatccagagcttcgacgctgagacacagcagttgctgaaaactgcacttaaggaccccggtgcagtagacctggaaaaggtagctaacgttattgtcgatcactccctgcaggattgcgtgttttccaaggaggctggtcgcatgtgctatgccattatccaggccgagtccaagcaggctgggcagagtgtctttcggaggggcctactcaacagactccagcaagaataccaggcccgagaacagttacgggcccgttccctgcaggggtgggtctgctatgtgacctttatctgcaatatcttcgattatctgcgcgttaataacatgcctatgatggcgctggtgaatcccgtgtatgattgtcttttccggttagcccagcccgattcattgagcaaggaggaggaagtggattgcctggtgttgcagcttcaccgggtcggcgaacagctggaaaagatgaatggacagcgcatggacgaactcttcgtgctgatccgagatggttttctgctcccaaccggcctgtcatcactggcacaattattgttgttggaaatcattgaatttagggcggccggatggaagacgaccccagccgctcacaagtactattactctgaagtgtctgactag

SEQ ID NO: 195208 - DNA, 792 bp, synthetic construct
  misc_feature 1..792: note = Description of Artificial Sequence: Synthetic coding sequence
  source 1..792: mol_type = other DNA
atgggcgagcccagccgggaggagtacaagatccagagcttcgacgccgaaacccaacagctgctgaaaacagccctgaaagccccatctttagagtgcacagtcgcctgttttgaaacagaggacggcgagtactctgtctgccagcggagctactctaattgttctcgccttatgcctagcagatgtaatacccagtaccgcgaccctggtgccgtagatttagaaaaggtagctaatgtgatcgtggaccattcactccaggattgcgtgtttagcaaggaggccgggcggatgtgttatgccattattcaggccgagagcaaacaggcaggccaatcagtttttagacgagggcttctgaacagactgcagcaggaataccaggccagagagcagctcagagcccggtctctacagggctgggtgtgctatgtaactttcatctgcaatatcttcgactatctaagggtcaacaatatgccaatgatggctttggtgaatcctgtgtacgattgcttgttcagactggcgcagcccgactcgctgtccaaggaggaagaggtggattgtcttgtactgcagctccatcgcgtcggagaacagcttgaaaaaatgaatggacagcggatggatgagctctttgtactgatccgggatggcttccttcttcctaccgggctctcttcgctcgcgcaattactcctactggagatcattgaattccgtgccgcagggtggaagacaacaccagcagctcacaagtactactactcggaagtctccgattag

SEQ ID NO: 195209 - DNA, 1164 bp, synthetic construct
  misc_feature 1..1164: note = Description of Artificial Sequence: Synthetic coding sequence
  source 1..1164: mol_type = other DNA
atgccccggccccggctgctggccgccctgtgcggcgccctgctgtgtgcaccaagccttctggtagctctcgacatttgcagcaaaaacccatgtcataacggcggactgtgcgaagaaatcagccaggaagtgcgcggggacgtcttcccttcttacacatgcacgtgcttgaaaggctacgccggtaaccactgtgagacgaaatgcgtggagcctttgggcctggagaatgggaatattgctaattcccagatagcagcctcctcagtgagggtgacgtttctgggactgcagcactgggtccccgaattagcccgacttaatcgagcaggtatggtgaacgcctggacaccttcttctaacgacgataacccgtggattcaggtgaacttattgaggaggatgtgggtcaccggcgtcgttacccagggcgcctccaggctggctagccatgagtatttaaaagccttcaaagtagcgtactcacttaacggtcacgagttcgattttatccacgacgtgaataagaaacacaaagagttcgtaggcaactggaacaagaatgccgtgcatgttaaccttttcgaaacaccagtggaggctcagtacgtgagactttatccaacctcatgtcataccgcctgtaccttgcggtttgagctgctcggttgcgagctcaacggctgtgccaaccctctgggcctgaaaaataacagcatccccgataaacagattaccgctagctcatcctataagacttggggattgcatctatttagttggaatccctcctacgctagattagataagcagggaaactttaatgcatgggtggccgggtcttacgggaacgaccagtggctgcaggtcgatcttggttctagtaaggaggtgacaggcatcatcacacagggcgcccggaacttcggctctgtgcagttcgtggcctcctataaggtggcctactccaacgatagtgcaaattggactgagtaccaagatcctcggacagggtcctctaagatctttccaggaaactgggataaccattcacacaaaaagaacctgttcgaaacccctatactcgcgaggtatgtcaggattctgcccgttgcttggcacaataggattgcgttgcgcctggaattgctggggtgctag

SEQ ID NO: 195210 - DNA, 1140 bp, synthetic construct
  misc_feature 1..1140: note = Description of Artificial Sequence: Synthetic coding sequence
  source 1..1140: mol_type = other DNA
atgtggcccttccccgagggcggcaacaccatccccatcctgcacactgatatctgcagtaaaaatccgtgtcacaacggggggttgtgtgaggaaatatcacaagaggtaaggggggacgtgttcccatcttatacttgtacatgtctcaagggctacgccggaaaccactgcgagactaaatgcgtcgagcctctcggattggaaaatggtaatattgcgaactctcagatcgctgctagcagcgtgagagtaacctttcttgggttgcaacactgggtccccgaactggcacgcctgaatcgggccggtatggtaaatgcctggacgccttcatctaatgacgataacccatggatccaagtcaatctcttgcgcagaatgtgggtgaccggggtggtgacgcagggtgcttcacgcctggcaagccatgagtaccttaaagctttcaaagtggcctatagcctaaacggtcacgagttcgactttatacacgatgttaacaagaaacataaggaattcgtgggaaactggaacaagaatgcggttcacgtcaatctgttcgagacccctgtggaagcacagtatgtgcggctgtacccaacttcatgccacacagcctgcaccttgcgtttcgaacttctgggctgtgagctgaacggatgtgcaaatcccctgggattaaaaaacaactcaattccagataagcagatcactgcctcaagcagctataaaacgtggggcctgcaccttttctcctggaatccatcatatgcgcgcctggataagcagggaaacttcaacgcttgggtggccggctcttatgggaacgaccaatggctgcaggtcgatcttgggtcatccaaggaggtgacgggcatcatcacgcaaggcgccagaaacttcggatccgtccagttcgtggcgtcctataaggtggcatattctaacgactcagccaattggaccgagtaccaggacccacgcactggtagttcaaagatctttccaggtaactgggataaccactctcacaaaaagaatctctttgaaactccaattctggctagatatgtgagaattcttcccgtcgcttggcacaatcggatcgctttgcgcctcgaactgttggggtgttag

SEQ ID NO: 195211 - DNA, 1008 bp, synthetic construct
  misc_feature 1..1008: note = Description of Artificial Sequence: Synthetic coding sequence
  source 1..1008: mol_type = other DNA
atgccccggccccggctgctggccgccctgtgcggcgccctgctgtgcgccccatccttgctagtggctctggacatttgtagtaaaaatccatgtcacaacggaggcctctgcgaagagatttcccaggaggttcggggggacgtcttcccctcctacacgtgtacttgtttaaaaggatacgcaggaaatcactgtgaaacaaagtgcgtggagccgttgggattggaaaatggcaatatagccaactctcagatcgccgcctcgtccgttcgggtaacgtttctggggctgcaacactgggtccccgagctggcccgcctcaaccgcgccgggatggttaacgcctggaccccctcgagtaacgacgacaatccttggattcaagtgaatcttctgaggcgtatgtgggtgacgggagtggtgacccagggtgcaagtaggctggcttcccatgaatatttaaaggcctttaaggtggcatatagcctaaatggtcacgaattcgactttatccacgacgtcaataaaaagcacaaggagttcgttgggaattggaataagaatgcagttcacgtgaatttgttcgagacgcctgttgaggcgcagtatgtacgtttgtacccaacgtcttgccacactgcatgtacacttcgattcgaactgcttggttgcgaacttaatggctgcgcaaacccgctggggctcaagaacaactccatccctgacaagcagattaccgccagctctagctataagacctgggggttgcacttgttctcttggaacccttcctatgcccggctcgacaagcagggaaactttaatgcctgggttgcgggaagttacggaaatgaccagtggctgcagatttttcctggcaactgggacaaccattctcataagaagaacctgttcgagactccgatcttggccaggtatgtccgcattcttcctgttgcttggcacaatcgaattgcactgaggcttgaattattgggatgttag

SEQ ID NO: 195212 - DNA, 1929 bp, synthetic construct
  misc_feature 1..1929: note = Description of Artificial Sequence: Synthetic coding sequence
  source 1..1929: mol_type = other DNA
atgccctgcggcgaggactggctgagccaccccctgggcatcgtgcagggattcttcgctcaaaatggcgttaatcctgactgggaaaaaaaggtgatcgaatattttaaagaaaaattaaaagaaaataacgcaccgaagtgggtcccatctctgaatgaagtgcccttacattatctcaagcccaatagcttcgtcaagtttcgatgtatgatccaggacatgttcgaccccgaattttacatgggtgtgtacgaaacagtcaaccagaacacaaaggcacacgtgctgcatttcggtaaataccgggacgtggctgagtgtggaccacagcaggagctagacctgaacagccccaggaatactaccctggagcgacagactttctattgtgttcccgtcccaggggagtcaacttgggtgaaggaggcatacgtgaatgctaatcaggcccgggtgagcccatcgacaagttatactcctagccgccacaagagatcatatgaagatgacgatgatatggatctgcagcctaacaagcagaaagatcagcacgcgggcgccaggcaggccgggagcgtgggcgggcttcagtggtgtggcgagccaaagcgattggagactgaggcaagtactggtcaacaactcaactccctgaatttgagtagcccttttgacctcaacttccctctgccaggagaaaaaggtcccgcttgcttagttaaggtatacgaggactgggattgttttaaagtcaatgatattttggagttgtatggtatcctgagcgtggatccagtcctgagtatactgaacaatgatgagagggacgcttccgctcttctcgatcccatggagtgcacagatacagcagaagaacagcgagtccactcaccccccgcgagcctggtcccacggattcatgttattctcgcccagaagttacagcacattaatccactcctcccagcctgcctcaataaggaagagagtaagacctgcaagttcgtttcatctttcatgagcgagttaagtccagtgcgcgcggagttgctcggctttctaacccacgccttgctgggagattccctggctgcagagtatctgatcctgcatctcattagtaccgtgtacactagacgcgacgtgctcccattgggaaagttcaccgtaaacctgtcaggctgtccacggaatagcacattcacggagcatctttacaggatcatccagcacctggttccggccagctttagactccaaatgaccatagagaacatgaatcatctgaaattcatccctcacaaagattataccgccaacaggctcgttagtggccttcttcaacttccttcaaacacgtctctggtgattgacgagacactgctggagcagggacagctagatacacccggggtgcacaatgtgacagctctgtcaaacctcatcacatggcagaaggttgattacgacttctcataccatcagatggagttcccctgcaatatcaatgtgttcatcacttctgagggaaggtctttgcttcccgcagattgccaaatacatttgcagcctcagctgattccgccgaacatggaggagtatatgaattcacttctttcggctgtcctaccctccgtgctgaacaaatttcggatatacctgacgctactgcggtttttagaatatagtatatccgacgagattaccaaggccgtcgaggacgattttgtggaaatgcgcaagaacgatccccagagtattactgccgatgatttgcaccagctgcttgtagtggctcgctgcttgagcctgtctgcgggtcaaactacattgtcgagagagagatggcttcgggccaagcagcttgaaagcctgcggcggacgaggctgcagcagcagaaatgtgtgaacggaaatgagctgtag

SEQ ID NO: 195213 - DNA, 1923 bp, synthetic construct
  misc_feature 1..1923: note = Description of Artificial Sequence: Synthetic coding sequence
  source 1..1923: mol_type = other DNA
atgccctgcggcgaggactggctgagccaccccctgggcatcgtgcagggattctttgcccagaacggagtgaatccagactgggagaagaaagtgatagagtactttaaagaaaaactgaaggaaaataatgcccccaaatgggtgccttccctgaatgaagtcccgctccattatctgaaaccaaactcgtttgtgaagtttaggtgcatgattcaggatatgtttgaccccgagttctacatgggcgtgtacgagacggtaaaccagaataccaaagcccacgtgctgcattttggcaagtaccgagatgtggccgaatgcggcccgcaacaggaactggatctgaattccccgaggaataccactctggagcggcaaaccttctactgtgtccccgtgcccggggaatcaacctgggttaaagaagcttacgttaatgccaatcaagcgcgagtgtctccctctacctcctatactccctctcgtcacaaacggagttacgaagacgacgacgacatggatctgcagccgaacaaacaaaaggatcagcacgccggggccaggcaagctgggagcgtgggcgggcttcaatggtgtggcgaaccaaaacgtctagagacagaggccagtactgggcagcagctcaacagtttgaacctgtcatctccttttgacctgaattttcctctgcccggcgagaagggcccagcatgccttgtaaaggtctacgaggattgggattgcttcaaagttaacgatatcttagaactctacggcatcctctcagttgaccctgtgctcagtatactgaataatgacgaaagagatgcctcagccctgttagacccaatggaatgtacggacacagccgaagagcagcgggtgcatagtcccccagcatctcttgtgccaagaatccatgtgatcctcgcgcagaagcttcaacatatcaaccctctgctgcctgcatgtctgaataaggaggaatccaagacctttgtgtccagtttcatgagcgaactcagtcccgtgcgcgccgaacttctcggatttctaacacacgcacttctgggagacagcctggccgctgagtatctaatcctgcatctcatctctacggtctatacacgaagagacgtgcttcccctgggcaaatttaccgttaacctgagcggctgccccagaaactccaccttcaccgagcacctgtatcgaattattcagcatctggtgcccgccagtttcagactgcaaatgaccattgaaaatatgaaccatctgaagttcattcctcacaaagactatacggccaatcgattggtgagcgggttgttgcagctcccatccaatacttccttagtgatcgacgaaacactccttgaacaggggcaattagatacccccggggtccataatgtgacagccctgtctaatcttattacatggcagaaagttgattatgatttcagctatcaccaaatggaattcccatgcaacatcaatgttttcatcacctcagaagggcgaagccttctgcccgccgactgtcagatccatctgcagccacaactgatccctcccaacatggaagagtatatgaactcactcctgtcagctgttcttccctctgtcctaaataagttcagaatctacctgaccctgcttcgctttctcgagtactcgatctccgacgaaataacaaaagccgtcgaggatgattttgtggagatgcgcaaaaacgatccacaatccatcactgctgacgatctccatcagcttttggtagttgcccgctgtcttagcctgagcgctggacaaacaacactgagcagggagagatggttaagggccaagcagttagaatctctgcggagaactcgtctccagcagcagaaatgcgtaaacggaaacgaactgtag

SEQ ID NO: 195214 - DNA, 2628 bp, synthetic construct
  misc_feature 1..2628: note = Description of Artificial Sequence: Synthetic coding sequence
  source 1..2628: mol_type = other DNA
atggacgaggaggaggacaacctgagcctgctgaccgccctgctggaagaaaacgaatccgccttggattgtaattccgaggaaaacaattttctgactagggagaacggtgagccagacgcctttgacgagctgttcgacgccgacggtgatggtgaatcttacaccgaagaggctgatgatggagagaccggggagaccagagacgaaaaagagaatcttgccacactgttcggtgacatggaagatctgactgacgaagaggaggttccggccagccagtctaccgagaaccgagttcttccagccccggcaccacgaagggagaagacgaacgaggagctgcaagaggagctgagaaacttacaagagcaaatgaaagcactgcaagagcagttaaaggtgactaccataaaacagacagcaagcccagctcggctgcaaaagagtcccgtggaaaaatcccccagaccccccctcaaggagagaagagtgcagaggatccaggaatcaacgtgttttagcgctgaactcgacgttccagctctccctagaactaagcgggtcgcgcggacgcccaaagcctcccctcctgatccgaagagttcctccagccgcatgacctcagcgccttctcagccattgcagacgataagcaggaataagccttctggaatcacacgaggccagatcgtggggaccccaggttcttcaggagaaacaacacagcctatctgtgtagaggcctttagcggactaaggttgcgcagacctagagtgtcatccaccgagatgaataaaaaaatgacagggcggaagttgatacggctgtctcagatcaaagaaaagatggcacgcgagaagctcgaagagattgactgggtcacattcggtgtgattcttaagaaggttacgccacagagtgttaatagcggaaagaccttcagtatctggaagcttaacgacttgagagatctcacccagtgcgtgtcgctgttcctgtttggtgaggtacacaaggctctgtggaaaacagaacagggcaccgtggtggggattctgaatgcaaaccctatgaaacccaaagatggctccgaggaagtttgtctctcaattgaccaccctcagaaggtgctaattatgggggaggcactggacctcggaacctgcaaggccaaaaagaagaatggagagccctgcacccaaacagtcaacctgagagattgtgaatattgccagtatcatgtacaggctcaatacaaaaaattgtccgctaaaagggccgaccttcagtccacattttccggcggccgcattcctaagaagtttgccaggagggggactagcttaaaagagcgcttgtgccaggatggcttctactacggtggggtatcatcggcttcctacgctgcttccatcgccgccgctgtggcccctaaaaagaaaatacagaccacactttctaacctcgtggttaaaggtactaatttgattatccaggagaccaggcagaagctgggaatccctcaaaaatctctgtcttgctctgaggaatttaaggaattgatggatctgcctacctgtggtgctagaaaccttaagcaacacttggctaaggcgactgcatccggaatcatgggcagccctaagccagccattaaatctatctccgcatccgctttgctaaagcagcagaaacagagaatgctggaaatgagaaggcgcaaatcggaagagattcaaaagcgtttcctgcagtcttcttccgaggtcgagagccccgctgtgcccagctccagtcgacagcctccagcccagcccccgcgtacaggatctgagttccccagactagagggtgcccctgcaacgatgacaccgaaacttggccggggagtgctggaaggcgatgacgtccttttttatgatgaaagtcccccgccacgtccaaagctgtctgcactagcagaggccaagaaattggctgcaattacaaagcttcgggccaaagggcaggttctgacaaagaccaacccaaatagcattaagaaaaagcagaaggacccccaggacatactcgaggtcaaggaaagggtggaaaagaacactatgttcagcagccaggcagaagatgaactggaacctgctcggaaaaagcgacgggaacaattggcctacctcgagagtgaagaattccaaaagattctgaaggctaaaagcaagcacacaggtattctgaaagaagcggaggctgaaatgcaggagcgctacttcgaacctctcgtgaaaaaggaacagatggaagagaagatgcgcaacatacgcgaagtcaagtgccgcgtcgtgacttgcaaaacctgcgcctacacacatttcaagcttctagagacgtgtgtgagcgaacagcatgaatatcattggcacgatggggtcaagcggttctttaagtgtccctgtgggaaccgtagcattagcctcgacaggctacctaataagcattgtagcaactgtggcctttataaatgggagcgcgacggcatgttaaaagagaagaccgggcccaaaattgggggggagaccctcctccccaggggagaagagcatgccaaattccttaactccctcaagtag

SEQ ID NO: 195215 - DNA, 2568 bp, synthetic construct
  misc_feature 1..2568: note = Description of Artificial Sequence: Synthetic coding sequence
  source 1..2568: mol_type = other DNA
atggacgaggaggaggacaacctgagcctgctgaccgccctgctggaggagaacgaatctgccctggattgtaatagtgaggaaaacaacttcctaacacgggaaaacggcgagcctgacgcatttgacgagctattcgacgccgacggcgacggcgagagctatacagaagaagccgacgatggcgagacaggcgagacacgggatgaaaaagagaacctggcaacactattcggggatatggaggacctgacggatgaagaggaggtacccgccagccagtcaacggaaaacagagtgcttcccgcgcctgccccaagaagggaaaaaaccaacgaggagcttcaggaggagctgcgcaacctgcaggagcaaatgaaggcgctacaggagcagttaaaggtcacgactatcaagcagacggcaagccctgcccggctacagaaatctcccgagaaaagtccgagacccccattgaaagaacgccgggttcaaagaattcaagaatcgacttgcttttccgccgagctcgacgttcccgcacttccgcggactaagagagtggctaggactccgaaggcaagcccacctgaccctaagtcatccagctctcgtatgacaagtgcgccctctcagccactgcagacgatatctagaaacaaacctagcggcataacccgcggccagatcgtaggcacccctgggtccagtggtgagacaacccaaccgatctgcgtcgaggctttcagtggtctcaggctgaggcgaccacgcgtctctagcaccgagatgaacaagaaaatgacaggaagaaaactcataaggctgtcccagattaaggaaaagatggccagagagaaactggaagagattgattgggtgacctttggggtgattctcaagaaggtcaccccacagagcgtcaattctggtaaaacttttagcatttggaaactaaatgacctgcgggacttaacacagtgcgtttccctattcctgtttggagaggtgcacaaagccttatggaagacagaacaaggcacagtggttggaatcttgaacgccaaccctatgaaacccaaagacggcagtgaagaggtgtgcctctccatcgaccaccctcagaaagttctcattatgggcgaagcacttgacttgggaacctgcaaagccaaaaaaaaaaacggcgagccatgtactcaaaccgtgaaccttcgggactgcgagtactgtcagtatcacgtacaggcgcagtataaaaagctgagtgctaagcgggctgaccttcagtctaccttctcgggcggaagaattccaaagaagtttgcgaggagaggtaccagcctgaaagagcgactttgccaggatggattctactatggcggagtgagcagtgctagttacgccgcctccatcgcagctgctgtcgcccccaagaagaaaatccaaactacactgagtaacctggttgtcaagggaacaaaccttattatccaggaaacccgtcagaaactgggcattccacagaaatccctttcatgcagcgaagagtttaaggagctcatggatctccctacctgcggagccaggaatctgaagcagcatcttgcaaaagccactgctagtggcatcatgggctctcccaagcctgctatcaaatccatttccgcttccgcactcctcaaacaacagaaacagagaatgctggagatgcgtaggagaaaatccgaggaaattcagaagcggtttctgcaaagttcctctgaagtcgagagcccggcagttccgagctccagtcgtcagccccccgcccagccaccccgcaccggaagcgagtttccccgactggaaggcgctccagcaactatgacgcctaagctggggaggggggttctggagggagacgacgtcctgttctatgacgagagtcccccaccacggcctaaattgtccgccctcgcagaggccaaaaaattggccgcaatcacgaagctcagggcaaagggtcaagtgttgaccaagaccaatccaaactcaatcaagaagaagcagaaagacccacaggatatcttggaagtcaaggaacgcgtggagaaaaatactatgttcagctcccaggctgaagacgagttggagcccgctaggaagaaaaggcgcgaacagttggcctaccttgaatccgaggaattccaaaaaatcctgaaagccaagagtaaacacactggcattctgaaagaggccgaggctgagatgcaagaaaggtacttcgaacctctcgtgaagaaggaacagatggaggagaaaatgaggaatattcgggaggtaaagtgcagagtggtgacttgcaaaacatgcgcttacactcatttcaagctgctggagacatgtgtctccgaacaacacgagtatcactggcacgatggagttaagcgcttttttaaatgcccctgcggaaacagaagtatctccctggaccggttacctaataagcactgttccaactgtggcctctacaaatgggaacgcgacggcatgctcaaagtatgccacttacgtactaacttctag

SEQ ID NO: 195216 - DNA, 2625 bp, synthetic construct
  misc_feature 1..2625: note = Description of Artificial Sequence: Synthetic coding sequence
  source 1..2625: mol_type = other DNA
atggacgaggaggaggacaacctgagcctgctgaccgccctgctggaggagaacgagtcagctttggactgcaatagtgaggaaaacaacttccttacacgagagaacggagaaccggacgcttttgacgagctattcgacgcagacggggatggagagtcttataccgaagaggcagacgatggggaaaccggggagacccgcgatgagaaggagaacctggctacgctgtttggagatatggaggacctgaccgacgaggaagaggtacccgcctcccagagtaccgagaacagggtattacctgccccagcacccaggagagaaaaaaccaatgaggaactgcaggaagagttaaggaatcttcaagaacagatgaaggcactgcaagagcagcttaaggtaactacgatcaagcaaaccgcaagtcccgcacggctgcaaaaatctcccgaaaaatctccccgccccccgctcaaagaacgccgggtacagcgcatccaggagtcaacgtgcttcagcgctgaacttgacgttccggctctgcctcggacaaaacgggtggcaaggacgcccaaagcgtctccacccgatccgaaaagttcatccagccgtatgaccagtgcccctagccagccactacagaccatctctaggaacaagccttccggcattacaagaggccagatcgtcggcactccagggagtagcggagagaccacccaacccatctgcgtagaagctttttcgggactccgcttaagacgcccgcgagtctcctcaaccgagatgaataagaaaatgactggccgaaagctgatcaggctttcccaaatcaaagagaagatggctcgcgaaaaactcgaggagatcgactgggttacttttggcgtgatcctgaaaaaagttacaccccagagcgtcaactccgggaaaactttttctatttggaaactcaatgacctgagagatctgacgcaatgcgtgtctttatttttatttggagaagttcacaaggccctgtggaaaacggagcagggaaccgtggtgggaatcctgaatgccaacccgatgaagcccaaagacggctctgaagaagtgtgcctatcaatcgaccacccccaaaaggtcctcatcatgggcgaagcacttgatttaggcacctgtaaggcaaaaaagaaaaatggtgagccatgcacgcaaacggttaatctccgcgactgtgagtattgtcagtaccacgttcaggcacaatacaagaagttaagtgccaaaagggctgacctccagtctaccttttctggaggtcgaatccctaagaagtttgcaaggcgcggtacgagcttgaaagagcgcttatgccaggatggattttattatggtggcgtgagtagcgccagttatgccgcttccattgccgcagcagtcgcccctaagaagaagatccagactacactcagcaacctggtggtcaaaggaaccaatctcatcattcaggagactcgacagaaactcgggatcccacagaaatccttatcttgttccgaggaattcaaggagcttatggacctgccgacatgcggcgcccgcaacctgaaacagcacctggccaaggccacagcctccgggattatggggtccccgaagcctgccattaagtccatatctgcaagtgccctgttgaaacagcaaaagcagcgcatgctcgaaatgcggcgcaggaagtccgaggaaatccagaagcgcttcctgcagtcttcaagtgaggtggaaagcccagcagttccatcgtcttcacgacagccgccagcccagcccccacgtactgggagtgagtttcctagattggagggggcgccggctacgatgactcccaaactaggaagaggggtgctcgagggcgacgatgtattgttctacgacgagtccccacccccacggcctaagctctcagctctcgccgaggctaagaagctggcggctattacaaagctgcgggccaagggtcaagtgctcacaaagaccaacccaaactcaattaagaaaaaacagaaggacccacaggacatcctggaagtgaaagaacgggtggagaaaaatacaatgttttctagccaggccgaagatgaactggagcctgcaagaaagaaaagaagagagcagctggcctatctcgaatctgaggaatttcagaagatccttaaagccaagtcaaagcacacaggtatcctcaaagaggctgaggcagagatgcaggagcggtacttcgaaccgttggtgaagaaggaacaaatggaggagaaaatgcgaaatatccgggaggtgaaatgtcgggtcgtgacgtgcaagacttgtgcgtatactcacttcaaactgctggagacatgtgtctcagagcagcacgagtaccactggcacgacggggtgaaacggttcttcaagtgtccatgtgggaacagatcgatcagtctggatcgtctccctaacaagcactgctcgaactgcggactgtataaatgggagcgcgatggcatgttaaaagagaagaccggacccaagattggaggtgagaccctgcttcctcggggcgaggaacacgcaaagtttctgaacagcttgaagtag

SEQ ID NO: 195217 - DNA, 2628 bp, synthetic construct
  misc_feature 1..2628: note = Description of Artificial Sequence: Synthetic coding sequence
  source 1..2628: mol_type = other DNA
atggacgaggaggaggacaacctgagcctgctgaccgccctgctggaagagaatgagagtgcattagactgcaactccgaagaaaacaacttcctgaccagagaaaatggtgaacccgacgccttcgacgagctcttcgatgctgacggtgacggggaatcatacacggaggaagccgacgatggcgagaccggcgaaacgagagatgagaaggagaacctggctactcttttcggcgacatggaggatctgaccgatgaggaggaggtacctgcctcacaatccacagagaatagggtcctccccgctcctgcccccagaagggagaaaactaatgaggaacttcaggaagagcttcggaacctccaagagcagatgaaagctctgcaggaacaacttaaggtaacaacgattaagcagaccgcttcgcccgcgcggctgcagaagagtcccgtggagaagtcccccaggccacccctgaaagagaggcgcgtgcaaagaatacaggaaagcacttgcttctctgccgagcttgatgtgcccgctctacctcggaccaagcgcgtggccaggacccctaaggcatctcctcccgatcccaaatcttcttctagtcgcatgaccagcgccccatcgcagcctctgcagacgatctcacgcaataaacctagtggaattaccaggggccagattgttggaacacccgggtctagtggggagacgacccagcccatttgtgttgaagcatttagtggtttacgcttacgccgcccacgggtgtcatcaaccgaaatgaacaaaaagatgaccggaagaaagctcattaggctgtcccagattaaagagaagatggctagagaaaagctggaggaaatagactgggtcacctttggtgtaatacttaaaaaagttactccccagtctgtaaattccgggaagactttctctatatggaagctgaacgatctgcgtgacttgacacaatgtgtgtcactgtttctctttggggaggtgcataaggccctttggaaaaccgaacaggggacggtggttgggattctcaacgccaacccaatgaaacctaaagacggtagcgaggaggtatgtctgtctatcgaccacccccaaaaagtcctgattatgggagaggcactagacctcgggacttgtaaggccaaaaagaaaaatggtgaaccatgtactcagactgtaaatctccgtgactgcgaatattgtcaatatcacgtccaagcgcagtacaagaaattgagcgcaaagcgggctgacttgcagtctacttttagcggcggccggattccaaaaaagtttgccaggcgtggcacttcactgaaagagaggctgtgtcaggacgggttctattacggaggtgtgtcctccgcctcctatgcagcgtcgatcgcagccgccgtggcacccaagaaaaagatccagactacactgagtaaccttgttgttaagggcacaaatctgatcatacaggaaacaaggcagaaattaggtataccacagaagagtctgtcatgttcagaagagttcaaagaactgatggatctgcccacttgcggagctcggaacctcaagcagcacctggcaaaggctacagctagcgggattatgggatccccaaagcccgccatcaaatccattagcgcatctgccctgctcaaacagcagaaacaacggatgttggagatgcgaagacgcaaaagcgaggagatccaaaaaaggttcctgcaaagttcaagtgaggtagagagtcctgccgtgccctcttccagccggcagccccccgcacagccgccccgcaccggctctgagttccctcggctggaaggtgcgccagctacgatgacccctaagttagggcgaggggttctggagggagacgatgtgttattttacgatgagtcccctcctcctagacctaaactttctgcactcgccgaggccaagaagctcgccgcgataacaaagctgcgagctaagggtcaggtgctgactaagactaaccctaactctatcaagaaaaaacagaaagacccgcaggacattttggaggtaaaggaaagggtggagaagaatactatgttttcctcacaagccgaggatgaactggagcccgctcgtaagaaacggagggagcagctggcgtaccttgagtccgaggaattccagaaaatcctgaaagcgaaatcaaaacacacagggatcttgaaagaggctgaggccgaaatgcaggagcgatattttgaaccgctggtgaagaaagaacagatggaggagaaaatgcgaaatatcagagaagtgaaatgtcgggtggtcacctgcaaaacatgtgcttacacgcacttcaagctgctagagacatgcgtttccgagcagcatgagtaccattggcacgacggtgtaaagcgattcttcaagtgtccctgcggcaaccgatccataagcctcgatagactgccaaacaagcactgctccaactgtgggctatataagtgggagcgggacggaatgctgaaggaaaagacaggtccaaagatcggcggcgagacgctcctgccaaggggagaggaacatgccaaattcctaaatagcctgaaatag

SEQ ID NO: 195218 - DNA, 2466 bp, synthetic construct
  misc_feature 1..2466: note = Description of Artificial Sequence: Synthetic coding sequence
  source 1..2466: mol_type = other DNA
atggacctggccgccgccgccgagcccggcgccggcagccagcacctggaagtgcgagatgaggtcgcggagaagtgccaaaagctgttcctggatttccttgaggaattccagagttccgacggcgagatcaagtaccttcagctggccgaggagctgatacgtcctgaacgcaacaccctggtggttagttttgtcgacctggagcagttcaatcagcagctgtcaaccaccatccaggaggagttctaccgtgtctacccatacctgtgcagagctctgaaaacctttgtgaaggaccgaaaggaaattccccttgccaaggacttttacgtggccttccaagatctgccaacacggcataagattagggagcttacaagcagtcgaataggtctgctcaccaggatatcagggcaagtggtcaggacgcatccagtgcacccggaactggtcagcggaacattcctttgcttggactgccagaccgttataagagatgtggagcaacagtttaagtatacccagcccaacatttgtaggaaccccgtttgtgcgaaccggcggcggttcctgttggataccaacaaatcccgcttcgtagatttccagaaagtcaggatccaggagacccaagctgaactgccaagggggtcaatcccacgatctcttgaggtcatcttacgtgcagaagccgtggaaagtgctcaggcaggcgataaatgcgacttcaccgggactttaatagtggtccctgatgtgtccaaactttccacacctggcgcccgagcggaaaccaacagccgtgtttccggtgtggatgggtatgaaaccgagggaatcagaggcctgcgggctctcggtgtaagagacctgtcctataggttggtcttccttgcgtgttgcgtggctcctaccaatcccaggtttggcggtaaggaactgcgggatgaagaacagactgcagagagcatcaagaatcagatgacagtgaaagaatgggaaaaagtatttgaaatgtcccaggacaaaaatctctatcacaacttgtgtaccagtctcttccctactatccacggaaacgatgaagtgaagcgaggcgtccttctgatgctctttggtggtgtccctaaaacaaccggggaggggactagtcttagaggcgatatcaacgtctgcattgtgggggatccctccactgctaaatcccagttcctgaagcacgttgaggaattttcaccacgggcagtctatacttcagggaaggcctcctcggctgccggccttaccgccgccgtggtccgcgatgaggagtcccacgagtttgtcatcgaggctggcgcactaatgttggctgataatggcgtgtgttgcattgacgagttcgataagatggacgtgagagaccaggttgccattcacgaagctatggagcagcagactatcagcattaccaaggctggtgtcaaggcgacactcaatgccaggacgtctattctcgcggccgcaaacccaatcagtggccactatgacaggtctaaatcactgaagcagaacataaatctatcggcgcctataatgtcgcgctttgatcttttctttattctggtcgacgagtgtaacgaggtgaccgactacgccatcgcccggcgcatcgtagacctccacagccgcattgaggagtctatcgaccgggtctattcattagatgacataagaagatatctgctattcgccaggcaatttaagccaaagatctcgaaggagtcagaggacttcattgtagagcaatacaaacacctgcgacagagagacggatctggggttactaaaagttcctggcgtattaccgtcaggcagcttgagagcatgatcagactctctgaggctatggcaaggatgcactgctgcgatgaggtccaaccaaagcatgtgaaggaagcctttagattacttaataagagtataataagagtagaaacacctgacgtgaatctggatcaggaggaagagattcagatggaggtggatgagggagcgggcggcatcaatggacacgcggactcccctgcacccgtcaacggaatcaacggatacaatgaagatattaaccaagaatccgcccccaaagcatcactgcggctggggttctccgaatactgtagaatttcaaacctgatcgtgctccatcttcggaaggtggaggaagaagaagatgagtcagcccttaagagaagcgaacttgtgaattggtatttaaaggagatcgaaagcgagatcgactcagaagaggagctgatcaacaaaaaaaggataatcgagaaagtcatccaccggctgacacactacgatcatgtgttgattgagctcacccaggccggccttaagggcagcactgaaggatctgaatcatatgaagaggacccatacctggtcgtaaaccctaactacttgctcgaggactag

SEQ ID NO: 195219 - DNA, 2160 bp, synthetic construct
  misc_feature 1..2160: note = Description of Artificial Sequence: Synthetic coding sequence
  source 1..2160: mol_type = other DNA
atggccctgaaggactacgccctggagaaggagaaggtgaagaagtttttgcaagagttttaccaggatgacgagctcgggaaaaaacagtttaaatacggtaaccagctggtgcggctggctcaccgagagcaggtggctttgtacgtggatctggacgacgtggctgaggacgaccctgaactggtggacagtatctgtgagaacgctcggcggtatgccaagttattcgccgacgccgtccaagaactgctcccccaatacaaagaacgggaagttgttaacaaggatgtcctggacgtctacatcgaacaccggcttatgatggaacaaaggtctagggaccccgggatggtgaggtccccacaaaaccagtatcccgcagaactgatgcgaaggtttgaactctatttccaaggcccgtcttcgaataaacctcgtgtgattagagaggtaagagcagattcagttggaaagctcgtcacggtgcgggggattgtgactcgggtcagcgaagtcaaacctaagatggttgtagcaacttacacttgcgaccaatgcggagctgagacctatcagccgattcagagtcccactttcatgcctctgatcatgtgcccctctcaggagtgccaaaccaaccggagcggtggaagactatatctgcagacgcgggggagcaggttcatcaagttccaagaaatgaagatgcaggaacacagcgatcaggtgccggtgggcaatatcccaaggagtatcacggttttggtagagggggagaatactaggatagcccaaccaggcgaccacgtgagcgtcactggaatttttctccctatactgcgtactggcttccgccaggtggtccagggacttttatcagagacctaccttgaagcccacagaatcgtgaagatgaacaagtccgaggacgatgagtctggggcaggcgagctgacaagagaagaactgcgccaaatcgccgaggaggacttttacgaaaagctggctgcaagcatcgctcctgagatatatgggcatgaagacgtcaaaaaggcactcctcctgctcttagtgggcggtgtggaccaaagtcccaggggcatgaagatcaggggaaacattaacatatgcctcatgggggaccctggggtcgcaaaatcccagctactgtcctacattgataggctggctccgagaagccaatacactaccggccgcggatcatctggcgtggggctaacagccgccgtcttacgcgattctgtatctggcgagttgaccttggagggaggggccctggttctggctgatcaaggcgtttgttgcattgacgaattcgacaaaatggcagaggcagatagaactgcgattcacgaagtgatggaacaacagacaatctcgatcgccaaagccggaatcttgaccacacttaatgcccgatgttcaatattagcggctgctaatccagcttacggcaggtacaatccccgtagatcactcgaacaaaatatccagctcccagctgccctcttaagcagatttgaccttctctggctgatacaggacagaccggacagagacaatgatctgcggctggcgcagcacataacttacgtgcaccaacacagtaggcaaccacccagtcagttcgagccgttagatatgaaattgatgcgtcgctatatagcgatgtgtcgggagaagcagccaatggttccagagtctttagccgattacattacagccgcatacgtcgaaatgaggcgggaagcttgggcttccaaggatgctacttacacatctgcacgcaccctactcgccatcctcagactctccactgccctggcccggctgcgaatggtcgacgtagtcgagaaagaagatgtaaacgaagcaatcaggctgatggagatgagcaaggactccctgcttggcgataaaggccagactgcccggacacagaggcctgccgacgtgattttcgctaccgtgcgggagctggtgtctggcggccgttccgttagattctctgaagccgaacaacggtgtgtgtctcgtggcttcactccagcccagttccaggccgcgctggatgaatacgaggagcttaatgtctggcaggtaaacgccagtcgcacacggattacattcgtctag

SEQ ID NO: 195220 - DNA, 1170 bp, synthetic construct
  misc_feature 1..1170: note = Description of Artificial Sequence: Synthetic coding sequence
  source 1..1170: mol_type = other DNA
atggccctgaaggactacgccctggagaaggagaaggtgaagaagttcttgcaggaattctaccaggacgatgagctggggaaaaaacaatttaagtacgggaaccagttagtccggctggcgcaccgcgagcaggttgccctgtacgtggatcttgatgacgtggctgaggacgatccagagctcgtagactctatatgcgaaaacgcaagaaggtatgcgaagctcttcgctgacgctgtacaggaactgctgccacaatataaagaaagggaggtggttaacaaagatgtgttggatgtttacattgaacaccgcctgatgatggagcagcgctccagggatcccgggatggttcggagccctcagaatcagtaccctgccgagttgatgaggaggtttgaattgtatttccagggaccaagctctaataagccaagagtgatacgagaagtgcgtgccgacagcgtaggtaaactggtcactgtgaggggcatagtcacccgggtgtccgaggtaaagcccaaaatggtggtcgccacttacacttgcgatcagtgtggagccgaaacgtaccagcctatccagtctcctactttcatgcctctcatcatgtgtccttctcaagagtgtcagacaaaccggagtggcggacgcctgtacctgcaaacaagaggctcacggttcatcaagttccaggagatgaagatgcaagagcattctgaccaagtccctgtcgggaatatccctaggtccatcacagttttggtggaaggagaaaatacacgaatagcccaacccggcgatcatgtgagtgtgacaggcattttccttccgattctccgtaccggatttcgccaagttgtacaggggctcctgtctgagacttacctggaagctcacaggattgtcaagatgaataagagcgaagacgacgagtctggtgccggcgaattgacccgcgaggaactacggcagatagccgacgtgatttttgctaccgtgagggagctcgtgtccggaggaaggagcgtgcgattttccgaagccgaacagaggtgcgtaagccgaggattcacgcccgctcagttccaggctgctctggacgagtacgaagagctgaacgtgtggcaagtgaacgcttcccgaacacgcatcacctttgtttag

SEQ ID NO: 195221 - DNA, 1632 bp, synthetic construct
  misc_feature 1..1632: note = Description of Artificial Sequence: Synthetic coding sequence
  source 1..1632: mol_type = other DNA
atggtggtggccacctacacctgcgaccagtgcggcgccgagacctatcagccaatccaatcccctaccttcatgcctctcattatgtgtcctagccaagagtgtcagacaaacagaagcggtggccgtctttatctgcagacacgcggatcacgctttattaaattccaggagatgaagatgcaggagcatagcgatcaggtgcctgtggggaatatacctcggtccattacagtcttggtcgaaggcgagaatacccggatcgcgcaacccggcgatcacgtgagcgttactggaatattcttacccattcttcggacgggcttccggcaggtggtgcaaggcctcctgagcgagacttacttagaagcccataggatcgttaaaatgaacaaaagcgaagacgatgagtccggagccggcgagctaaccagggaggaactgcgccagatcgctgaggaggacttctacgaaaagctggccgcgtctatcgccccagagatatatggacacgaggatgtgaagaaagccttgctattattgctggttgggggagttgatcaaagcccccgcggcatgaagatcagagggaacattaacatctgcctcatgggagatcccggcgtggccaagtctcagcttctgagttatatcgacaggcttgccccccggtcccagtacactaccggcagagggtcaagcggagtaggacttaccgctgccgttctccgggatagtgtgtccggcgagctgaccttggaaggaggggcactggtgttagccgaccagggcgtgtgttgcatcgatgagtttgataagatggcggaggcggatcggactgccattcacgaggtgatggaacagcagacaattagtatcgcaaaggccggcatccttacaacgctcaacgcccgatgttctatccttgccgcggcaaatcctgcatatggaagatataatccacggcgtagcctagagcagaatatccagcttcccgctgcactgttgagcagatttgaccttctttggctgatccaggacagaccagatcgcgataacgacctcaggctcgcgcaacacattacttatgtgcaccagcacagccgtcagcccccatcacagtttgagcctctggacatgaaactgatgaggaggtatatcgccatgtgccgagaaaagcagcccatggtcccagaatcacttgccgactacataaccgcggcgtacgttgagatgagaagggaggcctgggccagtaaagatgccacatacacctcagcccgaactttactggctatccttcgactgtcaaccgccctggcgagactgagaatggtagacgttgtagaaaaagaagatgttaacgaagcaataagactgatggaaatgagcaaggactctctgctcggggataaaggtcaaacagcccgcacccaacgaccagcagacgtgatcttcgctaccgtgagggagctcgtctctggaggtagaagcgtacggttcagcgaagccgagcagcgctgtgtctccagaggcttcactcctgcacagtttcaggctgcccttgacgagtatgaagagctgaatgtatggcaagtgaatgcaagcagaacaagaattaccttcgtttag

SEQ ID NO: 195222 - DNA, 1839 bp, synthetic construct
  misc_feature 1..1839: note = Description of Artificial Sequence: Synthetic coding sequence
  source 1..1839: mol_type = other DNA
atgatggagcagcggagccgggaccccggcatggtgcggagcccccagaaccaataccctgccgaacttatgagaagatttgaactctatttccaggggccatcttctaacaagccgagggtgattagggaagtgagggctgatagcgtgggcaaactggtcactgtccgagggatagtcacaagagtgagcgaggtcaaaccaaaaatggtcgtcgccacctatacatgtgatcaatgcggggcagagacctatcagcccatccagtcccccacctttatgcctctcataatgtgccctagtcaggagtgccaaactaacagaagcggggggagactgtatctgcagacacgcggcagtagattcatcaaattccaggagatgaaaatgcaggaacacagcgaccaggtacccgtgggcaatatccctcgcagcataacagtgctagtcgagggggagaacactagaatcgcgcagccgggagatcacgtatcggtcaccggcatattcctacccatcctccgaacaggatttcgtcaggttgttcagggattgttgtccgagacctacctggaagcacaccgcatcgtgaaaatgaataagtccgaggacgatgaatccggggcaggggagcttacgcgcgaggagctgcgccaaatcgcagaggaagacttttacgaaaagctggccgcgagcattgctcctgagatttacggccatgaagatgttaagaaggccctgttgctgctgctcgtggggggcgtggaccaatcacctagaggtatgaaaattcgaggtaatattaatatttgccttatgggcgatccgggcgtggccaaatcacagctactgtcctacatcgaccggctcgccccccgatcccagtataccacaggacgagggtcctccggggtggggctgacggcagccgtgctgagggactctgtgagcggcgaactgaccttggaagggggggccttagtgctagccgaccaaggagtgtgttgtatagacgagttcgacaaaatggccgaagcagataggacagcaattcacgaagtcatggagcagcagacaatctccattgctaaggccggtatactcaccaccctgaatgcaaggtgctctattttggcagctgccaaccctgcatatggccggtacaatccccggaggtccctggaacaaaacattcaactgccagcagccctcctcagccgattcgatctgctctggctgattcaagacaggccagatcgtgataatgatctgagattagctcagcatattacttacgtgcaccagcatagtaggcagccacccagtcagtttgaacccctggacatgaaactcatgcgcaggtatattgccatgtgtagagagaaacagccaatggtgcccgaatctctggcagactacatcactgcagcttacgtcgaaatgcgcagggaggcctgggccagcaaggatgccacatacacttcagccagaaccctgctggccatcctgaggctgtcgaccgctctagcaaggcttcggatggtcgatgtggtggagaaggaggacgtgaacgaggccatccgactgatggagatgtccaaggattcacttctgggagataagggacagactgccaggacccaaaggccagccgatgtgatctttgcaactgtcagggaactagtgtcaggaggtcgatccgtccgattctctgaagccgagcagcgctgcgtaagtaggggcttcacccccgctcagtttcaggctgccctagacgagtatgaagagctcaatgtttggcaggtaaacgcaagcaggactcgcattacgtttgtgtag

SEQ ID NO: 195223 - DNA, 1971 bp, synthetic construct
  misc_feature 1..1971: note = Description of Artificial Sequence: Synthetic coding sequence
  source 1..1971: mol_type = other DNA
atgacccccagctggtggacccagttcgtgcggatgcccggcgccacccgctcgagtttgcttatgccctactacaaagaacgcgaggtagtgaataaggatgtgctggacgtgtatattgagcataggcttatgatggagcaacgttctcgcgaccctggaatggtgaggtctcctcagaaccagtaccctgccgagttgatgcggcgttttgaactgtacttccaggggccttctagcaacaagccacgtgtgatccgcgaggttcgcgctgactccgtagggaaactggtgaccgtgagaggaatcgtcactcgcgtgtctgaagtgaaaccaaagatggtggtggccacgtacacatgtgaccaatgcggagcagaaacgtatcaacctattcagtccccaaccttcatgcctttgatcatgtgtcccagccaggagtgccagacaaaccgtagcggcggccgtctttatctgcaaacgcggggaagccggtttatcaagtttcaggagatgaaaatgcaggagcactcagaccaggtacccgtgggcaacatacccaggtcgataaccgtgctagtcgaaggagaaaataccaggattgcacagcccggggatcacgtttctgtgaccggtatcttcttacccattctgcgaacaggctttagacaggtggtacagggattattgagcgagacatatttggaggctcacaggatcgtcaagatgaacaagtccgaagatgacgagagcggagctggagagcttacacgcgaggagctgcgtcagatcgctgaggaggacttctatgagaaactggcagccagcattgctcctgagatctatggccacgaggacgtgaaaaaagccctgctgctgctgttggtgggcggggttgaccagtccccccgggggatgaagattcgcggcaacataaacatctgtctcatgggggatcccggtgtcgctaagtcccagctactttcatatattgaccgcctggcaccccgctctcaatacaccaccggcagaggatcttccggagttggactgacggcggccgtgctgcgcgacagtgtatcgggagaactcaccctggagggcggtgccctagtccttgcggaccagggggtctgttgcatcgatgagtttgataagatggcagaagcagacaggactgcgatccatgaagtgatggagcagcaaaccatctctattgccaaagccgggatcctcacaactctgaacgccagatgcagtattctggccgccgccaatcctgcctacggtcggtacaatccgaggcgttctcttgagcagaacattcagctcccagctgcccttctctcgcgatttgacctcctgtggctcatacaggaccgacccgaccgcgataatgatctgagattagcccagcatattacatacgtgcaccaacacagtaggcagcctccttctcagtttgagccgttggatatgaaactgatgcgcaggtatatcgcaatgtgcagggaaaagcaaccaatggtgccagaaagtcttgcagactacatcaccgcagcttatgtcgagatgcgacgtgaggcttgggcatcgaaagatgcgacatatacttccgctcgcacactgctggccattctcagactatccaccgccctggctcggctccgaatggtggacgttgtcgagaaagaagacgtgaacgaggctatcagattgatggagatgtccaaggactctctgctcggcgacaaggggcaaacagcgcgaacacagcgccctgccgacgtgatcttcgctactgtgcgcgagctggtcagcggcggacggagtgtgcggttctccgaggcagagcagcgttgtgtcagccggggcttcacccctgcccagtttcaggccgctctggacgagtacgaggagcttaacgtttggcaggtgaacgcatctcggacaagaatcacgtttgtgtag

SEQ ID NO: 195224 - DNA, 2475 bp, synthetic construct
  misc_feature 1..2475: note = Description of Artificial Sequence: Synthetic coding sequence
  source 1..2475: mol_type = other DNA
atgaacggcgagtaccggggccggggcttcggccggggccggttccaatcatggaaacgcggccggggtggcggtaactttagtgggaagtggagggaacgtgagcaccgaccagacctttctaagacgaccggaaagagaacaagcgagcagacgccccagttcctgctgtccacaaagacgcctcagtctatgcagagtactctggaccgattcattccttacaagggatggaagctctacttctcggaggtgtattctgatagttcgccacttatcgaaaagatacaggccttcgaaaagtttttcacaagacacattgatctgtatgataaagatgaaatcgagcggaagggatccatcctggtcgatttcaaagagctgactgaaggcggggaggtcacgaacctgattcctgatatcgcaaccgagctgcgtgacgcccccgagaagacgctcgcttgtatgggactggccatccaccaggtgttgacaaaagacctggaacgtcatgccgccgaactgcaggcgcaagagggactttcaaacgacggggagacgatggtgaacgtcccccacattcacgcgagagtgtacaactatgagcccctgactcagctgaaaaacgttcgcgcgaattactacggcaaatatatcgccctgcgagggactgtggtcagggtcagtaatataaagcctttgtgcacaaaaatggcttttctctgcgcagcctgcggggagatccagtcattccccctcccagatggaaaatattcacttccgacaaaatgcccagttcccgtatgtaggggaaggagtttcacggccttgcgcagctcacccctcacagttaccatggactggcaaagcattaaaattcaggagctgatgagcgatgaccaaagagaggccgggaggatccccagaacgatcgaatgtgagttggtacacgatctggtggattcatgtgtgcccggcgatactgtgacgatcaccgggattgtcaaagtctcaaacgctgaagaagcaaatagtatttccaatagcaagggacagaagactaagtcatccgaagatggatgtaagcacggcatgctaatggaattcagcctcaaggatctatatgccatccaagagatacaagccgaggagaatctttttaaattgatcgtcaactctctctgccccgttatcttcggccatgaacttgtgaaagccggtctcgctctggcactgtttggaggtagtcagaaatacgcagacgacaaaaatcggattcctatccgaggcgacccacatatacttgtcgtgggagaccccggcctagggaaatcacagatgctgcaggcggcgtgcaacgttgctcctagaggcgtctatgtctgtgggaatactacaactactagtggtctgacagttaccttatcaaaggactcttcttctggggacttcgccctcgaggctggggcattagtgctgggagatcagggcatatgtggaatcgatgagttcgacaagatggggaatcaacaccaggctctgttagaagctatggagcagcaaagcatctctcttgcgaaagccggggtggtgtgctcactccccgcgcgtacctcaatcattgctgccgccaacccagtgggcggtcactataacaaagcgaagacagtgtccgagaatttaaaaatgggcagcgccctgttatcccgcttcgacttggtctttattttactggatacgcccaacgagcaccacgaccatctgctgtctgaacatgtgattgccattagggctgggaaacagcgcaccatctcctcagctacagtcgcccggatgaattctcaagattctaacacatcagtcttggaagttgtatccgagaaaccattgtctgagaggttaaaggtcgtccctggcgagacaattgacccgatcccccaccaactcttgcgtaagtacatcgggtatgccagacaatacgtgtatcctagattgagtacagaagccgctcgggtattgcaggatttttacctggaactgcgtaagcagtcacagcgacttaatagtagtcctatcactactcgacagcttgaatctctgataagactcacagaggctcgcgccagattggagttaagagaagaagccactaaagaagatgctgaggacattgttgagatcatgaagtactcaatgctgggtacatattcagacgagttcggcaacctagattttgagcgctcacagcatggctcagggatgtctaacagaagcactgctaagagattcatatccgctctgaacaatgtagcagagaggacctataataacatttttcagtttcatcaactgcgccagatcgcaaaggagctgaatatccaagtggcagactttgaaaatttcatcgggagccttaacgatcagggatacctgctgaaaaaaggcccaaaggtttatcagctgcaaaccatgtag

SEQ ID NO: 195225 - DNA, 2382 bp, synthetic construct
  misc_feature 1..2382: note = Description of Artificial Sequence: Synthetic coding sequence
  source 1..2382: mol_type = other DNA
atgaacggcgagtaccggggccggggcttcggccggggccggttccagagctggaagaggggacgggggggcggcaatttcagcggcaagtggcgcgagagagagcacagacccgatctcagcaaaaccacgggaaagcgtacctcagaacagactccgcaattccttctctccacaaagacacctcaatcaatgcaaagtaccctcgatcggttcatcccttacaaagggtggaaactttattttagtgaagtatattcagatagctcccccctcatagaaaaaatccaggccttcgagaaattttttactcgccacatcgacctgtacgataaggatgaaatcgagaggaagggtagtattcttgtcgactttaaagaactaaccgagggcggcgaagttaccaacctgatcccagatatcgcaaccgagttgagggacgcccccgagaaaaccctggcctgcatgggtctggctattcaccaggtgctgacgaaagatctcgagaggcatgccgccgaactacaggcccaggagggactatccaacgatggcgagaccatggttaacgtgccacacatacacgcaagagtttataattacgagcctctaacacagttgaaaaatgtgcgtgccaactattacggaaaatacatcgcactcagaggaactgttgttcgggtttctaatattaagcctctgtgtaccaagatggcgtttttatgtgctgcctgcggagaaatccagtccttccctctgccagacggcaaatattcactgcccaccaagtgccccgtgcctgtttgcaggggcaggtcatttaccgctctgcgctcatcgccactaactgttacgatggactggcagagcataaagatccaagagttgatgagcgatgatcagcgggaagcaggacgaatccccagaaccatagagtgcgagctggtgcatgaccttgtcgattcttgtgtgcctggggatacagtcaccattacaggaatagtgaaagtgtccaatgcagaggaggggagtagaaacaagaacgataaatgcatgttcctgctgtatattgaggcgaactcaatcagcaactctaagggacagaaaactaaatcgagcgaggacggctgtaaacacggaatgttgatggagtttagccttaaagatctgtacgccatccaggaaatccaagctgaggagaacctatttaagctcatcgtgaattccttgtgccctgtgatctttgggcacgaagctgcctgtaacgtggctccacgcggcgtgtatgtttgtgggaacacaactaccacttccggcttgaccgtcaccctcagcaaggatagcagcagcggcgacttcgcgctcgaggcaggagctttggtgttgggtgaccagggcatatgcggaatcgacgaatttgataagatggggaatcaacaccaggcactgcttgaggcaatggagcaacagtccatcagtttggcgaaggctggagtggtttgcagtttgccagcccgcacatcaataattgctgcagcaaaccctgtgggcggccactacaataaggccaagacggttagcgaaaatctcaaaatgggctctgccctgctgagtcggttcgaccttgtattcatccttcttgatacgcccaatgagcatcacgaccatcttctctctgagcatgtgattgccatccgcgccggcaagcagagaactatcagtagcgccacagtggccaggatgaactcccaggacagtaacacatccgtgctcgaggtagtatccgagaaaccactgagcgaaagactgaaggttgtgcccggggagacgatcgacccaatcccccatcaactgttaagaaagtatataggttatgcccggcaatacgtctaccccaggctgagcacggaagcagctcgcgtccttcaggatttctacttggagctgagaaagcaatcacagaggctgaactctagtcccatcactactcgccaacttgagtcactgattcgtttgaccgaagcccgcgcccggctagagctaagggaagaggcaactaaagaggacgcggaggacatcgttgagatcatgaagtacagcatgctggggacatacagcgacgaatttggcaacctcgattttgagcgttcgcaacacgggagcgggatgagtaatcgttcaaccgccaaacggtttatcagcgcactgaacaacgtggcggagcgcacttataataacatttttcagtttcaccagcttcgacagatagccaaggagcttaacatacaagtggccgacttcgagaatttcattggatccttgaatgaccagggatacttactcaagaaaggaccaaaggtgtatcagttgcagacaatgtag

SEQ ID NO: 195226 - DNA, 2643 bp, synthetic construct
  misc_feature 1..2643: note = Description of Artificial Sequence: Synthetic coding sequence
  source 1..2643: mol_type = other DNA
atgaacggcgagtaccggggccggggcttcggccggggccggttccagagctggaaaagggggagggggggcggcaacttcagcggaaagtggcgcgagcgggagcaccggcccgatttgtcaaagacaactggcaagagaacgagtgaacagacaccacaatttctcctgtccactaagacaccgcagagcatgcagagcacattggatcggttcattccctataaggggtggaaactatatttttcagaggtttactctgacagctctccactgatcgaaaagatccaagcctttgaaaagtttttcacaaggcacatcgatctgtatgacaaggatgagattgaaaggaaaggctcaattctggtcgactttaaagaactcacagaagggggcgaggtgactaacctgattcctgatattgcaaccgaactgcgggacgcgcccgaaaagacactcgcttgtatgggtctggcaatccatcaggttctgactaaggatctggaacgccatgcagccgagctgcaggctcaagaagggctgagtaacgacggggaaacaatggtcaacgttcctcatatacatgctcgggtctacaattatgagcctttaactcagctgaagaacgtaagggccaattattatggtaaatatatcgcattgagagggactgtcgtcagagtgagcaacattaaacccctgtgcaccaagatggccttcttatgtgcagcttgtggcgaaatccagagttttcctttaccagacggaaaatactctctgcccacaaaatgcccggtcccagtgtgccggggtagatccttcactgccctccgctcgagtcccttgacggtgacaatggattggcagtctatcaaaattcaggaactgatgagcgacgatcagcgcgaggcgggacgcattccgagaacgatcgagtgcgaactggtacacgacctggtcgactcatgcgttcccggtgacacggtcacaattacaggaattgtgaaagtcagcaacgctgaagaagggtctcggaataaaaacgataaatgtatgttccttctgtacatcgaagctaatagtatttctaatagcaagggccaaaagacaaaatcttctgaagacggttgcaagcatggaatgttgatggagttctctctgaaggatctctatgcaattcaggagatccaggccgaagagaatttgttcaaactgatagttaaatggagtctcgcactgagccctcgcctggagtactccggggctatctccgcacattgtaatctccacctgcctagttccaattcctcaccaactagcgcttgccgcgttgctggaaccaccgggatgcggcatcaaactcagcttctgctgctggtgaaggcagggttggcactcgctctgttcggaggatcgcagaaatacgcagatgataagaaccgcatccccatccggggagacccccacatcctggttgtcggcgacccaggacttggaaagtctcaaatgctgcaggcggcatgtaatgttgccccaagaggcgtgtacgtctgcggcaacaccaccacaacaagcggcctgacagtcaccctttctaaagattcatcgagcggggactttgccctggaagccggcgccttggtgttgggcgatcaaggaatatgcggtatagacgagtttgataaaatgggcaaccagcatcaggcacttctggaggctatggaacagcaaagtatcagtctggccaaggcaggcgtcgtatgttctctcccagctaggaccagcatcatcgctgccgctaaccctgttggcggccactacaataaagccaagaccgtgtccgagaatctgaaaatgggttctgctctcttgagcaggtttgacttagtttttatcttgctcgatacacccaatgaacaccacgatcaccttctgagtgaacatgtaatagcaattcgagccggaaagcagcggaccataagctctgcaaccgtggcacgtatgaactcacaagactctaatactagcgttctagaagtggtgtccgagaaaccacttagtgaaaggctgaaggtggtccctggggaaaccattgacccaattcctcatcagctgctgagaaagtacataggctatgctagacaatacgtgtatcccagactctctacagaagctgcaagagtcttgcaggacttctaccttgagttgcgtaagcaatctcagagactcaattcatcccccataaccacgcgccagctcgagtcattaatcagactgacggaagcccgcgctcgactcgagctccgagaggaagccaccaaggaggatgccgaggacatagtggagataatgaaatattcaatgctcggtacatactccgacgaattcggaaatctggactttgaaagatcccagcatggctccggcatgagcaataggagcacagccaagcgatttatttccgccttgaacaacgtggcggagaggacctacaataacatatttcagttccatcagctgagacagatagcgaaggagctgaatatacaggttgcagatttcgagaacttcataggatctcttaacgatcagggctacctccttaagaaagggcctaaggtctatcagctgcagacaatgtag

SEQ ID NO: 195227 - DNA, 2523 bp, synthetic construct
  misc_feature 1..2523: note = Description of Artificial Sequence: Synthetic coding sequence
  source 1..2523: mol_type = other DNA
atgaacggcgagtaccggggccggggcttcggccggggccggttccagtcatggaaacgcgggagaggcgggggcaacttcagcggcaagtggcgcgaaagggaacaccgccctgatttaagcaagacaacaggaaagaggacgagcgagcagaccccacagttccttctcagtacaaaaaccccccaaagtatgcaatctaccctcgaccggttcatcccatataagggctggaagctgtacttttcagaggtgtactccgattcctcaccactcatcgaaaaaatccaggcctttgaaaagtttttcactagacacatagacctgtacgataaagacgaaatcgaaaggaaagggtctatacttgtggacttcaaggaactcacagagggtggggaagtaacgaatttgattcctgacatcgcaaccgagctgagggacgcaccagagaaaaccctggcttgcatgggcctcgcgattcatcaggtcctgacaaaagatcttgagagacacgccgccgagttacaggcccaggaaggtctctctaacgatggggagaccatggtgaacgtgccacatatacacgctcgagtttataattatgaacctctgacacagttaaagaatgtgcgagctaactattacggtaaatacatcgccttacgaggaacggtggtccgggtgagcaatatcaaacctctttgcactaagatggcattcctttgtgcagcttgcggcgaaatccagagctttccgctgcctgatggaaaatactcattacctacgaagtgccccgtaccagtttgtaggggccggagttttacagctctgcgctcgtctcccttaactgtcactatggactggcaatctatcaaaattcaggagctgatgagtgatgaccagcgagaagcaggtaggattcccagaaccatcgagtgcgagttggtgcacgacttggttgactcatgcgtacctggtgatactgttacaatcacaggaatcgtaaaagtaagcaatgccgaagagggaagccggaacaagaatgacaaatgcatgttccttctgtacatcgaggccaattctataagcaattcaaaggggcagaagaccaagagttctgaggatggatgcaagcatggaatgctgatggagttctccttgaaggacttatacgccattcaggagattcaggcggaggaaaatctgttcaagttaattgtcaattctctctgccctgtgatttttgggcacgagctcgtgaaagctggtctggctctggccctgtttgggggtagccagaagtacgccgatgataagaaccggatacctattcgaggcgaccctcatatactggttgtcggtgatcctggactgggcaagagccagatgttgcaggctgcttgtaatgtggccccccggggcgtgtatgtgtgtggcaacacaaccactacatcgggcctgactgttacgttgtctaaagactccagttcgggcgactttgcactcgaagcaggcgccctggtgctgggggaccaagggatttgtggaatcgacgagttcgacaaaatggggaaccagcatcaagctcttctcgaggctatggaacagcagtcaattagtctggcaaaagctggggtggtgtgctcattgccagctagaacttctataatcgcagccgctaaccctgtcgggggtcactacaacaaggcaaagacagtgagtgagaacctgaagatgggaagtgccttgctttctcggtttgacctcgttttcatcctcttggatactccgaatgagcaccatgatcacctgttatcagagcatgtgatagcaattagggccggcaagcagagaaccatttcaagcgctacagtggccaggatgaactctcaggactctaacacaagtgttctggaggtggtcagtgaaaagccactgagcgagcgcctgaaagtggtgcctggggagacgattgaccccatcccacatcaactcttaagaaaatacatcggttatgccaggcagtatgtctacccgagactcagcactgaggccgccagggtcctgcaggacttctacctggaactgcgcaagcagtcccagcgcctgaactcctccccaatcactacccggcagctggagtctctgataagattgacagaagcccgagcccgtctagaattgcgcgaagaggccaccaaggaggatgcagaggatatagttgaaattatgaaatactctatgcttggtacatattcagatgagttcggcaatcttgatttcgaaagatctcagcatggctccggtatgagcaatagatctacagctaaaagattcataagcgctctcaataatgtcgccgaaagaacttataataacatatttcagttccaccagctgcgccagattgctaaagagcttaatatccaagtcgctgattttgagaattttatcggcagtctgaatgatcaggggtacctcttgaagaaaggacccaaggtgtatcagttacagacaatgtag

SEQ ID NO: 195228 - DNA, 612 bp, synthetic construct
  misc_feature 1..612: note = Description of Artificial Sequence: Synthetic coding sequence
  source 1..612: mol_type = other DNA
atgaacggcgagtaccggggccggggcttcggccggggccggttccagagctggaaacgcggccgcggaggcggcaatttcagcggtaagtggcgggagagagagcataggcctgacctctctaagactactggaaagcggacatcagaacagacacctcaatttttgctgagtactaaaacccctcagtctatgcagtcaactttagatcggtttatcccatataaaggctggaaactgtatttcagtgaagtctactcagattcatcaccactgatcgaaaagattcaggcatttgagaagttcttcactcgtcacatcgacctctatgacaaggatgagattgaacggaagggctccatactggtggactttaaggagctgactgaggggggagaggttacaaacctgatccctgatatcgccaccgagctacgggatgcccccgaaaaaacgctggcatgtatgggcttggctattcatcaggttttgactaaggatctggagaggcatgccgcagaacttcaggcccaagaaggcctgtccaatgacggcgagactatggtaaatgtgcctcacatccacttccttaagaagaagaaaaagatttag

SEQ ID NO: 195229 - DNA, 1329 bp, synthetic construct
  misc_feature 1..1329: note = Description of Artificial Sequence: Synthetic coding sequence
  source 1..1329: mol_type = other DNA
atggagaactggagcaaggacatcacccacagctacctggagcaggaaaccaccggaattaacaagtcaacccagcctgacgaacagctcacaatgaattccgaaaaaagcatgcatagaaagtctactgagctggttaacgagattacttgtgagaatacggagtggcctggtcagcggagtacaaatttccagattatttcctcatatcctgatgacgaatccgtttactgcaccactgagaagtataacgtgatggaacatcgccacaacgatatgcactacgagtgcatgactccatgccaggtcacctccgattccgataaagaaaagaccatcgcttttctcctgaaagagctcgacatcctccggaccagcaataaaaagcttcaacagaaactagccaaggaagataaagaacagcgaaaactgaaatttaaactcgaactgcaggagaaggagaccgaggctaagatcgccgaaaaaacggccgcattagttgaggaagtgtatttcgcccagaaggagcgcgacgaggctgtgatgtcccgcttgcaacttgccattgaagagcgggacgaagccatcgcccgggcaaagcacatggaaatgagcctaaaagtcctggagaatatcaatcctgaggagaatgatatgactttgcaggagctgttgaataggatcaacaatgcggacaccgggatagccatccaaaaaaacggcgcaatcattgttgatagaatctacaaaacgaaggagtgcaagatgcgcatcaccgccgaggagatgtccgctctcatcgaagaacgagacgctgctttgtcaaagtgtaagcgactcgagcaggagctgcatcacgttaaggagcagaatcagacatccgccaataacatgagacatctgaccgctgagaacaatcaagaacgggctctcaaagccaagctgctgagcatgcagcaggctcgggagacagctgtgcagcagtacaagaagctggaagaggaaatccagactttacgcgtgtactatagcctgcacaagtctctgtcccaggaggagaacctaaaggatcagtttaattacaccctgagtacgtacgaagaagctcttaagaatcgagagaacatcgtgtctattacgcagcagcagaacgaagagcttgccacacaactccagcaagcactcaccgaacgggctaatatggagctgcagctacagcacgcccgggaagcgtcgcaggtggcaaacgagaaggtgcagaagctagaaagacttgttgatgtgctgaggaagaaagtgggaacgggcacgatgagaactgtgatttag

SEQ ID NO: 195230 - DNA, 1329 bp, synthetic construct
  misc_feature 1..1329: note = Description of Artificial Sequence: Synthetic coding sequence
  source 1..1329: mol_type = other DNA
atggagaactggagcaaggacatcacccacagctacctggagcaggaaactacaggcatcaataagtctacccagccagacgaacagctgactatgaactcagagaagagcatgcaccggaagtcaactgagcttgtgaatgagattacttgtgagaatacagagtggcctggacagaggtctaccaactttcagatcatctcctcctatcccgatgatgagagcgtatactgcaccaccgagaagtacaacgtgatggagcaccgtcataatgatatgcactacgagtgtatgactccctgtcaggtcacttctgactctgataaagagaagactatagcctttttgctgaaggaacttgatattctccgcacttccaataaaaaactgcagcagaaacttgccaaggaagataaggagcaaagaaaactcaagttcaaattggagctccaggagaaggagactgaggccaagatcgctgaaaagaccgccgcccttgtcgaggaggtttattttgcacagaaggagagagacgaagccgtgatgagccggctgcagttggcaatcgaggagagagacgaggccatcgcacgtgctaagcacatggagatgagtttaaaggtgctagagaatataaatcctgaggagaacgacatgactctgcaggagctgttaaatagaataaataatgctgacacagggatcgcaattcagaaaaacggcgctatcatagtggatcgaatatataaaacaaaggaatgtaaaatgcgcatcaccgccgaagagatgagcgccttgatcgaggaacgtgacgccgctctgagcaagtgtaaacgcctcgagcaagagttacatcatgtcaaggaacagaatcagaccagcgcaaacaacatgcggcatctgacagcggaaaataaccaagagcgggccttgaaggctaagctgctatccatgcagcaggctcgagaaaccgctgttcagcagtataagaagctagaagaagaaatacaaactctcagagtttactacagcctccacaagtccctgtcgcaggaagagaacctgaaggatcagttcaattacactcttagtacatacgaggaagctctcaagaaccgcgagaacattgtgtctatcactcagcagcagaatgaggagctggctacgcagctacagcaggccctgacagagcgagccaacatggaactccaactgcagcacgcaagggaggcttcgcaggtggcaaacgaaaaagttcagaagctcgaaaggctcgtcgatgtgctccgaaagaaagtcggaacaggaacaatgagaacggttatctag

SEQ ID NO: 195231 - DNA, 786 bp, synthetic construct
  misc_feature 1..786: note = Description of Artificial Sequence: Synthetic coding sequence
  source 1..786: mol_type = other DNA
atgagccggctgcagctggccatcgaggagcgggacgaggccatcgcacgcgccaagcacatggagatgtcgttgaaggtgcttgagaatattaaccccgaggagaacgatatgaccctccaggaattgttgaaccgcatcaataatgctgacactggcattgcaatccagaagaatggagctatcatagtggatagaatctacaagacaaaagagtgtaagatgaggatcacagcagaggaaatgagcgcccttatcgaggagagagacgcggcactgagcaagtgtaagcgactggaacaagaactccatcacgttaaggaacagaaccaaacttccgctaacaatatgagacaccttactgctgagaacaaccaggaaagagccttgaaggctaaactgctgtcgatgcagcaggctagggaaaccgcagtgcagcagtacaaaaaactcgaggaggaaatccagaccctcagagtctactattctttgcataaatctctttctcaggaagagaatctgaaagatcagtttaattacacgctgtctacttatgaagaggctctcaagaatagagaaaatattgtgagcattacacaacagcagaacgaagagctggctacacagttgcagcaggctcttacagagagagcgaatatggagctacagctccagcacgctcgtgaagcttctcaggtggccaatgaaaaagtccagaaactggaaagacttgtggatgtccttcgcaagaaggtgggcacaggcaccatgcggacagtgatttag

SEQ ID NO: 195232 - DNA, 1329 bp, synthetic construct
  misc_feature 1..1329: note = Description of Artificial Sequence: Synthetic coding sequence
  source 1..1329: mol_type = other DNA
atggagaactggagcaaggacatcacccacagctacctggagcaggagactactgggattaacaaatccacacagcccgacgagcagctgaccatgaacagcgaaaagtctatgcataggaagtcaaccgagttggttaatgagattacctgtgaaaataccgaatggccggggcaaagaagcacgaactttcagataattagctcatatccggacgatgagtccgtgtactgcactacagaaaaatacaacgtaatggagcatagacataatgacatgcactatgagtgcatgacaccttgccaggtaacgtctgactccgacaaggagaagaccatcgcattcctgctgaaagaacttgatatcttgcgcactagcaataagaagctgcagcaaaagttggccaaagaggataaggagcaacggaagctcaaatttaagctcgaactgcaggagaaggagacagaggccaaaatcgccgagaaaaccgctgcgctagtcgaagaagtgtacttcgcacaaaaggagcgtgacgaggcggtgatgagcaggttacagttggccattgaggagcgggatgaagccattgctcgcgcgaagcacatggaaatgagcctgaaagtcctggaaaacatcaacccggaagagaacgatatgacccttcaggagttgctcaatcgcattaataatgctgacacgggaatagcaatccaaaagaacggtgccatcatcgtggatcgcatctacaagacaaaggagtgcaaaatgcgcatcacggccgaggaaatgtcagccctaatcgaagagcgcgatgctgccctgagtaagtgcaagagactggagcaagaactgcatcatgtcaaggaacagaatcagaccagcgcaaacaatatgaggcacctcacagcagaaaacaaccaggaacgggcattaaaggccaagcttctgtctatgcagcaggccagggaaacggccgtgcagcagtacaagaagctggaagaggagatccagacactgcgggtgtactacagtctccacaagagcctaagtcaggaggaaaaccttaaagaccagtttaattacaccctgtcaacgtatgaagaagcactgaagaatcgcgagaacatagtttcgatcacccagcagcagaacgaagaattggctactcagctccagcaggctctgaccgagcgggccaacatggaactacaactgcaacatgcaagggaagcatcccaggtagccaacgagaaggtgcagaagctggaacgcctggtagacgtcttgaggaagaaagtgggcacaggcaccatgcgcacagtgatctag

SEQ ID NO: 195233 - DNA, 1275 bp, synthetic construct
  misc_feature 1..1275: note = Description of Artificial Sequence: Synthetic coding sequence
  source 1..1275: mol_type = other DNA
atgaacagcgagaagagcatgcaccggaagagcaccgagctggtgaacgaaataacttgcgaaaataccgagtggcctggacagagatccacgaattttcagatcatctcgagctatccggacgacgaatcagtttactgcacaaccgagaaatataatgtaatggagcataggcataacgacatgcattatgagtgcatgaccccttgtcaggtcacatcagactcagacaaagagaaaacgattgcatttctgctgaaggagttggacattctcaggacctctaataaaaagttgcagcaaaagctggccaaagaggacaaggagcagaggaagctcaagtttaagttggagcttcaggagaaggagactgaagccaagatcgccgaaaaaactgcagcactcgtggaagaggtatacttcgctcagaaggaacgcgacgaggccgtcatgtccaggcttcagctggccattgaggagcgcgacgaagccatcgcgcgggccaagcatatggagatgagtctcaaagttctggagaatattaatcccgaagagaatgatatgacgctccaagaattgctaaatcgcattaacaatgccgataccgggatagccatccaaaagaacggggccattatcgtcgatcggatctacaaaacgaaagaatgtaaaatgcgcatcaccgcagaggagatgtctgctctgatagaggaacgggatgcggcactgtctaaatgcaaaagactcgagcaggaactacaccacgtaaaagaacaaaatcagacctccgctaacaacatgaggcacctgaccgcagagaacaaccaagagcgggccctgaaggcgaagctgctgagtatgcagcaagccagagaaacggccgtccagcagtacaaaaaactagaggaggaaattcagactctacgcgtgtactacagcctgcataaaagcctgagtcaggaagagaatttgaaggaccagttcaactacacccttagcacgtacgaagaggccctcaaaaatcgagaaaatattgtgtcgataacgcaacagcagaatgaagagttggcgactcagctccagcaggctttgacagaacgggccaacatggaattgcagttacagcacgcgcgggaggcgtcacaggttgccaatgagaaggtacagaaaagccagatccagatttatttcatccccaacaagaaagatgagcgtgaaaagttcctcatggacaaaagaaggaagatcgtagctcactctaaacagaacagttag

SEQ ID NO: 195234 - DNA, 315 bp, synthetic construct
  misc_feature 1..315: note = Description of Artificial Sequence: Synthetic coding sequence
  source 1..315: mol_type = other DNA
atggagaactggagcaaggacatcacccacagctacctggagcaggagacaacagggattaacaagtcaactcaacccgatgaacagctgaccatgaattcggaaaaatccatgcaccggaaatccactgagttagtgaacgaaataacctgtgagaatactgagtggcccggtcagaggagcaccaactttcaaattattagctcttaccccgacgatgagagcgtctactgtaccacggagaaatacaatgtgatggaacaccggcataatgacatgcactacgaatgtatgaccccttgccaagtgacctag

SEQ ID NO: 195235 - DNA, 387 bp, synthetic construct
  misc_feature 1..387: note = Description of Artificial Sequence: Synthetic coding sequence
  source 1..387: mol_type = other DNA
atggagaactggagcaaggacatcacccacagctacctggagcaggaaacaacgggcattaacaagagcactcagccagacgagcagctcaccatgaatagcgaaaagtcaatgcaccggaaaagtaccgaactagtcaatgagattacatgcgaaaatactgagtggcccggacagaggagcacaaacttccagataatcagctcataccctgatgatgagtccgtctattgtaccacagaaaaatacaatgttatggaacatcgacacaatgacatgcattatgagtgcatgaccccatgtcaggtaacaagtgatagtgataaagaaaagacaattgctttccttctaaaggaactggatattctgaggacatcaaacaagtag

SEQ ID NO: 195236 - DNA, 3912 bp, synthetic construct
  misc_feature 1..3912: note = Description of Artificial Sequence: Synthetic coding sequence
  source 1..3912: mol_type = other DNA
atgggcgaccccgcccccgcccggagcctggacgacatcgacctgtctgcactgagggaccccgccgggatatttgagctggtggaagtggttggcaacgggacctacggccaggtctacaagggcagacatgtgaaaaccggccaactcgctgccatcaaagtaatggatgtcacagaagacgaggaagaagagatcaaacaggagattaacatgcttaaaaaatactcacatcatcgtaacattgcaacctattacggagccttcattaaaaagtctccccccgggaacgatgaccagctgtggctggtcatggagttttgcggtgccggatccgtgaccgatctggtgaagaataccaagggcaatgcactcaaagaggattgtattgcgtacatctgtcgcgaaatactgcgcggactggcccacctccatgcccacaaggtcattcacagggacattaagggacagaatgtactgttgactgagaatgccgaggtgaaattggttgatttcggggtgtctgcacagttggacagaacagtgggtcgaagaaacacttttattggcacaccatactggatggcacccgaagtgatcgcgtgcgatgagaatcctgacgctacctatgactatcgcagtgatatatggagtctcggcattacagcaatcgaaatggccgagggcgcaccaccactgtgtgatatgcatccgatgagggcccttttcctgataccgcggaacccacctccaagactcaagtccaagaagtggtcaaagaaatttatcgatttcatcgatacctgtctgataaagacctacctcagtagaccgccgacggagcaactgttaaaattccctttcatacgggaccagcccacagagcgacaggtgaggatccagttaaaagatcacattgatcggtccaggaagaagcgcggagagaaggaagaaactgaatatgagtactccggatcagaggaggaagatgactcacatggagaggagggtgaaccttcctctataatgaatgttcctggagagagcacactcaggagggaattcctgcgcctgcaacaggagaataagagcaattcagaggctctgaagcagcagcagcaattgcagcagcagcaacaaagggaccctgaggcccacattaagcatctgttacaccaacgtcagcggaggattgaagaacagaaggaggagcggaggagagtggaagagcagcagagacgcgaaagggaacagcgaaagctgcaagaaaaggagcagcaaaggaggctcgaggatatgcaggctttgcgccgggaggaggaacgcaggcaggccgagagggaacaggagtacaaaaggaaacagttagaggagcagcggcagtctgagagactccagagacaactgcagcaggaacatgcctatttaaagtccctccaacagcagcagcagcagcagcagctgcagaagcagcagcagcagcagctgctaccaggcgaccgcaagcctctctatcattatgggcgggggatgaaccccgccgataagccagcttgggcccgggaggtagaagaacgaacacgcatgaacaagcagcaaaatagtccactggccaaaagtaaacctggatccactggccctgagcctcccatccctcaggccagtcctggtccaccaggacccctcagccagacccctcctatgcaaagaccagtcgagccgcaagaaggcccgcataagtctcttgtggctcacagggtcccccttaaaccgtatgcagcccctgtccctcggtctcaaagtctccaggatcagcccaccaggaatctggcagcttttcccgcgtcacacgaccctgatccagctattcccgccccaacagctacgccgtcagcgagaggtgccgtgattcgccaaaacagcgatccaacaagtgaggggcctggcccctcccctaatcctccggcctgggtccggccagacaacgaagcaccgcccaaggtgccccaacgaacttcgagcattgctacggcgctgaataccagcggggccggcgggagccgcccagcacaggccgtacgcgctagcaatccggatctgaggagatctgatccggggtgggagaggagcgacagcgtcttgcctgcctcgcatgggcatctcccacaggctggctccttagagaggaacagagtgggagtgagcagtaaacctgacagctccccagttttgagcccagggaacaaggcaaagccggacgaccacaggagcagacctggaagacctgcgtcatacaagcgggcaatcggggaggatttcgtcctccttaaagagcgcactcttgacgaagcccccaggcctcccaaaaaagctatggactacagttcaagcagtgaggaagtggaaagctccgaggacgatgaagaggaaggtgaaggcggaccagccgaaggatccagggacactccgggcggccgcagtgatggggacacagacagtgtttccactatggtggttcatgacgtcgaggagattaccggcacccagccaccatacgggggagggactatggtcgtacaacgaacacctgaggaggaaagaaaccttttgcatgcggactcgaacgggtacactaatctgcccgacgtggttcagcctagccacagcccaacagagaatagcaagggacaaagtcctccatcaaaagacggctctggtgattatcaatctcgcgggctggtcaaggcccctggtaaatcttcctttactatgttcgtcgatctgggtatatatcagcccggaggatcgggagattcaatacccattacagcgttggtggggggtgagggtactcggctggatcaacttcagtatgacgtgcggaaggggagcgtggtcaatgttaaccctaccaacaccagagcccattcagagactccggagattcggaagtacaaaaaacgattcaactctgaaatcttatgcgcggcattgtggggggttaacctactggtgggaacggagaatggactgatgctgttggaccggtccggacagggaaaggtctacggcctgatcgggcgaaggaggtttcagcagatggacgtactggaagggttaaatttactcatcacaatcagtggcaagagaaataagctcagagtctactatttgagttggttgagaaataagatactacacaatgaccccgaagtagagaagaaacagggctggaccactgtgggagatatggaggggtgcggacactacagggtagtgaaatacgaacgcatcaaattccttgtcatcgctctcaaatcaagcgttgaagtttatgcttgggctccaaagccataccacaaattcatggcttttaaatcttttgctgatctgccccatcggcctctgctggtggaccttacggtcgaggaaggccaacgtctgaaggttatttatgggagtagcgcaggatttcacgcggtcgatgtggatagcggaaacagttatgacatctacatcccagtccatatccagtcccagatcacacctcacgccatcatcttcctgcccaatacagatggcatggaaatgctgttatgctacgaggacgaaggcgtctatgtgaatacatacgggcgtataattaaagatgtcgtgttgcagtggggcgaaatgcccactagtgtggcgtatatttgctccaatcagatcatggggtggggggagaaggccattgaaatccgctctgttgagacgggtcacctcgacggagtctttatgcataagcgggctcagaggctcaaatttctctgtgagcgcaatgacaaggtgttttttgcttctgtgaggagcggcggtagcagccaggtctactttatgaccttgaaccggaattgcatcatgaattggtag

SEQ ID NO: 195237 - DNA, 3999 bp, synthetic construct
  misc_feature 1..3999: note = Description of Artificial Sequence: Synthetic coding sequence
  source 1..3999: mol_type = other DNA
atgggcgaccccgcccccgcccggagcctggacgacatcgacctgagcgccctgcgcgatcccgctggtatattcgagttggtggaggtcgtaggcaacggcacctatgggcaggtttacaagggccgccatgtaaaaactggacaactcgctgcaatcaaagtgatggacgtgacggaggacgaggaggaggagataaaacaggagatcaacatgttgaagaagtactcccaccacaggaatattgctacctattacggcgccttcataaaaaagtccccacctggcaatgacgatcaactctggctggttatggagttttgcggtgcaggctccgtgacggatctggtcaagaacactaaaggtaatgccctcaaagaggactgtatcgcttacatttgccgagagatcctccgagggcttgcccatctgcacgcccataaggttattcaccgggacattaaaggacagaacgtactacttactgagaatgcggaggtgaagctggtggactttggagtgtctgcccagctggacaggactgtcggccgacgcaatacctttatcggcacgccttactggatggctcctgaagtaatcgcctgcgatgagaatcctgacgcaacatatgactatcggtcggacatatggagcctaggaatcacggctattgaaatggccgagggagcaccccccctgtgtgacatgcatccaatgcgcgcactcttcctgatcccgcggaaccctcctcctcggctgaagtccaaaaagtggagcaagaagttcattgacttcattgacacttgtctgatcaaaacttatctaagccgtccaccaacggagcaattgcttaagtttcccttcatccgcgatcagccaacagagcggcaggtacggatccagcttaaagatcatatcgaccgcagccggaagaagaggggggagaaggaagaaaccgaatacgaatactcaggctcagaggaggaagatgactctcatggtgaggagggtgagccaagttcaattatgaacgttcctggagagagtacgctccgtcgggagttcctacggctgcaacaggaaaacaaatccaactccgaagcactgaagcaacagcaacaactccaacagcagcagcaaagagatccagaggcccatataaagcacctcctgcaccagcggcagagacgtattgaggaacagaaagaggagcgacgacgcgtggaagagcagcagcgacgggagagggagcagcggaagctgcaggaaaaagagcaacaaaggaggctcgaagatatgcaggctttgcgacgtgaggaagagcgacgacaggccgaaagggagcaagaatacaagcgcaagcagctggaagagcagagacagagtgaacggctgcagcgccagttgcagcaggagcatgcatatctcaaaagtctccagcagcagcagcagcagcagcagcttcagaagcagcaacagcaacagctcttgcctggggaccgcaaaccgttatatcactatggtagggggatgaatcccgccgacaagcctgcatgggcacgggaggttgaggagcggacacgaatgaacaagcagcagaacagccccttggctaaaagcaagccaggcagcaccggccctgaaccaccaattcctcaggcatcccctggcccccctggaccactgtcacagactcctccgatgcagagacccgttgagccacaggaagggccccataagtctctggtggcccaccgcgttcccctgaaaccttacgcagccccagttccgcgctcccagtcccttcaggaccaacccacccggaacctggccgctttccctgcctcccacgaccctgatcccgctattcctgccccaacagcaacaccttccgcacggggagcagtgattagacagaattctgatccaacaagcgaagggcccggcccttcacctaatccccccgcctgggtcagacctgacaatgaggcaccgcccaaggttccgcagagaacatccagtatcgcaacagcgctcaacaccagcggggcgggaggttctagaccggcccaggccgttagggcccgtcccagaagtaactccgcctggcagatttacttgcagagacgggccgagaggggaaccccaaagccgcccggcccgcctgctcaaccccccggcccgccgaatgcatcttctaatcccgacctgaggcggagcgaccccggctgggagcggtctgacagcgtcctgccggcgtctcacggtcatctgccacaggccggctctcttgaacggaaccgtgtgggggtttcaagcaaaccagatagtagtccggtgctcagccctggcaacaaagcgaagcctgacgatcatagaagtcggcctggaaggccagcggatttcgtccttcttaaagagcgcactctggatgaggctcctcggcctcctaagaaagcaatggattactccagctcctccgaggaagtggagtcgtccgaagatgatgaggaggagggagaaggtggtcctgccgaaggtagcagagacacccccggggggagatccgacggggacactgatagcgtgtccaccatggtcgtgcacgacgtcgaggaaattactgggacacagcccccctacggaggcggcaccatggtcgtacagcggacgcctgaagaggagagaaatcttctgcacgctgattctaacggatacactaatttaccagacgtggtgcagcctagccactcaccgactgaaaattctaagggtcagtcccctccgtctaaagatggcagtggcgactatcaatctagggggcttgttaaagccccaggaaaatcaagctttactatgttcgtggacctaggaatatatcagccgggaggttccggcgactcgatccccattaccgccctcgtagggggagagggaacccgactcgatcaactacagtacgatgtgcgcaagggtagtgtcgtcaatgtaaatcctaccaacacaagggctcacagcgagacaccagagattaggaaatacaaaaagcggttcaactcagagatcttatgtgctgctctctggggcgtcaaccttttagtgggcactgaaaatgggctgatgctgctcgatcgctcgggtcagggcaaggtgtacggtctcattggaaggcggcgtttccagcagatggacgtgctggagggcctcaatctgctgatcacaatatcaggcaagcgcaataaacttcgggtatattacctgagctggttgcggaacaagattcttcacaatgatcccgaagtggagaaaaaacagggctggacgacagttggggacatggaaggatgcggtcactatagggtagtgaagtatgagcgaatcaaattcttagttattgccttaaagtcttcggtggaggtttatgcatgggcccccaaaccttatcacaagtttatggcctttaagtcgttcgctgatctccctcaccgcccgctcctcgtcgatctgactgttgaggagggtcagcgcctgaaggtgatctacgggtcgtcagcaggcttccacgctgtggatgtggatagcggaaacagttacgacatttatatccccgtccatatccaaagccagattaccccacacgctataatctttctgcccaacacagatggaatggaaatgctcttgtgttatgaggatgaaggcgtgtacgtaaatacctacggccggatcattaaagacgtggtgctccagtggggggaaatgcctacttcagtggcatacatttgctcaaaccagatcatgggctggggcgaaaaggccatagaaatcagatcagttgaaacaggccacctggacggagtgtttatgcacaagagggcgcagcggcttaaattcctgtgcgagaggaatgataaggtgttttttgccagtgtcaggtctggtggcagcagccaggtctattttatgactctaaatagaaactgtataatgaactggtag

SEQ ID NO: 195238 - DNA, 3939 bp, synthetic construct
  misc_feature 1..3939: note = Description of Artificial Sequence: Synthetic coding sequence
  source 1..3939: mol_type = other DNA
atgggcgaccccgcccccgcccggagcctggacgacatcgacctgtcagccctgcgggatccggctggaatttttgaactcgtcgaagtagtgggcaatgggacttatgggcaggtgtataagggtcggcatgttaaaactgggcaactggcagccattaaggttatggacgtcaccgaggacgaggaagaagaaatcaagcaggagatcaatatgcttaagaagtacagtcaccacaggaacattgctacctattacggagcttttattaaaaagagcccaccaggcaatgacgatcaactgtggctcgtaatggagttctgcggtgcaggatctgtgacagatctagtgaaaaatactaagggaaatgcactcaaagaagactgtatagcttacatttgtcgcgagatactgaggggcctggcccatctgcatgcccacaaggtgattcacagggatatcaagggccagaatgtgctcctgaccgaaaatgctgaggtcaagctggtcgacttcggtgttagcgcccagctcgacaggacagtcggtcgccggaacacattcatcgggacaccatattggatggccccggaggtgattgcctgcgacgagaacccagatgccacatatgattatcggtccgacatctggtcgctgggcatcacagcaatagagatggctgaaggcgcccccccgctttgcgacatgcaccccatgcgggccctctttctgatcccaagaaatcctcccccgcgtttaaaaagtaagaagtggtccaaaaagtttattgattttatcgatacttgtttgattaagacctacctatctaggcctcccacagaacagctgctgaaatttcctttcattagagaccaaccaaccgagcggcaggtccgaattcaactgaaggatcatatcgataggtccaggaagaaacgcggcgaaaaagaggaaactgaatacgaatattcaggcagcgaggaggaagatgactctcatggagaagaaggggagccctccagcattatgaacgttcctggtgaatctaccctcagaagggagtttcttcgtctacaacaagaaaataagtcgaattctgaagccctcaagcagcagcagcaactgcagcagcagcaacagagggaccccgaggctcacattaaacacctgctgcaccagcgacagcggcgcattgaagagcagaaggaagaacggaggcgtgtggaagagcagcagcggcgcgaacgggagcagcggaaactgcaggaaaaggagcagcagcggagactggaggatatgcaggcactcagacgcgaggaagagcgccgccaagccgagcgtgagcaagaatacaagcgcaaacagcttgaagaacagcgtcagagcgagcgcctgcaaagacagctgcagcaagaacatgcatatctgaaaagcctccaacagcaacagcaacaacagcagctgcaaaagcaacaacagcagcagctgctccccggagacaggaagccattgtaccattacgggcgtgggatgaatccggccgataagccagcttgggcccgggaagtcgaagagagaacaaggatgaataagcagcagaactcacctttggcaaaatctaagcccgggtcaaccggccccgaacccccgatcccccaagcatccccaggtccccccggccccctttcacagactccccctatgcaacggcccgtggaaccgcaggagggcccacacaagagtttgcaagatcagcccacccgtaacctcgctgcatttccagcatcccacgaccccgatccggcaattccagcgccaacagccactcccagcgctagaggcgcggtaattcgccagaattccgatccaacttctgaggggcctggcccaagccccaacccacccgcatgggtgcgtcctgacaacgaggctccccctaaggtgcctcagcggacgagttctattgccactgcgctcaatacctcgggtgctggtggctcccgccccgctcaggctgtacgagcacgcccaagatctaattctgcttggcagatctacctgcagcgccgtgccgaacgcggaacgcctaaacctcctgggccgccggcccaacctcccggccctccaaatgcttcctccaatcctgatctgaggagatccgaccctggctgggaacgctctgacagcgtgctcccagcctcccatggtcatcttccacaagccggctctctcgaaagaaaccgtgtgggtgttagctcaaagcctgactccagtccagtgctatcccctggtaacaaagccaagcctgatgatcatcggtccaggccaggacgtcctgccgattttgtcctgctgaaggagagaacattggatgaagccccaagaccgcctaagaaagccatggattactctagctcttctgaagaagttgaatcttccgaggacgacgaagaagagggggagggagggcctgccgagggatcccgagacacacctggcgggcgctcagatggagacacagatagcgtttccacgatggtggttcatgacgtggaggagatcaccggtacgcagcccccttacggcgggggcacaatggtagtccagcgcacccccgaggaggaacggaatttactgcatgcggactctaacgggtacactaatctcccagatgtagtccagccctctcattcacctactgaaaacagcaagggccagtcccccccatcaaaggacggttcaggggactaccagtctagaggactggttaaggcccccgggaagagctcctttacaatgtttgtggatttaggaatctatcagcccggcggcagcggggatagtatacctattacagcactagtagggggcgaaggcacccggctcgatcagttacagtacgacgtcagaaagggcagcgtagtgaacgtaaatcccaccaacacaagggcacacagtgagactcccgaaatccgtaaatataagaagcggtttaatagcgagattctttgcgccgcactgtggggggtaaacctcttggttggaactgagaatggcctcatgctccttgaccggtccggtcagggtaaggtctacggtttgatcgggaggcgccggttccagcagatggatgtgctggaaggtctaaaccttttaatcaccatctccggtaagcgcaacaagctgcgcgtttactacttaagctggctgagaaacaagattcttcacaacgacccagaagtcgagaagaagcaggggtggactactgtgggggacatggaaggctgcgggcattaccgcgttgtgaaatacgaacgcatcaagttccttgtgatagccttaaagtcctctgtggaggtctatgcgtgggctcccaagccctaccacaaatttatggccttcaagtcattcgcagatcttcctcacagaccgttactggtagatctgacagtggaggaaggccagagactcaaggtgatttacggtagctctgcgggctttcacgcggtcgacgtcgactcaggcaacagctacgatatctatatccctgtgcatattcagagccagataactccccatgctattatcttcctgcctaacactgatgggatggagatgctcctgtgttacgaagatgagggagtctatgtaaacacctatggccgaattattaaggatgtcgtgctccagtggggcgaaatgccaacctcagtggcctacatctgtagcaaccagatcatggggtggggcgagaaagctattgagatccgatccgtcgagactgggcatctcgacggagtgtttatgcataagcgcgcccagcggcttaagtttttgtgcgagagaaacgataaggtgttcttcgcatccgtcagaagcggtgggagcagccaggtttactttatgactttgaacagaaattgtatcatgaactggtag

SEQ ID NO: 195239 - DNA, 879 bp, synthetic construct
  misc_feature 1..879: note = Description of Artificial Sequence: Synthetic coding sequence
  source 1..879: mol_type = other DNA
atgctgctggaccggagcggccagggcaaggtgtacggcctgatcggccgccggcggtttcagcagatggatgtcctggagggccttaatctgctgatcactatcagcggaaagagaaacaagctccgcgtgtattacctgagttggcttagaaacaaaatcctccataacgatccagaggtcgagaagaaacaggggtggactacagtaggtgatatggagggatgcggccactaccgcgtggtgaagtacgaacggatcaagtttctggttatcgccctcaagtcctcagtggaagtgtacgcatgggctccgaaaccttaccataagttcatggcttttaaaagcttcgctgacctgcctcacagacctctcctggtggacctgaccgtcgaggagggacagcgcctgaaagttatctacggcagttctgctggttttcacgccgttgacgtggactcagggaattcctacgatatctacatccccgtgcacatccagtcacagattactccccacgcaatcatatttctgccaaacactgatggcatggagatgctgttgtgctatgaagacgaaggcgtttacgtgaatacgtatggaaggattatcaaggacgtagtgttacagtggggggaaatgccaacctccgttgcatatatttgtagcaatcagatcatgggttggggcgagaaggcgatcgagatccggtcagtagagactggccacctagatggggtgttcatgcataagagagcccagcgcctgaagtttctgtgcgaaaggaacgacaaggttttcttcgcttctgtacggagcggaggttcttctcaggtgtactttatgacactcaaccgaaactgcatcatgaattggtag

SEQ ID NO: 195240 - DNA, 336 bp, synthetic construct
  misc_feature 1..336: note = Description of Artificial Sequence: Synthetic coding sequence
  source 1..336: mol_type = other DNA
atgggcgaccccgcccccgcccggagcctggacgacatcgacctgagtgccctccgtgccctgtggtttcagtttttctatcactcgggaagcagtttggagtccccaggtatgctgaacgggccattccaacaccggaactccaggatcatgacacaccgtagcgctgagaagaccctgttaggttctctgagtctatggaggtggagtgccatggagcctacagacaggtgcacacgggtggggatgagtcgccgcggatcttggctgccatctcggagttggatgagcaggcgcacccgaagaaagcgatcaaatcggaggtcaacttgctag

SEQ ID NO: 195241 - DNA, 1014 bp, synthetic construct
  misc_feature 1..1014: note = Description of Artificial Sequence: Synthetic coding sequence
  source 1..1014: mol_type = other DNA
atgggcgccgccggcagcagcgccctggcccggttcgtgctgctggcacaaagcaggcctgggtggctcggagttgctgcgctcggactcaccgctgtggctcttggcgcggtcgcttggaggagagcctggcccacaagacgtcgacgcctcctgcagcaggttggcactgtagcgcagttgtggatttatcccgtgaagtcctgcaagggggtcccggtgtccgaggctgagtgcacagcaatgggactgcgcagtggaaatttgcgggaccggttctggctggttattaatcaagaggggaacatggtgactgctcggcaggaaccgcgcctcgtcctgatctcattgacttgcgatggggacactttaaccctatctgcagcttacacaaaagacctcttgctccctattaaaacccctacaaccaatgccgtccacaaatgccgggttcacggtcttgagattgaaggacgcgactgtggggaggccaccgcccaatggattaccagctttctgaaatcccaaccctataggctggtccactttgagcctcacatgaggccaagacggcctcaccagattgccgacctcttccggcccaaggatcaaattgcttactcagacacctcgccatttctgatactcagcgaagcatcactggcagatcttaacagcaggctcgagaagaaggttaaagccaccaactttcgaccaaacatcgtcatctcaggatgtgacgtctatgctgaagactcttgggatgagctgctgataggcgatgtggagctcaagagggttatggcctgttcaagatgtatccttacaactgttgatcctgacaccggtgtgatgtctaggaaagaacccctcgagacattaaagtcctatcgccagtgtgaccccagcgagcgcaaactgtatggaaagtcccctttgttcggccagtactttgttttggaaaaccccggcacaataaaagtgggggacccagtctacctgctgggacagtag

SEQ ID NO: 195242 - DNA, 774 bp, synthetic construct
  misc_feature 1..774: note = Description of Artificial Sequence: Synthetic coding sequence
  source 1..774: mol_type = other DNA
atgggcgccagcagcagcagcgccctggcccggctgggcctgcccgcacgcccctggccaagatggttaggcgtggctgcactgggtctggctgctgtcgctctcggaactgtggcctggcggagagcctggcccaggaggcggaggaggcttcaacaggttggcaccgttgctaagctttggatctatccagtgaaatcctgtaagggagtgccagtttcagaagccgagtgcacagccatgggattaaggtccggtaatctcagggatcggttctggctggtgattaaagaggatgggcacatggttacggcccgacaagaaccacgcttggtgctcatatccatcatctatgaaaacaactgtctgatctttagagcccccgacatggaccagttagttctgccgagcaagcagccctcctcaaacaaactgcataactgcagaatctttggccttgatattaaaggacgcgactgcggaaacgaggccgcgaaatggttcacaaatttcctgaaaaccgaggcatatcgcctggttcaatttgagactaacatgaaggggaggactagtaggaagttgttacccaccctggaccagaatttccaggtggcgtacccagattattgcccacttctgatcatgacggacgcctcactggtagatttaaataccaggatggaaaaaaaaatgaaaatggagaactttagacccaacatagtggtgacgggctgcgacgcgttcgaagaggcatccgccactagacgcgattag

SEQ ID NO: 195243 - DNA, 1008 bp, synthetic construct
  misc_feature 1..1008: note = Description of Artificial Sequence: Synthetic coding sequence
  source 1..1008: mol_type = other DNA
atgggcgccagcagcagcagcgccctggcccggctgggcctgcccgcccgtccttggcctcgctggctcggagtcgctgccttgggcctcgctgccgttgcgctggggacagtggcttggaggcgggcctggcctaggcgaagaagaagacttcaacaggtcggcactgttgcaaagctctggatctatcctgtgaagtcttgcaagggcgtcccagtgtctgaggctgaatgtaccgctatgggactcaggagcggcaatttgcgcgacaggttctggctggtgatcaaggaagatggccacatggtgaccgcgagacaggaaccacgcttagtgctgatctcaattatttacgagaacaactgtctgatttttcgggctccggacatggatcagctcgtgctgcccagcaaacaacctagctccaataagctgcataattgcagaatcttcggactggacatcaaaggccgggactgcggcaacgaggctgccaagtggttcactaattttttaaagacagaagcctaccggcttgtgcaattcgaaacgaacatgaaaggccgaacttcgagaaaactcttacccaccctcgaccagaatttccaagtcgcctacccggattattgtcctctgctgatcatgacagatgcaagcctggtggatttaaatacccgcatggagaagaaaatgaaaatggagaattttagacccaacatcgttgtgactggctgtgatgcattcgaggaggatacatgggacgaattattgatcggcagcgtggaggtcaagaaagtgatggcttgtcctagatgcattctgactaccgtggaccctgatacaggggtgatcgaccgtaaacagccactggacacgttgaagagttaccgcctgtgcgaccccagcgagagagagctgtataaactcagtcctctgttcggaatctactacagcgtcgagaaaatcggctcactgagggtgggagatccagtctaccggatggtatag

SEQ ID NO: 195244 - DNA, 519 bp, synthetic construct
  misc_feature 1..519: note = Description of Artificial Sequence: Synthetic coding sequence
  source 1..519: mol_type = other DNA
ggccacatggtgaccgcccggcaggagccccggctggtgctgatctctataatctacgagaataattgcctaattttcagggcccccgacatggaccagctggtgcttcctagcaaacaaccaagcagcaacaaactgcacaattgtagaattttcggtctcgacatcaagggcagagattgcggcaatgaagccgccaagtggtttaccaattttctcaagacagaagcttaccgcctcgttcagttcgaaaccaatatgaaggggcgaactagtcggaagctactgcccacattggaccagaattttcaggttgcataccccgattactgtccactgctcatcatgaccgacgctagcctggtggaccttaatacccgaatggagaaaaaaatgaaaatggaaaacttcagaccgaacatcgtggttacgggctgtgacgcttttgaggaagacacctgggacgagcttctaatcggaagtgtcgaggtgaagaaagttatggcttgtcctagatag

SEQ ID NO: 195245 - DNA, 447 bp, synthetic construct
  misc_feature 1..447: note = Description of Artificial Sequence: Synthetic coding sequence
  source 1..447: mol_type = other DNA
atgcccttcgccgaggacaagacctacaagtacatctgccggaacttttccaacttctgtaatgtcgacgttgtggagatactgccctacctgccttgtcttacagctcgcgaccaagatcggctgcgcgctacatgcacactatccggaaacagagatacgctgtggcatctgttcaacacactccagttaccaacctgggccggagaagaaacaccaggcggtcagtcatccggaaggggccttgacttttcatcactgacatcgggagccgtttggctctggcagatgtctgacttttggtcatgtttctcgacgtggacagtgtcaatctggttgatcctgcattgggtactgctccgcttgaacttgcaggtattcgcgaaatgcctcgctcagagtaagtggccactgcttctgccatccctctcgtgtcctacctggtag

SEQ ID NO: 195246 - DNA, 375 bp, synthetic construct
  misc_feature 1..375: note = Description of Artificial Sequence: Synthetic coding sequence
  source 1..375: mol_type = other DNA
atgcccttcgccgaggacaagacctacaagtacatctgccggaacttcagcaacttttgtaacgtggacgtggtcgagatcctgccttatctgccttgtctgacagcgcgcgatcaggaccgtctgagagcaacctgcaccctgtctggaaaccgggataccttatggcacctcttcaacactcttcaacgacgaccaggctgggtggagtacttcattgccgccctgcggggctgcgagctggtggacttagcagacgaagtcgccagcgtctatcagtcttatcaaccacagttcagggcgtcaccagcagacgcgcagcctcagagccatcctaaggaatcacggtggtggcctcctggagtccttctttag

SEQ ID NO: 195247 - DNA, 1200 bp, synthetic construct
  misc_feature 1..1200: note = Description of Artificial Sequence: Synthetic coding sequence
  source 1..1200: mol_type = other DNA
atgcccgtgcaggagacccaggcccccgagagccccggcgagaactccgagcaggccctacaaacactgagtccaagagcaataccacggaatcccgacggagggcctcttgaaagttcttctgacttggccgcactgagccccttaacgtccagcggccatcaggagcaagacacagagctggggagtacgcacacagccggagccacctctagtcttactccttcgagaggtccggtgagtccaagcgtctcctttcagccgttagccagatcaaccccgagggcttcgcgcctgcctggcccaactggatctgtggtttcaactggcactagcttttcatcaagtagtcctggcctggctagcgcaggggcagccgagggcaaacaaggtgcagaaagcgatcaggcagaacccatcatttgctcctcaggagccgaggctcccgcaaatagcctaccgagtaaggtcccgactaccctgatgcctgtgaataccgtcgccctcaaagtgcccgctaaccctgcctctgtctcaaccgtcccctcaaaattaccaacgtccagtaagccccctggtgctgtgcccagtaatgccttgaccaatccagccccatctaaattgccaatcaactctacaagagccggcatggtgccctccaaggtacccacgagcatggttctaaccaaagtttcagcctcaactgtgccaactgatggatcctcaagaaacgaagagacccctgcagctcccactccggcaggagcaacgggagggagcagtgcatggctcgatagtagctccgaaaaccggggtctgggatctgaactatctaagccgggagtgttggcgagccaggtggactctcccttctcaggctgcttcgaggatctggccatctccgcttcaacaagcctcggtatggggccgtgccatggcccagaagagaatgagtataagagtgaagggactttcggcatccatgtggcagagaatcctagtatccagctgttggagggtaatcctggtccacccgcagatcctgacggaggacccaggccacaagcagatcgtaagtttcaggagagggaagtcccttgtcaccggccttcccctggcgcgttgtggttgcaggtggctgtgaccggggtgctcgttgtgaccctcctcgttgtgctgtatcgccgacgactgcattag

SEQ ID NO: 195248 - DNA, 1623 bp, synthetic construct
  misc_feature 1..1623: note = Description of Artificial Sequence: Synthetic coding sequence
  source 1..1623: mol_type = other DNA
atgcccttcgccgaggacaagacctacaagtacatctgccggaactttagtaacttttgtaatgtggacgttgttgagatccttccctatctgccatgcctgacggcacgcgaccaggaccgattgcgtgcgacctgtactctatcgggaaatagggacactctgtggcatctgtttaacactctccagcgtaggccaggctgggtcgagtatttcatcgccgctctgcggggttgtgagctggtggacttagccgatgaagtggcttcagtgtatcagtcttaccaaccgaggacgtccgaccggccacccgacccactggaaccgcctagccttccagccgaaaggcccggccccccaacccctgccgcagcacactctatcccttataattcatgccgtgaaaaggagccctcgtatcctatgccagtgcaggaaacccaagcccccgagtcgcctggtgaaaactcagaacaggcactgcagacactgtctcctagagccatcccacgaaaccccgatggcggacctctcgagagcagcagcgatcttgcagccttgtctccgttgaccagtagtggtcatcaggagcaagataccgaactggggagtacccacacagctggcgctacctcttccctgaccccgagccgggggcccgtgagcccgagcgtgagctttcagccccttgctagaagtacacctagggcctctcggctgcctggcccgactggaagcgtggtgagcacaggtacatcattcagtagctcaagcccaggtcttgcctcagctggagctgccgagggtaaacagggcgctgaaagcgaccaggccgagcctatcatctgctcctcaggcgctgaagctcccgcaaactcactgccttctaaagtgcctacaacactgatgcctgtcaataccgtggccctgaaggtgccagccaaccccgcctctgtgagcaccgtgccttccaagctaccaacctcgtcaaaacccccaggggctgttccgtcaaacgcccttacgaacccggcaccctccaaactgccaatcaattccacacgggccggcatggttccttcaaaagtgcctacgagtatggtactgacgaaagtgtccgcctccaccgtacctaccgatggctcctcaaggaatgaagaaactcccgccgccccgactcccgccggcgccacaggcggttcttccgcctggctggatagctcttccgaaaatagaggtttaggctccgaactgtcgaaacccggcgttttggcctcccaggtcgacagtccattctctggatgttttgaggatttagctattagcgccagtacctcactcgggatgggcccgtgccatggaccagaggaaaatgagtacaaaagcgagggaacttttgggatccatgtggccgaaaatccctccatacagctgttggagggcaatcctgggccacccgcagaccctgacggagggccccgcccgcaagccgataggaaatttcaggaacgagaagtgccctgccacagaccttctcctggagcgctgtggctccaggtggcagttaccggggtcctggttgtaacacttctcgttgtactatatcgtagacggttgcattag

SEQ ID NO: 195249 - DNA, 993 bp, synthetic construct
  misc_feature 1..993: note = Description of Artificial Sequence: Synthetic coding sequence
  source 1..993: mol_type = other DNA
atggccgccgccgccggccggagcctgctgctgctgctgagcagccgggggggcggaggaggaggagctggaggctgcggggcgctaactgctgggtgcttccccggacttggtgtgtcacggcatagacaacaacagcatcatagaacagttcaccagcggattgcttcatggcagaaccttggcgcggtttactgctctaccgtggtacccagcgacgacgtgactgtggtgtatcagaatggcctgcctgtcatcagtgttaggcttccttccagaagggagcggtgccaatttactctcaagcccatatcggattcagtcggcgtgtttcttcggcaacttcaggaggaggatcggggtatcgacagagtggccatttacagtcctgatggagtgcgggtagccgcctccacgggcatcgacctgttactattggatgacttcaagctggtgataaatgacctgacttaccacgtccgaccccctaaaagagtggagatgggattttgccacgtgggtcagaatgggtttgaactgctcacctcttcttacttgcccgccagtgcgagccagtcagccgaaattatcgctgtgagaatcgagatctcccgaaaagctgaaaaaagaacgacattggtcctatggggaggacttgcctacatggccacacagttcggaatcctggcacgcctgacatggtgggagtattcctgggatataatggagcccgtgacgtatttcattacatacggtagcgcgatggcaatgtacgcctacttcgtgatgacgcgccaggaatacgtgtatcctgaggctagggatcggcagtatctgctgtttttccataaaggggctaagaaaagtcgctttgatctcgagaagtacaaccaattgaaagatgcaattgctcaagctgaaatggatctgaaacgactgcgcgaccctctgcaggttcatttaccactgcgtcagatcggggagaaggattag

SEQ ID NO: 195250 - DNA, 1056 bp, synthetic construct
  misc_feature 1..1056: note = Description of Artificial Sequence: Synthetic coding sequence
  source 1..1056: mol_type = other DNA
atggccgccgccgccggccggagcctgctgctgctgctgagcagcagaggcggcggcgggggcggggccggaggctgtggtgctctgacggccggctgttttccaggtttgggcgtctcacgacatcggcagcagcagcaccatcgaaccgtccaccagcgaatcgccagttggcagaatctgggcgctgtctattgtagtaccgtagtgccaagcgacgatgtaacagtcgtgtatcaaaacggcttgccggttatatctgtcaggctacccagcagaagagagcggtgccagtttacactgaagcccatatcagacagcgtgggggtgtttttgcggcagcttcaggaggaagatcgcggcatcgatagagtggcgatatactcaccggatggtgtccgcgtcgctgcctcaaccgggattgatctgctgctgctggatgactttaaactggttatcaatgatcttacctatcatgtgaggccccccaaacgagatctgctctcacatgaaaatgctgctaccctcaacgacgtgaagacgctggtccagcagctttacacaaccctgtgcattgaacaacaccagctgaataaagaacgggaactcattgaacggctggaggatctgaaggaacagctggcccccctcgaaaaagtccgaatcgagattagcagaaaagctgaaaagagaactactctggtgctatggggtggtttagcatacatggcaacccagtttgggatccttgccagactaacctggtgggaatattcctgggacatcatggagcctgtaacctattttattacttacggctccgccatggctatgtatgcttacttcgtcatgacaaggcaagaatatgtttatcccgaggctcgagaccggcagtatctgctcttcttccataagggtgcaaagaaaagcaggttcgatctagaaaaatataatcagctgaaggacgccatcgcccaggccgagatggacctcaaaagattgagagacccacttcaggtgcacctaccattaaggcagatcggcgagaaagactag

SEQ ID NO: 195251 - DNA, 909 bp, synthetic construct
  misc_feature 1..909: note = Description of Artificial Sequence: Synthetic coding sequence
  source 1..909: mol_type = other DNA
atggtgcaccagcggatcgccagctggcagaacctgggcgccgtgtattgctctaccgtggtcccatccgatgacgttaccgtagtttaccagaacggtctgccggtcataagcgtaagactccccagcagacgggaaaggtgccagtttacgctcaagccaattagtgattcagttggtgtcttcttaagacagctgcaagaagaggatagagggatcgaccgtgtagccatctactctcccgacggcgtccgcgtcgctgctagcacaggaatagatctgttgcttctcgatgactttaagctagtcatcaacgacctgacataccatgttagaccgcccaagagggatctgctctcccacgaaaatgctgctaccctcaacgatgtgaaaacgctggtacagcagctgtataccaccctgtgtattgaacagcatcagctgaataaagagagagagctgatagagcgactggaggacctcaaggagcaattagccccacttgagaaagtgcgaatcgaaatttctagaaaagccgaaaaacggacaaccctggttctttggggcggactggcctatatggctactcagtttggcatactagccaggctgacgtggtgggagtacagctgggacatcatggagccggtgacctacttcattacctacggtagtgcaatggccatgtatgcttacttcgtgatgacgagacaggagtatgtatatccagaggcgcgggatcgtcagtacctgctcttctttcacaaaggcgctaagaagagccgatttgatcttgagaaatacaaccagcttaaagacgcaatagcccaagccgagatggacctcaaacggttgagagaccccctgcaagtgcacctgcccctaagacagataggcgagaaggattag

SEQ ID NO: 195252 - DNA, 912 bp, synthetic construct
  misc_feature 1..912: note = Description of Artificial Sequence: Synthetic coding sequence
  source 1..912: mol_type = other DNA
atggccgacgccgccagccaggtgctgctgggcagcggcctgaccatactcagccagccactaatgtacgtgaaagtactgatacaggtgggctacgaaccccttccaccgactatcggccgaaacatctttgggcgacaggtgtgtcaattaccagggttgttctcatatgcccaacacatcgcatccatcgacggccgccgaggtcttttcacagggttgacacccaggctatgcagcggcgtgctgggaaccgtcgttcacggaaaagtgctgcagcattaccaggaaagcgataagggggaagagctgggaccggggaacgtgcagaaagaagtcagctctagctttgatcacgttattaaagagaccacaagggaaatgattgctcggtccgctgcaaccctcatcactcaccccttccacgtgattacattacgaagtatggtgcagtttatcggccgcgagtcaaaatattgcggcctctgtgacagtatcataacgatttaccgcgaagaaggaatcctgggctttttcgctgggctggtgcctcgtctacttggcgatattttgtccctgtggctttgcaactcacttgcttatttggtgaatacttacgccctggactctggcgtgtcgactatgaacgagatgaagtcctatagtcaggctgttacggggttctttgcttcaatgctgacatacccatttgtgctagtaagtaacctgatggcagtgaataactgcggactggcggggggctgccctccctatagtcccatctatacgagctggattgactgttggtgcatgctgcaaaaagaggggaacatgagcagggggaacagcctgttctttcgcaaagtgccttttggcaaaacatattgctgcgacctgaaaatgctgatctag

SEQ ID NO: 195253 - DNA, 468 bp, synthetic construct
  misc_feature 1..468: note = Description of Artificial Sequence: Synthetic coding sequence
  source 1..468: mol_type = other DNA
atggtgcagttcatcggccgggagagcaagtactgcggcctgtgcgacagcatcattactatttaccgagaggaggggattctcggttttttcgccggattagtgccccgcttactaggcgatatcctcagcctgtggctgtgtaattctctcgcctatctagtaaatacctacgcgctagactctggtgtttccactatgaacgaaatgaaaagctactcgcaagccgtaacgggattttttgccagtatgctgacgtacccgttcgtcctcgtcagcaatctgatggcagtgaataactgcggcttggcaggcgggtgtccaccctacagcccaatttatacatcatggattgactgctggtgcatgttgcagaaggaaggcaacatgtcccgaggcaatagcctgtttttccgcaaagtaccgtttggaaaaacctattgctgcgatctgaaaatgcttatctag

SEQ ID NO: 195254 - DNA, 360 bp, synthetic construct
  misc_feature 1..360: note = Description of Artificial Sequence: Synthetic coding sequence
  source 1..360: mol_type = other DNA
atggtgctgcccctgccctggctgagccggtaccacttcctgcggcttcttctccctagttggagtctggccccccaaggcagtcacggctgctgcagtcagaatccaaaggcttcaatggaagaacaaacatctagcaggggtaatgggaagatgactagccctcctcggggtccagggacccacagaactgcagaactggctagagccgaagagctgttagagcaacagcttgagctgtaccaagcgctgctcgagggtcaggaaggcgcatgggaagctcaggctctggtgctgaaaatccagaaacttaaagaacagatgaggcggcaccaggagtctctgggtggtggggcatag

SEQ ID NO: 195255 - DNA, 360 bp, synthetic construct
  misc_feature 1..360: note = Description of Artificial Sequence: Synthetic coding sequence
  source 1..360: mol_type = other DNA
atggtgctgcccctgccctggctgagccggtaccacttcctgcggttactgctgccatcatggagccttgcaccccaagggtctcatggctgctgtagccaaaatcccaaagcctcaatggaagaacagactaactctcggggcaatggaaagatgacttcccccccgagagggcctgggacccatcggactgccgagctggctcgcgccgaagagttgctggagcagcagctcgaactttatcaagcattactggaagggcaagagggagcctgggaggctcaggctttagtgctcaaaattcagaaactgaaggagcagatgaggagacatcaggaaagcctgggcggaggagcctag

SEQ ID NO: 195256 - DNA, 360 bp, synthetic construct
  misc_feature 1..360: note = Description of Artificial Sequence: Synthetic coding sequence
  source 1..360: mol_type = other DNA
atggtgctgcccctgccctggctgagccggtaccacttcctgcggttattgctgccctcatggagcctggccccccagggctctcatggctgttgtagtcaaaatccgaaagcatcaatggaagagcagacaaactcacgaggaaacggaaagatgacttccccgcccaggggcccagggacccacagaaccgccgagcttgcgcgggccgaggagctgctggagcaacaattagaactttaccaggcgctgctggaggggcaggagggcgcatgggaagctcaggcactggtcttaaagattcagaagctcaaggagcagatgaggcgccatcaggagtcgctaggcggcggggcttag

SEQ ID NO: 195257 - DNA, 360 bp, synthetic construct
  misc_feature 1..360: note = Description of Artificial Sequence: Synthetic coding sequence
  source 1..360: mol_type = other DNA
atggtgctgcccctgccctggctgagccggtaccacttcctgcggcttctgcttccttcgtggtccctggcacctcaaggctctcacggatgctgctcccaaaatcctaaggcttccatggaggagcagacttcatcacgcgggaatggaaaaatgaccagcccacctagagggcccggcacccatcgcaccgctgagttagcccgagcagaggaattgctcgaacagcaactcgaattatatcaggcactgctcgagggccaagagggggcttgggaggcccaggcactggtgctgaagattcaaaagctgaaagagcagatgaggcggcatcaggagtcactgggaggcggtgcctag

SEQ ID NO: 195258 - DNA, 360 bp, synthetic construct
  misc_feature 1..360: note = Description of Artificial Sequence: Synthetic coding sequence
  source 1..360: mol_type = other DNA
atggtgctgcccctgccctggctgagccggtaccacttcctgcggctgctactccctagctggagccttgcacctcagggatctcacggctgctgctcccaaaaccctaaagcttccatggaggagcaaacctcttcgcgtggaaacggaaagatgacttctccaccgagagggcctggtacacacagaactgccgaactggcacgagctgaagaactcctggaacagcaattagaactgtatcaggccctgctcgaggggcaagagggggcctgggaagctcaggccctggttctaaagattcagaagttaaaggagcagatgaggcgtcaccaagagtctctgggaggaggagcctag

SEQ ID NO: 195259 - DNA, 360 bp, synthetic construct
  misc_feature 1..360: note = Description of Artificial Sequence: Synthetic coding sequence
  source 1..360: mol_type = other DNA
atggtgctgcccctgccctggctgagccggtaccacttcctgcggctgctgctgcctagctggtccctcgctccacagggctcacacggctgttgttctcagaatcctaaggcttctatggagaagcagaccaattcccgtggcaacggtaagatgacaagccccccaagaggccccgggacccacaggactgcagaactggcccgggccgaggaactgctagaacaacaactagagctgtaccaggccctcttagagggccaggagggggcttgggaggcccaggctctggtgctcaagattcagaagctgaaagagcaaatgcgacgccaccaggaaagtttgggcgggggagcttag

SEQ ID NO: 195260 - DNA, 360 bp, synthetic construct
  misc_feature 1..360: note = Description of Artificial Sequence: Synthetic coding sequence
  source 1..360: mol_type = other DNA
atggtgctgcccctgccctggctgagccggtaccacttcctgcggctcctgctgccatcctggtctttggcgccacaaggaagccacggctgctgctcacagaaccccaaggcatccatggaggaacagacaaattcccgcgggaacggcaagatgacgtctcctccccggggcccaggtactcatcgaaccgccgaactagccagagcggaggagttgctcgagcagcagttagagctttaccaggccctcctggaaggacaggaaggtgcttgggaagctcaggcgctggtcctgaaaatccaaaaattgaaagaacaaatgcgccggcaccaagagagtcttgggggaggggcatag

SEQ ID NO: 195261 - DNA, 360 bp, synthetic construct
  misc_feature 1..360: note = Description of Artificial Sequence: Synthetic coding sequence
  source 1..360: mol_type = other DNA
atggtgctgcccctgccctggctgagccggtaccacttcctgcggcttctcctcccttcatggagtttggctccgcagggctcgcatggatgctgttctcagaaccctaaagcgtccatggaagagcagacgaattcacgggggaatgggaaaatgacaagtcctccgcggggcccaggaactcatcgtaccgccgagttggcacgggcagaggaactgcttgagcagcaactcgaattgtatcaggcacttctagagggccaggaaggagcctgggaggcacaggccttagtgctcaagatccaaaaactcaaggaacagatgcggcggcaccaggagagtctggggggtggcgcttag

SEQ ID NO: 195262 - DNA, 1059 bp, synthetic construct
  misc_feature 1..1059: note = Description of Artificial Sequence: Synthetic coding sequence
  source 1..1059: mol_type = other DNA
atggagagcggcggccggcccagcctgtgccagttcatcctgctgggtactaccagtgtggtaaccgcagcgctatactccgtctatcgacagaaagcccgagtgtcacaggagctgaaaggagcgaagaaagtgcatcttggcgaggacctaaagtccatcctgtctgaggcacccggtaaatgcgtgccatacgccgttatcgagggtgctgtgagaagtgtgaaggagacgctgaactcccaattcgttgagaactgcaaaggggtgatacagagactgactctacaagagcataagatggtgtggaatcgcactactcatttatggaacgactgttcgaagatcattcatcagaggacaaatacagtaccctttgatcttgtccctcacgaagacggggtggatgtggctgtgcgggttttaaaaccccttgattccgtcgaccttggcttagagactgtgtatgagaagttccatccctcaatccagtcattcactgatgtgatcgggcattatatatccggagaaagacctaaaggtattcaggaaacggaagagatgctgaaagtcggggcaacgctcacgggcgtcggcgaattagtcctagataacaattctgtacgactccagcccccaaagcaaggcatgcagtactatttgtcttcccaggattttgactctcttctgcagcgacaggaatcatcagtcagattgtggaaagtcttagcactcgtttttggatttgcgacctgcgctactctttttttcatcctgaggaaacagtacctgcaaaggcaagagcgcctcaggctcaagcagatgcaagaagaatttcaggagcatgaggcccagttgttatcccgcgcaaagcctgaggatagagagagccttaagagcgcctgcgtggtttgcctgagctccttcaaatcctgtgtttttctggaatgcggccatgtgtgtagttgcaccgaatgctatcgggctctgcctgagccaaaaaagtgcccaatttgtcgtcaggccataacacgggtgattcccctttataacagctag

SEQ ID NO: 195263 - DNA, 2142 bp, synthetic construct
  misc_feature 1..2142: note = Description of Artificial Sequence: Synthetic coding sequence
  source 1..2142: mol_type = other DNA
atgctgtgcgtgggccggctgggcggcctgggcgcccgggccgccgctctcccaccgcgaagagctgggcgcggctctctggaggctggaatcagggctagacgcgtgagcacaagctggtctccagtgggcgccgcattcaatgtgaagccccagggcagtcggctggacctgttcggagagcgccggggattgtttggagtccccgagttatcagctcccgaaggcttccatatagcacaagaaaaagcgctgcgaaaaacagagttacttgtggaccgggcctgcagcaccccccccggccctcaaactgtcctgatctttgacgaattgagtgactccctctgtcgcgtggccgaccttgccgattttgtgaaaattgctcatcctgagccggcattcagagaagccgcggaggaagcatgccggtcaatagggaccatggtcgaaaagttgaacacaaacgtcgacttgtaccagtctttgcagaaactgctcgctgacaagaagctggtggactccctggatccagagacccgcagagtcgccgaattgttcatgttcgactttgagatcagtggcatccatctggataaagaaaagcggaagcgcgcagtagacctgaatgttaagatcttggatctctcatctaccttcctgatgggcacaaatttcccaaataaaatcgaaaagcacctactcccagaacatattcggcgaaatttcacctccgccggcgatcacatcattatcgatggcctgcacgcggaaagccctgatgaccttgtacgtgaggctgcttataagattttcctgtacccaaatgccgggcaactcaagtgtcttgaggagctgttgtcttccagagatctcttggctaagttggtgggatactccacattctctcatcgggctctgcagggtactatcgctaagaaccccgagactgttatgcagttcctggaaaaactgagtgataagctgagtgagcgaactctgaaggacttcgaaatgattagaggaatgaaaatgaagctcaatccacagaattcagaagtaatgccgtgggaccccccatattactctggagttattagggctgagaggtataatatagaaccgtccctgtactgtcctttcttttcactgggggcttgcatggaaggactgaatatactgttgaaccggcttctcggcatcagtttgtacgcagagcaacctgccaaaggtgaggtgtggtctgaggatgtgcgcaagctggctgttgtacatgagtcggagggcctgctgggctacatttattgcgatttcttccagagggcagacaaaccacatcaggactgccatttcacgatccgaggcggaagacttaaggaggacggcgattaccagcttccagtggttgtcttgatgctgaacttgccccgaagtagcaggtctagcccaactctgttaactccgtccatgatggagaatcttttccatgagatgggccacgcaatgcacagcatgctcggacgtacacgttaccaacatgtgacaggaacgagatgccccacagatttcgccgaagttcccagtattcttatggaatactttgcaaacgactatcgagtggtcaaccaatttgcccgccactatcaaaccggtcagccacttcccaaaaatatggtttcgcgcctttgcgaaagcaaaaaagtgtgtgcagccgcggatatgcagctacaggttttctatgcgaccctggaccagatctaccacgggaaacatcctcttagaaacagcacgactgacatccttaaagagacacaggagaaattttacggcctgccgtacgttcccaacaccgcttggcagttgcgtttttcccatctcgtgggttatggggcacggtattactcttatttaatgtctcgggctgtggcaagcatggtctggaaagagtgttttctgcaggacccttttaacagagccgcaggggagcgctacagaagggaaatgctcgcccacggaggcggccgagaaccaatgctgatggttgaaggaatgctgcaaaaatgtccctccgtagacgattttgtgagtgctttggtgtccgatctcgacctggacttcgagacatttcttatggattctgagtag

SEQ ID NO: 195264 - DNA, 1353 bp, synthetic construct
  misc_feature 1..1353: note = Description of Artificial Sequence: Synthetic coding sequence
  source 1..1353: mol_type = other DNA
atgagcgccatccaggccgcctggcccagcggcaccgagtgcatcgccaagtacaacttccacggcacagcggagcaagatctacccttttgtaagggagatgtgcttacgattgttgccgtgaccaaggatcccaactggtacaaagctaagaacaaagtggggcgcgaggggatcatcccagcaaattatgtgcagaaacgggagggcgtgaaggccgggacaaagctcagtcttatgccatggttccacgggaagattacccgggagcaggctgaacggctgctctatcctcccgagactggtctgtttttggtccgtgagagtacaaactaccccggggattataccttatgcgtctcctgcgacggtaaagtagaacattatcgaatcatgtaccatgcctccaaactgagcattgatgaagaggtctattttgagaatcttatgcaacttgtcgagcactatacatctgacgctgacggactatgcacccgcctgattaaacctaaagtaatggaaggcactgttgcagcccaggatgagttttaccgctctggttgggccctgaacatgaaggaactgaagttgctacagaccatcggaaaaggcgagtttggagacgtaatgctcggagactaccgaggcaacaaggtcgctgtaaaatgcattaaaaacgatgcaacagcccaggctttcctggccgaagcaagcgtcatgactcaactaagacattcaaacctggttcagctgctaggagtaatagttgaggagaagggaggcctttacatagtcacagagtatatggctaagggctcgttagttgattatctcaggagccgtggaagatctgtgcttgggggtgattgtctgcttaaattttctctggacgtatgtgaagctatggagtaccttgaaggtaataactttgtccatcgcgacttagctgctcgtaacgtgctggtgtcggaggataacgtcgcgaaggtgtcagacttcggcctcacaaaggaggcctcctctacccaagacaccggtaaactcccggtcaaatggacagcccctgaagcacttcgagaaaagaaattttccacaaaaagtgacgtctggtctttcgggattctgctgtgggaaatatacagcttcggcagagtcccatatccccgcattccgctgaaggacgtggttccacgcgtggagaagggctataagatggacgcacccgatggctgtccaccagcagtgtatgaggtcatgaagaactgttggcacttagacgcagccatgcgtccttcgtttttgcagctaagggagcaactggaacacattaagacccatgagcttcacctctag

SEQ ID NO: 195265 - DNA, 1170 bp, synthetic construct
  misc_feature 1..1170: note = Description of Artificial Sequence: Synthetic coding sequence
  source 1..1170: mol_type = other DNA
atgcgggtgctggtgcggcggtgctggggcccccccctggcccacggcgctcgaaggggtcggccctcccctcagtggcgggcgctagcaagactgggctgggaggactgtcgcgatagcagagtgagggagaaaccaccctggcgggtcctgttcttcgggaccgaccagtttgctcgcgaggccctgcgagccctgcacgcggctagagaaaacaaagaagaggaactcatcgacaaactcgaagtcgtcacaatgccctcacccagccctaaggggctgcccgttaagcagtacgccgtgcaatcacaactgccggtttacgaatggcccgacgttggctccggggaatacgatgtgggcgtggtcgccagcttcggccgcctcttgaacgaagccctcatcctcaagttcccgtatggcattctgaatgttcatccatcgtgtcttcccaggtggagaggtcctgcaccagttatacacaccgtgttgcacggggacactgtgaccggcgtcacaatcatgcagatccgacctaagcgatttgatgtgggaccaatcctcaagcaggaaacagtacccgtgcctccaaagagtacagccaaggaactggaggcagttctgtctcgcctgggagccaatatgttgatcagcgtgctgaaaaatttaccagaatctctgtctaatggccgacagcaaccgatggagggagccacgtatgccccgaaaatctcagcaggaacctcatgcataaaatgggaggagcagaccagcgagcagatctttcggttgtatcgggctattggaaatatcatcccactgcagactctgtggatggcaaacacgatcaagctgttagatcttgtggaggtgaatagttctgtgctcgccgatccaaagctgaccggccaggcgttaatccccgggtccgtgatatatcacaaacaatctcaaattctgctggtgtattgcaaggatgggtggatcggtgttcgaagtgtcatgctgaaaaagagcttgactgcaactgacttttataacggttacctgcacccttggtaccagaagaatagccaggcccagcccagtcagtgcaggtttcagacgctgagattgccaacgaagaagaagcagaaaaagaccgtggccatgcaacagtgcattgagtag

SEQ ID NO: 195266 - DNA, 1749 bp, synthetic construct
  misc_feature 1..1749: note = Description of Artificial Sequence: Synthetic coding sequence
  source 1..1749: mol_type = other DNA
atggccgtgcccggcgtgggcctgctgacccggctgaacctgtgcgcaagacgccgtacccgcgttcagagaccaattgttcggctgctctcttgccccggaactgtggcaaaggacctgcggagggacgagcagccaagtgggtcagtcgagacaggatttgaggacaagatccctaagcgacgtttctctgaaatgcagaatgagcgtagagagcaagcccagaggactgttttgatccactgccctgagaagatttcagaaaacaaattccttaaatacctaagccaattcggacccattaacaatcacttcttttatgagtctttcggcctgtatgcagtcgttgagttctgtcagaaagaatctattggttctctccagaatggcacacacaccccttccacagcaatggagaccgccattccctttcgctccaggtttttcaacttgaagctaaaaaatcaaacctctgagaggtctcgcgtccgctcatctaaccagctgcctcgctcaaacaaacaactcttcgaactactctgttacgccgagtctattgacgaccagcttaacacgctgttaaaggagttccagcttacagaggaaaacaccaagctgcggtatctgacttgcagtctgatcgaggacatggccgccgcctatttcccagattgcattgtccggcctttcggtagctcggtcaacaccttcggtaaactggggtgtgatttagatatgttcctggatttggatgagacccggaacctgagcgcccataagatcagcggaaatttccttatggaattccaggtaaaaaacgtcccttccgagaggattgctactcagaagattctctctgtgcttggggagtgcctcgatcactttgggccaggctgtgtaggcgttcagaaaattctcaacgccagatgtccactcgtgcgtttcagccatcaagcctcaggattccagtgtgacctcactacaaacaatcgaattgctctgacttcttctgagcttctgtatatttacggggccttagacagcagggtgagggcacttgtcttcagtgtgagatgctgggcaagagcccacagtctgacatcatcaatccccggggcttggattaccaacttttccctgacgatgatggtcattttcttcctgcagcgacgcagtccacccatccttccgacactggacagcctcaagaccttggctgatgctgaagataagtgcgtaattgaaggaaacaattgcacatttgtgcgcgatctgagtagaataaaaccaagccaaaataccgaaaccctggagttgctgctcaaagagtttttcgaatacttcggtaattttgcgtttgataagaacagcattaatatccgccaagggcgggagcagaacaaacccgatagctcaccgctttatatacaaaaccccttcgagacgagcctgaacattagcaagaatgtgagccagagccagcttcaaaaattcgtggatcttgctagggaatcagcttggatattgcagcaggaggacaccgatcgaccttctatatcctctaatcgaccctggggactagtttccctcctgctccctagtgctccaaacagaaagagctttacgaagaagaaatctaataaatttgctatagaaacggttaagaatttgcttgagtcccttaaaggaaaccgaacagaaaatttcactaagaccagcggaaaaaggactatatccactcagacgtag

SEQ ID NO: 195267 - DNA, 2139 bp, synthetic construct
  misc_feature 1..2139: note = Description of Artificial Sequence: Synthetic coding sequence
  source 1..2139: mol_type = other DNA
atggcctgggccaagaaggtgggcggccgggccggccagggccggtcactgagtcgatgcgatccgataatcctggacccggagtggctttacggtccccccgagggcgaaggtgggcccgaaggggtaggcggcgaaacccgggcctcaatccacccccccctgcgtacgggccgacatcatcagaaggtgaaccataatatccgtgggccagaaggaagtgcgaaagatgctgccccagggggggggggccatcaccaagctggccccggccagcggggtgacgaagatggagcgctgcagcacctgtgcggcgggggtggcggggtcggagtgtctgtgggaaggggtacagggacctctgtcgcagcagaacaccctagcttgcaggttaagctgcttgagctgcaggaactggtcttgcggctggcaggcgatcacaacgaaggacatgggaagtttttagccgccgcacagaatcctgcagacgacccggcccctggagcacctgcgccccaggagctcggggctgccgacaaacagggaggctttgaggataagatccctaagcgcagattttctgagatgcagaacgaaaggcgcgaacaagcccagcggacagtgctcattcattgtcccgagaagatcagcgagaacaagttcttgaagtacttgagccagttcggccccattaacaatcacttcttctatgagtcattcggtctctacgctgtggtggaattttgccagaaggaaagcatcggctcacttcagaacggcacacacacgcctagcactgctatggaaacagccattccattccgctcacgttttttcaacctgaagctcaaaaatcaaacaagcgaacgttctcgcgtgcgctccagcaaccagctaccacggagcaacaagcagctgttcgaactgctgtgttacgccgagtcaatcgacgatcagctgaacactcttcttaaagagttccagctgactgaggaaaacacgaagctccggtatctcacatgtagcttgatagaggatatggccgcagcttatttcccagactgcatagtgcgaccttttggcagctctgtcaacaccttcggcaagctggggtgtgatctcgacatgttcctcgatctggacgagactaggaatctcagcgcccataagatttcaggcaactttctgatggaatttcaggtcaagaatgtacccagtgagagaattgccacgcaaaagatcctctctgttctgggggaatgcttggatcatttcggccccggatgcgtaggcgttcaaaaaattctcaacgccagatgccctttggtaagattcagtcatcaggcgtctggctttcaatgcgatcttaccaccaataacaggatcgctctaacgtcgtctgagctgctgtacatttacggcgctctcgatagccgcgtgcgcgcactggtgttctctgtgagatgctgggcccgcgcacacagtctgacaagtagcattccgggagcgtggatcaccaacttcagcctcaccatgatggtgatttttttcctccaaaggcgaagcccccccatcctcccaacattggattctttgaaaacattggccgacgcagaggacaagtgtgttatagaaggaaacaactgcacttttgtccgagacttgagccgaatcaaaccaagtcagaatacggagaccctggagttacttttaaaggaatttttcgagtatttcggtaattttgccttcgacaagaactcaatcaatattcgacagggacgggagcagaacaagccagactcatcgcccctgtacatccaaaacccctttgaaaccagccttaacataagtaagaacgtgtcgcagtcgcagctccagaagttcgtggacctggcccgcgagtccgcatggatcctccagcaggaagacaccgacaggccgtccattagcagtaatcggccctggggactggtgtccctgctgcttccatctgcccctaacagaaagagctttactaagaaaaagagcaataagtttgctatagagactgtgaagaatctcctggagtcgctgaagggcaatagaaccgagaactttacaaaaacctctgggaagcggactatctccacgcaaacgtag

SEQ ID NO: 195268 - DNA, 660 bp, synthetic construct
  misc_feature 1..660: note = Description of Artificial Sequence: Synthetic coding sequence
  source 1..660: mol_type = other DNA
atgcagaacgagcggcgggagcaggcccagcggaccgtgctgatccattgtcccgagaagatctccgagaacaagttcctaaagtatctgtctcagttcgggccgataaataatcactttttttatgagtcttttgggctctatgctgtagtcgagttctgtcaaaaagagtctataggcagcctgcaaaacggaacgcacactcctagcactgccatggagacagctataccgttccgcagccggttctttaatctgaagctcaagaatcaaactagtgaaagatcccgggtccgctcctcaaatcagctgcctcggagcaataagcagctcttcgaactgctttgttacgctgagtctatcgatgaccagctgaatacacttctgaaggaattccagctgactgaagagaacaccaaactgcgttatctgacatgctctctcattgaagacatggctgccgcctactttcccgactgtattgtgagaccctttgggtcatcagtaaatacttttggcaagttgggatgtgacctggacatgtttcttgacttggatgaaacaaggaacctctcagcacacaagatcagtggcaactttctgatggagtttcaggtaaaaaatgtgccttccgagagaattgcgacacagaagatctag

SEQ ID NO: 195269 - DNA, 453 bp, synthetic construct
  misc_feature 1..453: note = Description of Artificial Sequence: Synthetic coding sequence
  source 1..453: mol_type = other DNA
gacctgcggcgggacgagcagcccagcggcagcgtggagaccggcttcgaagacaaaattcccaagcggcggttttccgagatgcaaaatgaaagacgggagcaggcacagaggactgtgctcattcactgccctgagaaaataagcgaaaacaaatttctgaaatatctgtcgcagtttgggccaattaataaccactttttttacgagtcctttggactgtatgccgtggtcgaattctgccagaaagaatcaattggatcgctgcagaatgggacccacacccccagcactgcaatggagacagccataccattcagatctcgattttttaaccttaagctgaagaaccagactagcgagcgcagccgtgtgcgctccagtaatcaattgccacgcagtaataagcagctttttgaattactctgctatgctgagtcagtgagcttctag

SEQ ID NO: 195270 - DNA, 309 bp, synthetic construct
  misc_feature 1..309: note = Description of Artificial Sequence: Synthetic coding sequence
  source 1..309: mol_type = other DNA
atgttcctgaccgccctgctgtggcggggccggatccccggccggcagtggatcgggaagcaccgccgccccaggtttgtcagcctgcgagctaagcagaacatgatccgaaggctggagatcgaggctgagaaccactactggctgtctatgccctacatgacaagagagcaggagagaggccatgccgccgtacggcgccgcgaggctttcgaagccataaaggccgccgcgacctcaaagttcccccctcaccgatttattgctgaccagctggatcatttaaatgttacaaagaaatggtcatag

SEQ ID NO: 195271 - DNA, 978 bp, synthetic construct
  misc_feature 1..978: note = Description of Artificial Sequence: Synthetic coding sequence
  source 1..978: mol_type = other DNA
atggccgccgccgtgcggtgcatgggccgggccctgatccaccaccagaggcattccctcagtaagatggtgtaccagacatccctctgctcatgcagcgtgaatattagggtgcccaaccgacacttcgcagctgcaaccaaatcagcaaaaaaaactaaaaagggggcgaaggagaaaaccccagatgaaaaaaaggacgagattgagaagataaaggcatatccctacatggaaggagaaccggaggatgacgtgtatctgaagagactgtatccacgccaaatctatgaggtagaaaaagcagtgcacttacttaagaagttccagatccttgattttacaagccccaagcagtcagtctatctggaccttacactcgatatggccttggggaagaaaaaaaacgtcgaacctttcacatccgtcctctccctcccttaccctttcgcctcagaaatcaataaagtggctgtattcacagagaacgcctcggaagtaaagatcgccgaagagaatggtgccgcctttgctggcgggacatctcttatccagaagatctgggacgacgagattgtggcggacttttacgtggcagtgcccgagatcatgcctgagctcaacagacttcgtaagaaactgaataaaaaatatcctaagctttctaggaactccattgggcgcgacatccccaagatgctggagctcttcaaaaatggccatgagattaaggtcgatgaggagcgggagaattttttgcagacgaagattgctaccttggatatgagcagcgatcagatcgcagccaatctgcaggcagtgattaatgaagtttgccggcatcggcctctgaatttgggaccgttcgtggtgcgagcctttttgcgctcaagtacctcggagggactacttctgaagatcgaccccttgcttcccaaggaggttaagaacgaggagtccgagaaagaagacgcttag

SEQ ID NO: 195272 - DNA, 909 bp, synthetic construct
  misc_feature 1..909: note = Description of Artificial Sequence: Synthetic coding sequence
  source 1..909: mol_type = other DNA
atggtgtaccagaccagcctgtgcagctgcagcgtgaacatccgggtccctaacagacatttcgcagccgcgaccaagtcggcaaaaaagacgaagaaaggcgccaaggagaagacgcctgacgagaagaaggacgagatagaaaagataaaggcctatccgtatatggaaggtgaaccagaggatgacgtctacctgaaacggctgtacccccgccagatctatgaggtggagaaagcggtgcaccttctgaagaaattccagatcctggacttcacatcgcctaagcaatccgtgtatcttgatctgaccctggacatggccctgggaaagaagaaaaatgtcgaaccttttacatccgttctgtctctcccatacccatttgcgtcagaaattaacaaagtggccgtcttcactgaaaatgctagtgaagtcaaaattgctgaagaaaacggcgcggcgtttgccggaggcacatctctcatccagaagatctgggatgatgaaatcgtggccgatttttatgtcgctgtgccagaaattatgcctgagttgaatagactcagaaagaagctgaacaagaagtacccaaagctatctcgcaatagtattgggcgagacatacctaaaatgttggaacttttcaaaaacggccacgagatcaaggtcgatgaggagcgggagaactttttgcagacgaaaatcgctacgctggatatgtccagtgaccagatcgctgccaacctacaagccgttattaatgaggtgtgccgccacagacctcttaaccttgggccttttgtggtaagagctttcttgcggagctcgacttcagaaggcttacttctgaaaatagatccactgctcccaaaggagatcaaatcacagcctaagaaaaagaaaaactag

SEQ ID NO: 195273 - DNA, 816 bp, synthetic construct
  misc_feature 1..816: note = Description of Artificial Sequence: Synthetic coding sequence
  source 1..816: mol_type = other DNA
atgatcagcgcccactgcaacctgcacctgcccggcagcagcgactctcccgcctccgccagtcaggtagcaggaatcacggggaggctgcccaccctccagactgtccgatacggatcgaaggctgtgacacgccatcggcgcgttatgcattttcagcggcaaaaactgatggccgtcactgaatacatccctccgaaacctgccatccatccctcttgtttgccttcgcccccaagtcctccacaagaagagattggcttgattaggctgctgcgccgggagattgccgcggtttttcaagacaacaggatgattgctgtgtgtcagaacgtggctctgtctgcggaagacaaactcctgatgcgccaccagctccgcaagcacaagattcttatgaaggtgtttccaaaccaggtgctgaaacccttcctggaggactctaagtaccaaaatctactccccctgtttgttgggcataacatgctgcttgtgtctgaggagccaaaagtgaaagaaatggtgcgaatcctacgcacggtgcccttcctgccgctcctgggcggatgtattgatgacactatcctttcgaggcagggttttattaattattccaaactgccttccttaccgctggttcagggcgagctggtgggaggattaacctgcttgacagcccagactcatagtctcctgcagcaccagccgctgcagctcactaccctcctggatcagtacatccgagaacagcgagagaaggacagcgtcatgagcgccaatggaaagcccgacccagacaccgtgccggactcatag

SEQ ID NO: 195274 - DNA, 786 bp, synthetic construct
  misc_feature 1..786: note = Description of Artificial Sequence: Synthetic coding sequence
  source 1..786: mol_type = other DNA
atggccgccgccgtggccggcatgctgcggggcggcctgctgccccaggctgggaggctgcctactcttcagacagtccggtatggtagcaaggccgtgacccgccacaggagggttatgcacttccaacggcagaagcttatggccgtgaccgagtatatacctcctaaacccgcgatccacccctcttgcctgccatcgccacccagtcctcctcaggaggagatcgggctgatccgattgctgcggcgagagattgccgcggtgtttcaggataaccgcatgatcgccgtgtgccagaacgtggctctctctgctgaagataagctgctgatgcggcaccaactccgaaagcataaaattctgatgaaagtgtttcccaatcaagttttaaagccttttctggaggattccaaatatcagaatcttctccctctgtttgtgggacacaatatgctgcttgtcagcgaggagcctaaggtgaaggaaatggttcggattctcagaacagtaccttttttacctctgctcggagggtgtattgatgataccatcctcagtagacagggatttattaactactccaagctaccctccctccccctggtgcagggcgagctcgtggggggtttgacttgtctgacggcgcagacccacagcctcctccagcaccaaccactgcaactgaccactctgctggatcagtacatccgtgagcagcgggaaaaggacagcgtcatgtccgctaacgggaaaccggaccctgacaccgtccccgactcgtag

SEQ ID NO: 195275 - DNA, 816 bp, synthetic construct
  misc_feature 1..816: note = Description of Artificial Sequence: Synthetic coding sequence
  source 1..816: mol_type = other DNA
atgatcagcgcccactgcaacctgcacctgcccggcagcagcgacagtccagcctccgcgtcccaggtggcagggataaccggcagactgccaaccctgcagacggtgagatatggtagcaaagccgtaaccagacacaggagggtgatgcatttccagcgtcaaaagctgatggcagtgaccgagtatattccccctaagcccgccattcacccatcttgcctgccaagccccccatcaccaccccaagaggaaataggccttattcggttactcaggagggagatcgccgctgtgttccaggacaatcgcatgattgccgtttgccagaacgtagctttatcagccgaagacaagctgttgatgaggcaccagttgagaaagcacaagattttgatgaaggtcttccccaaccaggtgctgaagccattcctggaagattccaagtaccagaacctcctgcccctttttgtgggacacaacatgctcctcgtgagtgaagaaccaaaagtgaaagagatggtcaggatcctcaggactgtcccgtttttgcccttgctgggcggttgtatcgacgatacgatcctgtcccgtcaaggcttcattaactacagtaaactcccatccctgccattggtccagggggagttggtgggtggattaacctgtttaaccgcacagacacacagcctattgcagcaccagcccctgcagctgactacactcctggatcagtacatccgggagcaacgggagaaagacagcgtcatgtcagccaacggcaaacctgatcctgatactgtgccggattcctag

SEQ ID NO: 195276 - DNA, 579 bp, synthetic construct
  misc_feature 1..579: note = Description of Artificial Sequence: Synthetic coding sequence
  source 1..579: mol_type = other DNA
atgagcaagctgggccgggccgcccggggcctgcggaagcccgaggttggtggagttatccgcgccattgtgagggctggactggctatgcccggaccgccactcggacctgtgctcggccaacgaggggtttcaattaatcaattctgcaaagaatttaatgagcgtaccaaggacatcaaagaaggaatccctctccccacaaaaattctggtgaaaccagaccggacattcgaaatcaaaatcgggcagccaacggtgtcctatttcctgaaggcggccgctgggattgaaaagggcgctcggcagactggtaaggaggtagcaggcctagtgactctgaagcacgtatacgaaatcgctcgcattaaagcacaggatgaagcgtttgccctgcaagacgtgcccctatcatccgtggtgcggtctatcatcggctctgcccgcagtctcggaataagggtggtcaaggacctgagctcagaagagctggctgcatttcaaaaagagagggccattttcctcgcggcacagaaggaggctgacctcgcagcccaggaagaagccgccaagaagtag

SEQ ID NO: 195277 - DNA, 546 bp, synthetic construct
  misc_feature 1..546: note = Description of Artificial Sequence: Synthetic coding sequence
  source 1..546: mol_type = other DNA
atgagcaagctgggccgggccgcccggggcctgcggaagcccgaggttggcggagtgatacgggccatcgtccgggcagggttagccatgcccggtcctcccctgggccctgtattggggcaacggggtgtaagtattaatcagttctgcaaagagttcaatgagagaacaaaagacataaaggagggaatccctctgcctactaaaattctggtgaagcctgataggacctttgagatcaagattggccaaccgaccgttagctattttttgaaagccgcggctgggattgaaaaaggcgcccgccaaacagggaaggaggtggccggattagtgacgctgaagcacgtctacgaaattgctcggattaaagcccaggatgaggcttttgctttacaggatgtgcctctttccagcgtggtacgttctatcattggctccgcccggtctttgggcatcagggttgtgaaagaacggtgtagcgccaatgtcctgcggaacgggaaaattagtatgaaagacccatccggcaggtcaagtgtatag

SEQ ID NO: 195278 - DNA, 501 bp, synthetic construct
  misc_feature 1..501: note = Description of Artificial Sequence: Synthetic coding sequence
  source 1..501: mol_type = other DNA
atgagcaagctgggccgggccgcccggggcctgcggaagcccgagcgcggcgtctctatcaaccagttctgtaaggagttcaacgaacgaacgaaagatatcaaagaggggatccccttaccaaccaaaatccttgtgaaaccggaccgcacgttcgagattaaaatcggccagcccactgtctcctacttccttaaagctgctgccggcatcgagaagggggcgcgtcagaccgggaaagaagtggctggactcgtgacactgaagcacgtttatgagatcgcaaggattaaagctcaagatgaagccttcgccctgcaggatgtccctctgtccagcgtggttcggtctataattgggtcggctcgtagcttgggtataagagtggttaaggatctctccagtgaggagcttgccgccttccagaaggagcgcgcaatcttcctggctgcccagaaggaggcggacctggccgcacaagaggaagccgcaaaaaagtag

SEQ ID NO: 195279 - DNA, 891 bp, synthetic construct
  misc_feature 1..891: note = Description of Artificial Sequence: Synthetic coding sequence
  source 1..891: mol_type = other DNA
atggccgccgaggcccgggtgagccggtggtacttcggcggcctggcttcttgtggagcagcatgctgtacccatcccctggatctgttgaaggtgcacctgcagacccagcaggaggtaaagcttcgcatgactggcatggccctcagggtcgtgcgtactgatggaattttggccctgtatagcgggctaagtgcatcgctgtgccgccagatgacttattccctcactagatttgccatatatgaaacggtgcgcgatagagtggccaaaggaagtcagggccctctcccatttcatgagaaagtgcttttgggcagcgttagtggcctcgccggggggtttgttggaaccccggccgacctggttaacgtgcggatgcagaacgacgtgaagcttccacaaggacagcgaaggaattacgctcatgcccttgacggactgtaccgtgtggcccgtgaggagggcctccgaaggctcttctccggcgccaccatggcctcgtcccgtggcgcacttgttaccgtcggtcaactctcttgttacgaccaggccaaacaattggtgctctccaccggctatctctccgacaatatattcactcacttcgtcgcttcctttatcgctgccgccggtgacgagcctcctccacagggcggctgcgccacgttcctctgccagcctcttgacgttttaaagaccaggctgatgaatagtaaaggcgagtatcagggagtgttccattgcgccgtggagactgcaaaactcggacctctggccttttacaagggcctcgtgccggcaggaatcagactgatcccccatacagtgttgacgtttgtctttctggagcagctcagaaagaacttcggcatcaaggtaccttcttag

SEQ ID NO: 195280 - DNA, 537 bp, synthetic construct
  misc_feature 1..537: note = Description of Artificial Sequence: Synthetic coding sequence
  source 1..537: mol_type = other DNA
atgctgcccgccgccgcccggcccctgtggggcccctgcctgggccttcgagcagcagcttttcgccttgccagacgccaggtgccatgcgtgtgtgccgtgcgtcacatgaggagcagcggacaccagaggtgtgaagcactggcgggggcccctctggacaacgcacctaaggaatatccacccaagattcaacaattggttcaggacatagcttcgctgaccctgctggaaatctcggatcttaacgagttgctgaaaaaaacattaaagatccaggacgtgggcctggtccccatgggcggcgttatgagtggggcagtgccagctgctgccgcccaggaggctgtagaggaggacatccccatcgcgaaggagcgtacgcacttcactgtgagattgactgaggcgaaacctgtggataaagtgaaactcattaaggagataaagaactatatcaaggctagcacgtctagccgccaacggtcctggtggtctccctgtcccggtaaccagtcccagtgccgccagtcgtag

SEQ ID NO: 195281 - DNA, 597 bp, synthetic construct
  misc_feature 1..597: note = Description of Artificial Sequence: Synthetic coding sequence
  source 1..597: mol_type = other DNA
atgctgcccgccgccgcccggcccctgtggggcccctgcctgggcttgcgggcagccgccttccggctcgcacgtcgccaagtcccgtgcgtctgcgccgtgagacatatgcgcagttctggccaccagaggtgcgaggccctagccggagcgcccctggacaatgcacctaaggaataccctcctaaaatacagcagctcgtacaggatatagccagcctgacactcttggaaattagcgacctgaatgagcttcttaagaagacactgaagatacaagacgtggggcttgtgcctatgggcggcgttatgagtggcgcggtgcccgccgccgctgctcaagaggccgtggaagaagacatcccaatcgctaaggagagaacacatttcacagtccgattaaccgaggcaaaaccagtggacaaggttaagctaattaaggagattaaaaattacatccaagggatcaacttagtccaagctaagaagttggtggagagcctgccacaggaaattaaggctaatgtggcgaaggcagaagccgagaaaattaaagctgccctggaagccgtcggcggaactgttgtgctagagtag

SEQ ID NO: 195282 - DNA, 864 bp, synthetic construct
  misc_feature 1..864: note = Description of Artificial Sequence: Synthetic coding sequence
  source 1..864: mol_type = other DNA
atggccgccgaggcccgggtgagccggtggtacttcggcggcctggcctcatgcggcgcagcctgttgcacccaccctttggacctgcttaaggttcaccttcaaacccaacaagaagtgaaactaaggatgacaggtatggctttgagggtagtaaggacagacgggattttagccctgtattctgggttatccgccagtctgtgcaggcagatgacttatagcttgactaggtttgcgatctacgagaccgttcgcgatagggtagcaaagggttcacagggtcccctgcccttccatgaaaaggtgcttctcggctcagtctcgggactggctggtggatttgtagggacaccggctgacttggtgaacgttcgcatgcagaacgatgtgaaacttcctcagggacagcgaaggaactacgcccacgccttggacgggctttatcgcgtggctagggaagaagggcttcggcgactcttttccggggccacgatggcatcttcccgcggggctctggtgacggtcggtcaattgtcatgctacgaccaggctaaacagttggtgctgagcacagggtatttgagtgataatatctttacacactttgtggcatcctttattgccggaggttgtgcgacttttttatgccagccgctggatgtcctcaagactcgactgatgaattccaaaggggagtatcagggcgttttccactgtgcagtggaaaccgcaaagctaggaccactggctttctataaagggctggtgcccgctggcatacgcttgattccacacaccgttctgacttttgtcttcctagagcagctgagaaaaaattttggaataaaagtgcctagctag

SEQ ID NO: 195283 - DNA, 1329 bp, synthetic construct
  misc_feature 1..1329: note = Description of Artificial Sequence: Synthetic coding sequence
  source 1..1329: mol_type = other DNA
atgctgcccgccgccgcccggcccctgtggggcccctgcctgggcctccgtgctgcagccttccggcttgcaaggcgtcaggttccttgtgtgtgtgccgtgaggcacatgaggtcttcaggccaccagcggtgcgaagctttggccggcgcccccctcgataacgcccctaaggaataccctccaaagatccagcaactcgtgcaggatatcgctagtttaaccctcctcgagatcagtgatctcaatgaactcctcaaaaagaccctgaagatccaggacgtcgggctcgtccctatgggtggcgttatgtccggagccgtcccagccgctgccgcccaggaggccgtggaggaggatattccaatcgctaaagaacgcacgcacttcactgtacggctcaccgaagctaaacccgtggataaagtaaagctgattaaagagatcaaaaactacattcaggggataaatctggtgcaagctaagaaactggttgagtcactcccccaagagatcaaggccaacgtcgctaaggcagaagccgagaagatcaaggccgcactcgaagcgactcagcaagaggttaagctgcggatgacagggatggccctccgcgtggtaaggacggacgggatccttgcactgtattcaggcctgtctgcctccctgtgcagacagatgacttacagtctaaccaggttcgccatctacgagacggtcagggaccgcgtggctaaagggagtcaaggcccactgccgtttcatgagaaagtcctgctggggtcggtgtcaggactggctgggggttttgtaggcacccccgcggaccttgtgaacgttaggatgcagaacgacgtcaagcttccccaggggcagcgtcgcaattatgctcatgctttggacggactttatagggtggcccgagaagaaggcttaagacggctcttctctggcgccacgatggcctcgtcacgaggagcacttgtgacggtggggcagttgagctgctacgaccaggcaaaacaactggttctgagtactggatacctctccgacaacatcttcactcactttgttgcgagtttcatagccgggggatgtgccacattcttatgccaacctctggatgtattgaaaaccaggctgatgaattcaaagggggagtaccagggcgttttccattgtgcagtcgaaaccgcaaaactcggaccactggcattctacaagggcctggtgcctgcagggattagacttatccctcataccgtgctcaccttcgtttttctggagcaactgcgtaagaattttggaatcaaggtccccagctag

SEQ ID NO: 195284 - DNA, 735 bp, synthetic construct
  misc_feature 1..735: note = Description of Artificial Sequence: Synthetic coding sequence
  source 1..735: mol_type = other DNA
atgaccggcatggccctgcgggtggtgcggaccgacggcatcctggctctgtactccggtctcagtgcaagcttatgcaggcaaatgacgtacagtctcactagattcgccatatatgagactgtccgcgaccgagtggccaaaggctcacaggggccccttccctttcacgaaaaggtgctcctagggagtgtgtccggtctggccggggggttcgtggggacgcccgctgacttagtgaacgtgcggatgcaaaatgacgtgaaactcccccagggacagcggcgtaattatgcacatgcacttgatgggctgtacagagttgcaagggaagaaggtcttcgtagactgttttctggtgctacaatggcctcaagtagaggcgctcttgtcactgttgggcagctatcctgctatgaccaggccaagcagctcgtgcttagtaccggctatctgtccgataacatctttacacacttcgtggctagcttcatcgctggaggatgtgccaccttcctgtgtcagcccctggacgtgctgaaaacgcggctcatgaactcaaagggcgagtatcaaggggtctttcactgcgccgtggagacagcaaaactgggtccactcgctttctataagggtctggtgcccgccggaattcgccttattccacataccgtcttgacattcgttttcctggagcagttaaggaaaaactttgggattaaggttcccagctag

SEQ ID NO: 195285 - DNA, 438 bp, synthetic construct
  misc_feature 1..438: note = Description of Artificial Sequence: Synthetic coding sequence
  source 1..438: mol_type = other DNA
atggccttcttcaccggcctgtggggccccttcacctgcgtgagcagagtcctctcccaccattgcttcagcacgactggcagtctgagtgccattcagaaaatgactcgggtgcgagtcgtggacaactctgccctgggcaacagcccctaccatcgtgccccacgttgtatacacgtctacaaaaagaatggcgttgggaaggtgggcgatcaaattctgttggctattaagggccagaagaagaaagccctgatagtagggcattgtatgcccggtccaagaatgaccccaagatttgacagtaataacgtggttctcattgaggataatggcaatccggtcggtaccaggatcaagactccgatccccacgtctctgcggaagagggagggcgagtatagcaaagtgttagccattgcacagaacttcgtttag

SEQ ID NO: 195286 - DNA, 891 bp, synthetic construct
  misc_feature 1..891: note = Description of Artificial Sequence: Synthetic coding sequence
  source 1..891: mol_type = other DNA
atggccggccccctgcagggcggcggcgcccgggccctggacctgctgcggggactcccccgagtgagcttggctaacctgaagccgaatcctggatccaagaagccagaacgccggcccagaggacgtcggaggggaagaaagtgcggcagggggcacaagggcgagcggcagcgcggcacccgaccccgcttgggtttcgaaggaggtcagacacccttttacattaggataccaaaatacgggttcaacgaaggccactcatttaggcgccagtacaagcccttgtccctgaaccgactacaatatttaatagatctggggagagtggatccaagtcagcctatagatctgactcagctggtgaacggtcgtggggtgaccatccaacctcttaagcgagattacggtgttcaacttgtagaggagggagccgataccttcactgctaaggtcaatatcgaggtccagcttgccagcgagcttgccattgctgccatcgaaaaaaatggcggagtggtcactactgcattctatgaccctagatccctagacatagtgtgcaagcctgtgccatttttccttcgtggccagccgataccaaagaggatgctgccccccgaagagctggtaccctactatacagatgctaaaaatcgggggtatctcgctgatcctgctaaattcccagaagccagactcgagctcgcgaggaaatatggctacatcctgcccgatattacgaaagatgaactgtttaagatgctgtgcacaaggaaggatccacgccagatcttctttggcctggctcccgggtgggtggttaatatggcagataagaagatccttaaacccacggatgaaaacttgcttaaatattacacaagctag

SEQ ID NO: 195287 - DNA, 756 bp, synthetic construct
  misc_feature 1..756: note = Description of Artificial Sequence: Synthetic coding sequence
  source 1..756: mol_type = other DNA
atgtggcggctgctggcccgggccagcgcccccctgctgcgggtgcctctgtcagacagctgggctttgttaccggcctctgcaggtgtcaaaactcttttgcccgtaccttcatttgaagacgtgtctattccggagaagcccaaacttagatttattgagagagcccctcttgtccccaaggttagaagagaaccaaagaacctgtcagacatacgtggaccgtccacagaagccacagagttcacagagggaaacttcgccatcctcgcgctcggagggggctatctccactgggggcattttgaaatgatgaggctcacgatcaataggtccatggacccaaaaaatatgttcgccatctggcgggtacccgctcccttcaagcccatcacgcgaaagagcgtgggccaccgtatgggcggcggcaaaggcgcgattgatcactacgtgacgcccgttaaagctggccgcctggtggtggaaatgggaggacgctgtgagttcgaggaggtccaaggattcctggatcaggtggcccataagttgcctttcgcagccaaagccgtctcacgcggcaccctggagaagatgagaaaggaccaggaggagagggaaagaaataaccagaatccctggacattcgagcggattgcgactgccaacatgctgggaatcaggaaggtactttctccatacgatttgacgcataaaggcaaatattgggggaaattttacatgccaaaaagggtttag

SEQ ID NO: 195288 - DNA, 528 bp, synthetic construct
  misc_feature 1..528: note = Description of Artificial Sequence: Synthetic coding sequence
  source 1..528: mol_type = other DNA
atgcggctgagcgtggccgccgccatcagccacggccgggtgttcagacgtatggggctaggccccgagtctagaatacatctgttgcgcaatctccttaccggccttgtgcggcatgagaggatcgaggccccttgggctcgggtggatgaaatgcgcggctacgcggaaaaacttattgactatggtaagctgggagacactaacgagcgtgccatgaggatggctgacttctggttgacagagaaagatttgatcccaaagctgtttcaggtcctggctccccggtataaagatcagacaggcgggtatacccgaatgctgcagatcccaaatagatctctcgatcgcgcaaagatggctgtaatcgagtataaagggaactgtttgccgcccctaccattacccaggcgtgatagccacctgaccctgctgaatcaactcctgcagggtttacgacaggatctgagacagtctcaggaagcctcaaaccactcatcgcataccgcgcagacccctgggatctag

SEQ ID NO: 195289 - DNA, 543 bp, synthetic construct
  misc_feature 1..543: note = Description of Artificial Sequence: Synthetic coding sequence
  source 1..543: mol_type = other DNA
atggccctgcggagccggttctggggcctgttcagcgtgtgccggaatccaggttgccggttcgctgctttgagtacctccagtgagccagccgccaagccagaggtggatcctgtggagaatgaggcggtggcccccgagtttaccaaccgcaatcctagaaacctggaactactcagtgtggcacgtaaagaacgcggctggcgcactgttttcccttccagagagttttggcaccggctcagggtgattcggacgcagcaccatgttgaagccttagtggagcaccagaacggcaaggtggtggtgagcgcgagtactagggaatgggctattaaaaaacatctgtacagcactaggaacgttgtggcctgcgagtctatcggccgagtcctcgcccagcggtgccttgaagccgggatcaattttatggtgtaccagccaacaccttgggaggcagcctctgattcaatgaagcgcttgcagagtgcaatgaccgaagggggcgtcgttttacgcgagccgcagaggatttacgagtag

SEQ ID NO: 195290 - DNA, 879 bp, synthetic construct
  misc_feature 1..879: note = Description of Artificial Sequence: Synthetic coding sequence
  source 1..879: mol_type = other DNA
atggccgcctgcatcgccgccggccactgggccgccatgggcctgggtcggtcttttcaggctgcgcgcaccttgctgccaccacccgcctctattgcctgtagagtccatgcggggcccgtccgccagcagagcaccgggccgtccgaacccggggcatttcagccgcctccaaagccagtgatcgtggataaacaccgtcccgttgagcccgaacgtcgattcctttcaccggagtttattcccagacgagggaggactgacccactcaagttccaaatcgagcggaaggatatgttagaacgcagaaaagttctgcacattcctgagttttacgtgggctccattctgcgcgtgaccactgccgacccttacgccagtggaaaaatcagccaattcttaggaatctgcatacaaagaagcggcaggggcctgggcgctacctttatccttcgaaacgtgatcgagggacagggcgtggagatttgcttcgagctgtacaatcctcgcgtgcaagagatacaggtggtgaaactcgaaaagagactcgacgactcactgttgtatctgcgcgacgctctgcctgaatactccacttttgacgtgaatatgaaacctgttgtgcaggagccaaatcagaaggtacccgttaatgagcttaaggtgaagatgaagccaaagccatggagcaagcgatgggagcggccaaacttcaatattaagggtattaggtttgacctctgcctcacagagcagcagatgaaggaggcccagaaatggaaccagccttggctggagttcgacatgatgcgggaatatgacacgtctaagattgaggccgccatttggaaagaaatcgaggcttccaagaggtcttag

SEQ ID NO: 195291 - DNA, 879 bp, synthetic construct
  misc_feature 1..879: note = Description of Artificial Sequence: Synthetic coding sequence
  source 1..879: mol_type = other DNA
atggccgcctgcatcgccgccggccactgggccgccatgggcctggggcgatcttttcaggccgcccgcaccctgcttcccccacctgctagtattgcatgtcgtgtccacgccgggccagtcagacaacagtcgacgggacctagtgaacccggcgcctttcagcccccccccaagccagtcatcgtcgacaagcaccgacccgtggaaccggaaagacggttcctaagtcccgagttcattcctcggagaggcagaacagaccccttaaagttccagatcgagcgcaaagacatgttagaacgcaggaaggtactccacatccctgaattctacgttggatccatcctgcgagttacgactgcagatccatacgcatccggaaagatcagccaattcctgggtatctgtatccagcggagtggacgaggcctgggagcaaccttcattcttagaaatgtgattgaaggacaaggtgtggaaatttgtttcgagttgtataaccctagagttcaggagatccaggtggtgaagctagagaagcgcctggacgactcgttattgtacctgagggacgccctacctgagtactccacattcgatgtcaatatgaagcctgtagtccaggagcccaaccagaaagtgccagttaatgagttgaaagtgaaaatgaagcccaaaccttggagtaagaggtgggaacgacctaattttaacatcaagggcatccggtttgacctgtgtttgacagaacagcaaatgaaggaagctcagaagtggaatcagccctggttagaattcgatatgatgagggagtatgacacgagcaagatcgaagcagcgatttggaaagaaatcgaggcctctaagcgctcctag

SEQ ID NO: 195292 - DNA, 240 bp, synthetic construct
  misc_feature 1..240: note = Description of Artificial Sequence: Synthetic coding sequence
  source 1..240: mol_type = other DNA
aaggtgcccgtgaacgagctgaaggtgaagatgaagcccaagccctggtctaagagatgggagaggcctaacttcaacatcaaaggaatccggttcgatctgtgcctgacagaacagcagatgaaggaggcccaaaaatggaatcagccttggttggaattcgatatgatgcgcgagtatgacacttcaaaaattgaagccgccatatggaaagagattgaggcaagcaaaaggagttag

SEQ ID NO: 195293 - DNA, 918 bp, synthetic construct
  misc_feature 1..918: note = Description of Artificial Sequence: Synthetic coding sequence
  source 1..918: mol_type = other DNA
atggccctgtgcgccctgacccgggccctgcggagcctgaacctggccccaccaactgtcgctgccccggcgccttcactcttccctgccgctcagatgatgaataatggcttacttcagcaaccctctgcgctgatgctcttgccttgtcgacctgtgctgacctcggtcgccttgaacgccaattttgtgagctggaagtccagaaccaagtacacaatcactcccgtcaagatgcgaaagtccgggggacgtgatcacaccggacgtatccgtgttcacgggattggcggcgggcataaacagcgatatcggatgatcgactttctgcgcttccgacccgaggaaacaaaatctggacccttcgaagagaaagttatccaggtacgttacgatccctgtagatctgcagacattgctctcgtggccggaggctccaggaaaaggtggattatcgctacggagaatatgcaggccggcgatactattttaaatagtaatcatatcgggcgcatggcagtcgccgcgcgcgagggcgacgctcatcctctgggagcccttcctgtgggaacattgattaataacgtagagagcgagcccggacggggagcccaatacatcagagctgccggcacctgcggcgtgctgctccgcaaagtgaacgggactgccattatacagctgccatcaaagcgtcagatgcaagtcctggaaacctgtgtggcgactgtaggcagggtgagcaacgtggaccacaacaagcgcgttatagggaaggcgggccgcaatcgctggttaggaaagcgcccaaactccggccgctggcacagaaaaggcggttgggctgggcgtaaaatcagaccacttccacctatgaagagttacgtaaagctcccctccgcttctgcgcagtcatag

SEQ ID NO: 195294 - DNA, 450 bp, synthetic construct
  misc_feature 1..450: note = Description of Artificial Sequence: Synthetic coding sequence
  source 1..450: mol_type = other DNA
atggtgttcctgaccgcccagctgtggctgcggaaccgggtgaccgatcggtatttccgcatccaggaagtgctgaagcatgcgagacatttcaggggacgtaaaaatcgctgctatagactggctgtcaggactgtgatcagagcttttgtgaagtgcactaaagcaaggtatttaaaaaagaagaatatgaggacactgtggatcaaccgcattacagccgcatcccaggaacacggattgaaatatcccgccctcatcgggaatctggtaaagtgtcaggtggagttaaaccgtaaggtgctcgctgatctcgccatttacgaaccaaagacgtttaagtccctggccgcattagctagtaggcgtcgacacgaggggtttgctgcagccctcggcgacgggaaggaaccagaggggatatttagccgagttgttcaatatcactag

SEQ ID NO: 195295 - DNA, 618 bp, synthetic construct
  misc_feature 1..618: note = Description of Artificial Sequence: Synthetic coding sequence
  source 1..618: mol_type = other DNA
atggccgccagcagcctgaccgtgaccctgggccggctggccagcgcctgctcccacagcatcttgcgaccgtctggtccaggcgccgccagcctgtggtccgcctccaggcgctttaactctcaaagtactagctacttgcctgggtacgtccccaaaaccagcctatcgtcccctccatggcccgaggtggtcttgccagatcccgtggaggagacaagacatcacgcagaggtcgtgaaaaaggtcaatgagatgatcgtgacgggccaatacggaagattgttcgccgttgtccattttgcctccaggcagtggaaagtgacttccgaggatttaatcctgattggaaatgagctagacctagcatgcggagagcggatacgcctggagaaggtgctgctggttggcgccgacaacttcacacttctcggcaagccactgctgggcaaggatcttgtgcgcgtggaggccaccgtcattgagaagacggagtcttggcccagaatcattatgaggtttcgcaagaggaaaaacttcaagaagaaacggatagtgacgacacctcagactgttttgagaattaacagcatcgagatcgcgccatgcttgttatag

SEQ ID NO: 195296 - DNA, 843 bp, synthetic construct
  misc_feature 1..843: note = Description of Artificial Sequence: Synthetic coding sequence
  source 1..843: mol_type = other DNA
atggccgccagcagcctgaccgtgaccctgggccggctggccagcgcatgcagccactctatactgcgaccgtccggacctggcgctgcctcactgtggtcggcatcccgacgatttaactctcagagtaccagctacctgccgggctatgtgcccaagacctccctttcatctcccccttggcccgaggtcgtcttaccagatcctgtggaagaaacaagacaccacgccgaggtggtcaaaaaggtcaatgagatgatcgtgacaggccagtacggtagactgttcgccgtggtccatttcgcatccagacagtggaaagttacctccgaagacctgatcttgatcggcaacgagttagacctggcctgtggagaaagaatccggctggaaaaggtcctcctggtgggtgcggataacttcaccttactcggaaagccactgttggggaaagaccttgtgcgagtggaagctactgtcatcgagaaaacggagagctggccacggattattatgcggttcagaaagcgcaagaatttcaagaaaaagaggtccaagttggagaaggtgccattgggtcctgtcgcccggtgctggctgcccagacgaatgcgcaccgaaggtgttgggcatgtggggttgggaactgggagtcccgggcgtagccaaccaggctgtcattgcccactggctacattaattcttgaaggtgcacctagggggtcgagcctcgctccactgctattgcatgccccccgtgtgactccgccccggtccccgtcgccccccaggagtgcacgcgatccgacaagtcttcccttctccagcactctccgcgcgtag

SEQ ID NO: 195297 - DNA, 363 bp, synthetic construct
  misc_feature 1..363: note = Description of Artificial Sequence: Synthetic coding sequence
  source 1..363: mol_type = other DNA
atgatcgtgaccggccagtacggccggctgttcgccgtggtgcactttgcctcccgacagtggaaggttaccagcgaggatttgattcttattggaaacgaactagatctggcctgtggcgagcggatccggctcgaaaaggttctgctcgtaggggccgacaacttcaccctgctcggtaaaccactactgggcaaggatctggtgagggtcgaggccacagtaattgaaaagacggaatcatggcccaggatcatcatgcggttcagaaagaggaagaacttcaagaagaagaggatagttacgaccccacagacagtcctacgcataaactcaatcgagattgctccgtgtctcttatag

SEQ ID NO: 195298 - DNA, 381 bp, synthetic construct
  misc_feature 1..381: note = Description of Artificial Sequence: Synthetic coding sequence
  source 1..381: mol_type = other DNA
atgtggtacctggccaagctgatccggggcatgagcatcgaccaggcactagcgcagctagagttcaatgataagaaaggcgccaaaatcattaaagaggtccttctcgaagcacaggatatggcagttagagatcacaatgtagagtttcggagcaatttgtacatcgcagagagcacatccgggcgtgggcagtgcctgaaaagaatccggtaccatgggcgggggcgattcggcatcatggagaaggtctactgccactactttgtgaaacttgtggaggggccgccacccccccccgaaccgccaaaaactgccgtggcccacgcgaaggaatacatccaacagttgagaagcaggactattgtgcacaccttatag

SEQ ID NO: 195299 - DNA, 699 bp, synthetic construct
  misc_feature 1..699: note = Description of Artificial Sequence: Synthetic coding sequence
  source 1..699: mol_type = other DNA
atggccgccgccgtgctgggccagctgggcaaggacttcctggtggtgaaaagacaaaagggcgtagagatggaatccgaactgaccgcctgcgttgacgtcgctggcgccctctggatacacaatctccggtccagaggtaagctggctctcggcgttctgccacagtcatatatccacactagcgcttcactagatatcagcagaaagtgggagaaaaagaacaagatcgtgtaccctcctcagcttccaggcgagccaagaagaccagccgagatctaccactgcaggcgccagataaagtattcaaaggacaaaatgtggtatctggccaagttgatccggggaatgagtatcgaccaggccctggcgcagttggagttcaacgacaaaaaaggcgctaaaatcataaaagaagtcctgttagaggcccaggatatggctgtgcgggaccacaatgtcgaattccggagcaacctgtacatcgctgagtcaacatccggcagaggccaatgcttaaagagaattcgttaccatgggagaggccgcttcggaatcatggagaaagtgtattgtcactactttgtgaagctggttgaaggacctcccccacctcctgagcctcctaaaacagccgtggcacacgccaaagaatatatacagcagctgaggagtcgcaccattgtccatacactgtag

SEQ ID NO: 195300 - DNA, 639 bp, synthetic construct
  misc_feature 1..639: note = Description of Artificial Sequence: Synthetic coding sequence
  source 1..639: mol_type = other DNA
atggccgccgccgtgctgggccagctgggcgccctgtggatccacaacctgcgctcccgagggaaactggcactcggattgctgtcctttcactccgtgcttcctcagagttacattcatacatccgctagtctcgatattagtcgcaaatgggagaaaaagaacaaaatcgtgtaccccccacaactacccggtgaacctcgcaggccggcggagatctatcactgtcgtagacagattaaatacagtaaggacaagatgtggtatctcgcaaaattaatccggggcatgtctatagatcaagctctcgctcagcttgaatttaatgacaagaagggggcaaagattatcaaggaagtcctgctggaggcacaggatatggccgtccgcgatcataacgtcgaatttaggagcaatctatatatcgccgaatccacaagtggcagagggcagtgcctcaagagaatccggtatcatgggagaggccggttcggaatcatggagaaggtgtactgccactacttcgttaaactggtggaaggaccaccaccgccacccgaaccccccaaaactgctgtggcacacgccaaggaatatatccagcagctgcggtcgcgaaccatagtgcacactctctag

SEQ ID NO: 195301 - DNA, 621 bp, synthetic construct
  misc_feature 1..621: note = Description of Artificial Sequence: Synthetic coding sequence
  source 1..621: mol_type = other DNA
atggccgccgccgtgctgggccagctgggcgccctgtggatccacaacctacgatcgcggggaaaactagccctgggagtgctcccacaatcctacatccatacctcagcctcactggatatttcccgtaaatgggagaaaaagaataagattgtttatccaccccaactgcctggggaacccaggagacccgccgaaatttatcattgccggcgccaaatcaagtacagtaaggacaagatgtggtatctagccaagctgatccggggcatgtcaatcgaccaagctcttgcgcagttagagttcaatgataaaaagggcgccaagataatcaaagaagtgcttctggaagcgcaagacatggccgtgagagaccacaatgtggaatttcgttctaatctctatattgctgagtctacgtccggaaggggacagtgcctcaagcggatacggtaccacggcaggggcagattcggaatcatggaaaaggtctactgccactatttcgtcaaattggtagagggccctcctcccccacctgagccccccaagaccgccgtcgcccacgccaaagagtacatacagcaattgagatcccgtacaatcgttcacaccttgtag

SEQ ID NO: 195302 - DNA, 462 bp, synthetic construct
  misc_feature 1..462: note = Description of Artificial Sequence: Synthetic coding sequence
  source 1..462: mol_type = other DNA
atggcccggaacgtggtgtaccccctgtaccggctgggcggcccccagttgcgggtctttcggaccaatttttttattcagctggtgcgtccgggagtggcccagcccgaagacaccgtccagttcagaatacctatggagatgacccgtgtggatctcaggaactatctggaagggatttacaatgttccagttgctgccgtacgtaccagggtgcagcacggtagcaacaaaaggcgcgatcaccgcaatgtccgtattaagaagcccgattacaaggtggcctacgtgcagctggctcacgggcagactttcaccttccctgacctgttccctgagaaggatgagtcaccagaaggaagtgcggctgacgacctatacagcatgcttgaggaagagaggcagcaacgtcaaagctccgatccacggcgggggggtgtacccagctggtttggcttgtag

SEQ ID NO: 195303 - DNA, 462 bp, synthetic construct
  misc_feature 1..462: note = Description of Artificial Sequence: Synthetic coding sequence
  source 1..462: mol_type = other DNA
atggcccggaacgtggtgtaccccctgtaccggctgggcggcccccagctccgggtctttagaacgaacttctttattcaactcgtgagaccaggtgtcgcacagccagaagatactgttcagtttaggatccctatggaaatgactcgggttgatctacggaactacttggagggcatttataatgtgcccgtggctgctgtgcggactagggtgcaacacgggagcaataaacgccgggaccaccgcaacgttcggatcaagaaacctgattacaaagtcgcttacgttcagcttgcccacgggcagaccttcactttcccagacctgtttcctgaaaaggatgaatcccctgaagggtctgcggctgatgatctctatagcatgctggaggaagaaagacaacagcgacagtccagcgacccgaggagggggggtgttccttcttggttcggcctttag

SEQ ID NO: 195304 - DNA, 651 bp, synthetic construct
  misc_feature 1..651: note = Description of Artificial Sequence: Synthetic coding sequence
  source 1..651: mol_type = other DNA
atgcggctgagcgccctgctggccctggccagcaaggtgaccctgccaccacactataggtacggcatgtcgccacccggatccgtcgcagataagcgcaagaaccccccctggatccgaagacggccggtcgtggtcgaacccatttccgatgaggattggtacttattttgtggggacactgtggagatccttgagggcaaggacgctggaaaacagggaaaggtggtgcaggtgattcgtcagcgcaattgggttgtggtcgggggacttaatacgcattacagatacatcgggaagactatggattaccgcgggaccatgatcccctctgaagccccactcctgcaccgtcaagtgaagctcgtggacccaatggacagaaaaccaaccgagatcgagtggagattcactgaggcaggggagcgagtgcgggtatccaccagaagcgggcggataattcctaaacctgaatttcctcgagcagatggcattgttccagaaacctggattgatggtcccaaggacacctcagtggaggatgccctagagcgtacttatgtcccgtgtctcaaaacgttgcaggaggaggtcatggaagctatgggcattaaggagactcgaaaatacaagaaagtgtactggtactag

SEQ ID NO: 195305 - DNA, 651 bp, synthetic construct
  misc_feature 1..651: note = Description of Artificial Sequence: Synthetic coding sequence
  source 1..651: mol_type = other DNA
atgcggctgagcgccctgctggccctggccagcaaggtgaccctgcccccacactaccgctacggcatgagcccgccgggtagtgttgcagacaagcggaaaaatcccccctggattcgccgaaggcccgtggtggtggaaccaatcagtgatgaagattggtacctgttttgtggagacacagtggaaatactggagggcaaagacgccgggaaacaaggaaaggtggtacaggtgattcgccagcggaactgggtggtggttggcggcttaaatacacactaccggtatatcggcaaaactatggattatcgcggaacgatgataccctccgaggcacctctgctgcatagacaggtcaaactggtggatcctatggacaggaagcctactgagattgagtggagatttacagaagcgggcgagagggtccgtgtgagcactcgctcagggcgtattatccctaagcccgaattcccccgcgctgatgggattgtccctgagacttggatcgatggtcccaaagacacatccgtggaggatgctttagagcggacctatgttccttgcttgaagaccttacaggaggaggtaatggaagctatgggaattaaagagacaagaaaatataaaaaggtttactggtattag

SEQ ID NO: 195306 - DNA, 300 bp, synthetic construct
  misc_feature 1..300: note = Description of Artificial Sequence: Synthetic coding sequence
  source 1..300: mol_type = other DNA
atgcggctgagcgccctgctggccctggccagcaaggtgaccctgccaccccattatcgatatggtatgtcgcctccaggttcagtggccgataagcgtaagaatcctccatggatcagaaggaggcctgtggtcgtcgagcccatcagtgatgaggactggtaccttttttgcggggacacggtggaaatccttgagggtaaggatgcgggaaagcagggaaaggtcgtgcaggtgatacggcaaaggaattgggtcgtcgttggaggcttgaacacccactatcgatacattggatag

SEQ ID NO: 195307 - DNA, 207 bp, synthetic construct
  misc_feature 1..207: note = Description of Artificial Sequence: Synthetic coding sequence
  source 1..207: mol_type = other DNA
atgcggctgagcgccctgctggccctggccagcaaggtgaccctgccaccacactatcggtacggtatgagccctcctggctcagtggcagataagagaaagaaccccccttggatccggcgacgacctgtagtcgtggaaccaatcagcgacgaggattggtacctgttctgcggagacaccgtagaaattcttgaagggaaatag

SEQ ID NO: 195308 - DNA, 522 bp, synthetic construct
  misc_feature 1..522: note = Description of Artificial Sequence: Synthetic coding sequence
  source 1..522: mol_type = other DNA
atgcggctgagcgccctgctggccctggccagcaaggtgaccctgccgccccactaccgctacggaatgagcccacccggaagcgtagctgataagaggaaaaaccccccctggatacgccggaggcctgtggttgtggagcctatttctgatgaggattggtacctcttttgcggggatacggtcgagattctcgaagggaaggacgccgggaagcagggtaaggtggtccaagtgattaggcaaaggaattgggtagtggtggggggccttaatacccattacagatatattgggaaaacaatggactatcgcggcacgatgatccctagtgaggccccccttctgcatcgtcaggtgaagttagtcgaccccatggatagaaaaccaaccgagattgagtggcgctttacagaggctggtgagcgggtccgcgtcagtacccgaagcggccgcattatccccaaaccagagttccccagagccgacgggatcgtccccgagacatggatcgacggctag

SEQ ID NO: 195309 - DNA, 4395 bp, synthetic construct
  misc_feature 1..4395: note = Description of Artificial Sequence: Synthetic coding sequence
  source 1..4395: mol_type = other DNA
atgttcagcttcgtggacctgcggctgctgctgctgctggccgccaccgcattgcttactcacggccaggaagaggggcaggtcgaaggccaggacgaagacatccctccaatcacctgtgtccagaacggcctgagatatcatgaccgcgatgtctggaagcctgagccgtgtcgaatatgcgtgtgcgacaacggaaaggtgctgtgtgacgacgttatttgcgacgagacgaagaattgcccaggggctgaggtgccagaaggcgagtgttgccccgtttgtcctgatggctccgagtctcctaccgatcaggagacaactggcgtggaaggacccaagggagatacgggaccccgggggcctcgcggccctgcagggccaccaggccgcgatggaatccccggacagcctggactgcccgggccaccaggaccccctggcccacccggtccacctggactgggcggaaatttcgccccccaactgagttacggatatgacgagaaaagcacaggcggcatcagcgtgcctggaccaatgggcccttccggacccaggggacttccaggtccccccggagcccctggaccgcagggctttcaaggcccaccaggtgagccaggggagccaggtgcctctggccctatgggacctaggggcccccctggccccccaggtaaaaatggtgatgatggtgaggctggcaaaccaggaaggccaggggaacgtggccctcctggcccccagggggctagggggttgccagggactgctggcctgcccggtatgaagggccatcggggctttagcggccttgacggggctaagggtgatgccggacccgcaggccccaaaggagagcctggaagccctggtgagaatggagcaccagggcagatgggaccgagggggctgccaggcgagcgaggaagaccaggggctccggggccagcaggagctagaggtaatgacggtgcaacaggagcagcgggcccacctggccccactggcccagctggccctccgggatttcccggtgcagttggcgcaaagggagaggcaggacctcagggaccaagggggtctgaagggccccagggagtgcgtggagagccgggccctccaggccctgctggggcagcggggcctgctggcaacccaggagcagacgggcaacctggagcaaagggtgccaatggggcccctgggattgctggcgctcccgggttccccggagctcgtggaccttccggacctcaggggcctggcggcccacctggcccaaaagggaacagcggcgaacctggggcccctggaagtaagggtgacaccggcgcaaaaggggaacctggccctgttggagtccaagggccgcctgggcctgcgggcgaggaaggaaagcgcggcgccaggggtgagccggggccaacagggttgcccggaccaccaggcgaaaggggaggaccaggtagtcgtggctttcctggcgccgatggggtcgctggccctaagggtcctgccggcgaacgcgggtctccggggcccgccggacctaagggcagtccgggtgaagcaggacgcccaggagaggccggtctaccaggagctaagggccttaccggttcccccggctctcctggtcccgacggcaagactggtccacctgggccagccggccaggatggcaggccaggtccgcccggtccacctggggcccgcggccaggccggggtaatggggttcccaggccccaagggagctgccggcgaacccgggaaagcaggggagcggggcgtgccaggccccccaggcgcggtgggccccgccggaaaagacggcgaggccggcgcccagggcccacctggccctgccggaccagctggggagcggggggagcagggccccgcaggaagcccaggcttccagggattaccggggcctgccggccctcctggagaagcagggaagcccggagagcaaggcgtgccgggagatctgggagcacccgggccaagcggcgcaagaggcgaacggggattcccgggggagcggggcgtgcaagggcccccaggccctgcggggcctcggggagccaacggcgctcccggcaatgatggcgctaagggggatgcgggcgctcctggggcacccgggagtcagggcgccccaggtttgcaaggtatgcccggcgagcgcggagccgccggacttcctggacccaagggagatagaggcgacgcaggacccaaaggcgctgatgggtcaccgggaaaggatggagtgcgcgggctgaccgggccgattggacctccggggcccgccggagcccctggagataaaggcgaatccgggccttccggtcctgccggccctaccggggcccgaggtgcaccaggggatcggggcgaacccgggccacccggtccagcaggttttgcaggaccacccggcgccgacggacaacccggtgccaagggggaaccaggggacgccggggctaaaggtgatgctggaccccccggaccagccggaccggccggaccgccgggtccaattggaaacgtcggagcgccgggagctaaaggagcccgagggtccgcagggcctccgggcgcaaccggattccctggagccgctggacgcgttggccctcctggccctagtggcaacgcaggtccacctggcccgcctggccccgccggaaaagagggtggcaaaggaccccgaggcgagaccgggcccgcaggtcggccaggcgaggtagggcccccaggcccccccggaccagccggggagaagggatctcctggtgccgatggcccggccggtgcgcccggcacgcctgggccacagggaatagcagggcagcgcggcgtggtgggcctgcctggccagcgtggagagcgcggctttcccggactccctggtccgagtggcgaaccgggaaagcagggaccaagcggtgcttcaggggagcgggggccccctggccccatgggtccacccggtcttgccggcccgcctggcgaatcagggcgggagggagcaccgggtgcggagggtagccctgggagagacgggagtcccggcgccaagggtgaccggggcgaaaccggtccggcgggccctccgggagcccccggcgcccctggcgctcccgggccagtcggcccagccggcaagtcgggggataggggggagacagggccagcgggcccgaccgggcccgtgggccccgtgggtgccagagggccggctggaccacagggtccgcgcggcgacaagggggagactggtgagcagggagacagagggataaagggacacaggggcttttccggtctgcagggccccccgggcccccctggtagtcccggggagcagggcccctccggcgctagtggccccgccggcccacgcggcccgccagggtcagccggggcccccggtaaggacggacttaatggacttccaggccctatcggaccacctgggcctcgaggccgtactggggacgcagggcctgtgggccctccaggtccgccggggccccccggcccgcccggacccccctcagccggtttcgatttctccttcctgccacagcctccgcaggagaaggctcacgatgggggaaggtactatcgcgcggatgatgccaacgtggtccgtgatcgggacctcgaggtggacactacactgaagagcctatcccagcagattgaaaatatccgaagccctgaaggctcccgtaagaaccccgcacggacatgccgcgacctaaagatgtgccactctgattggaaaagcggtgagtattggatagaccctaaccaggggtgtaacctggatgcaattaaagtgttctgcaatatggagaccggcgagacgtgcgtctatcctacgcagcccagcgtagcccagaaaaattggtacatatcaaagaaccctaaggacaagcgccatgtatggttcggagagagtatgaccgatgggttccagttcgaatacggggggcaggggagcgatccggcggacgtggccatccagctcacctttctgaggctcatgtcaaccgaagcctctcagaacatcacctatcactgcaagaacagtgtggcctacatggatcagcagactgggaatctgaaaaaggctctgctgcttcaaggaagcaatgaaattgagatccgggctgaggggaatagcagattcacatattctgtcaccgtggatggctgtacctcacataccggggcgtgggggaagacggtcattgagtacaaaaccaccaaaacctctagacttcctattatagacgtagcaccattggatgtgggcgccccagatcaggagtttggctttgacgtgggccccgtgtgcttcctgtag

SEQ ID NO: 195310 - DNA, 285 bp, synthetic construct
  misc_feature 1..285: note = Description of Artificial Sequence: Synthetic coding sequence
  source 1..285: mol_type = other DNA
atggccagcgtggtgctggccctgcggacccggaccgccgtgacctctctgctgagccctaccccggcaaccgccctcgctgtcagatatgcaagtaaaaagagtggcgggtcctctaagaacctcggtggcaaaagtagtgggagacgtcagggtatcaagaaaatggagggccattacgtgcatgctggaaatatcatcgctacccagcgccactttagatggcaccccggggcccatgtgagttgctccgtggctgccccattgttcccatttttggggtag

SEQ ID NO: 195311 - DNA, 282 bp, synthetic construct
  misc_feature 1..282: note = Description of Artificial Sequence: Synthetic coding sequence
  source 1..282: mol_type = other DNA
atggagggccactacgtgcacgccggcaacatcatcgccacccagcgccattttagatggcatccgggggcccacgtgggagtcggaaaaaataagtgtttgtacgcccttgaagaaggcattgtgaggtatactaaagaagtctacgttccccaccctaggaacacagaagccgtggacctgatcacgaggttgcccaagggcgccgtgttatacaagactttcgtccatgtggtgcctgctaagccagagggaacatttaaacttgtagctatgttgtag

SEQ ID NO: 195312 - DNA, 282 bp, synthetic construct
  misc_feature 1..282: note = Description of Artificial Sequence: Synthetic coding sequence
  source 1..282: mol_type = other DNA
atggagggccactacgtgcacgccggcaacatcatcgccacccagcgccattttcgctggcaccccggcgctcacgtcggtgtagggaaaaataagtgtctttacgcactggaggaaggaattgtccggtacactaaggaggtatacgtaccacaccccagaaacacagaggccgttgacctcattacacgcctgccaaagggagcagttctgtacaaaacctttgtgcacgtggtgccggcgaagcccgagggaacattcaagctggtcgcaatgctctag

SEQ ID NO: 195313 - DNA, 771 bp, synthetic construct
  misc_feature 1..771: note = Description of Artificial Sequence: Synthetic coding sequence
  source 1..771: mol_type = other DNA
atgcccctgcacaagtaccccgtgtggctgtggaagcggctgcagctgcgtgaaggaatatgcagtagactcccaggacactacctccggtcacttgaggaggaacggaccccaacccctgtccactataggccccatggcgccaagtttaagatcaacccaaaaaacggccagagggagagggtagaggacgtgcctatcccaatctacttccctcctgagagtcagcgcgggttgtggggcggcgaaggctggattttggggcagatctacgcaaataacgataaactgtctaagcggctgaagaaagtttggaaacctcagttgttcgagagagaattctattcagagattcttgataaaaaattcacggtgaccgtgaccatgaggactttggacctgatcgacgaggcatacggattggacttctacatccttaaaacaccaaaggaggatctgtgctcaaaatttggtatggacctcaagcggggaatgctgctccgcctggcacgccaggacccccaactacatccggaggaccctgagagacgtgccgcaatctatgataaatacaaggagtttgctattcccgaggaagaggctgaatgggttggtctgacgctggaagaagccatcgaaaagcagagacttctggaggagaaagatcccgttccgctttttaagatctacgtggcagaactaattcaacaactgcagcagcaggccctctctgaacccgcagtagtgcagaagcgcgcgtcagggcagtag

SEQ ID NO: 195314 - DNA, 771 bp, synthetic construct
  misc_feature 1..771: note = Description of Artificial Sequence: Synthetic coding sequence
  source 1..771: mol_type = other DNA
atgcccctgcacaagtaccccgtgtggctgtggaagcggctgcagctgagggaaggaatctgctcacgcctgcccggacactatctgcgatctctggaggaagaacggactcctacgcctgtccactacagaccacatggcgctaaattcaaaatcaacccaaaaaatgggcaaagagagagagtggaggacgtgcccatccctatttactttccccccgaaagccagaggggcctttggggaggcgagggctggatcctgggccaaatttacgccaataacgacaagctgtccaaacgcctgaagaaggtctggaagccgcaactgtttgagagagagttttacagcgagatattggataagaaatttacggttaccgttacgatgaggactttagacttgatcgacgaggcttatggcctggacttttatattctgaagacccctaaagaggatctgtgctcgaagtttggaatggacctgaaaagagggatgctcctgcgtctcgcccggcaggatccccagcttcaccccgaggatcccgaacggcgggctgctatctacgataagtacaaggagttcgctattcctgaagaagaagccgagtgggtgggactgaccttagaagaggccatcgaaaagcagcggctgttggaggagaaggacccagttccactgtttaagatctatgtagccgagcttatacagcagttgcagcagcaggcactcagtgaacccgccgtcgttcagaaaagagcaagcggccaatag

SEQ ID NO: 195315 - DNA, 771 bp, synthetic construct
  misc_feature 1..771: note = Description of Artificial Sequence: Synthetic coding sequence
  source 1..771: mol_type = other DNA
atgcccctgcacaagtaccccgtgtggctgtggaagcggctgcagttgagggagggtatctgctcccgactgccaggccattatctccggagccttgaggaggagaggaccccaactcccgtgcactacaggccccatggtgctaaattcaagatcaacccaaaaaatggtcagagggaacgggtggaggacgtgccaataccaatctactttccacccgagtcccagagaggactgtggggcggagaaggctggatcttggggcaaatatatgcaaacaatgacaagctgtccaaaagactcaaaaaggtttggaagcctcagctcttcgagagggagttttactccgagatcctggacaaaaaattcacagtgactgtcactatgcgaacacttgacctgatcgacgaagcctatggtctggatttctatattttgaaggcgtccggtgaggatctgtgcagcaagttcggaatggatctaaaacgtggtatgcttctgaggttggccagacaggatccccagttacacccggaagatccagaaaggagggcagctatttatgacaagtataaggagtttgctatcccagaggaggaagccgaatgggtaggcttgacactcgaagaggcaatcgaaaaacagcggctgctagaagagaaggatccagtcccactcttcaagatctacgtggcggaactaatacagcaacttcaacagcaggcattgtctgaaccagctgtggtgcagaaacgtgccagcggacaatag

SEQ ID NO: 195316 - DNA, 771 bp, synthetic construct
  misc_feature 1..771: note = Description of Artificial Sequence: Synthetic coding sequence
  source 1..771: mol_type = other DNA
atgcccctgcacaagtaccccgtgtggctgtggaagcggctgcagttaagggagggtatttgcagtcgcctgcccggccactaccttcgctcactagaggaagaacggaccccaacaccagttcattataggccacatggcgctaaatttaagataaatcctaagaatggccaaagagaacgggtcgaggatgtccctatccccatctacttcccacccgagtctcagcgcggcttgtggggaggtgagggctggattctgggacagatctatgctaacaacgacaagctaagcaaacgacttaagaaggtgtggaagccccaactgtttgaacgcgagttttactctgagatcttggacaaaaagtttaccgttacagtgaccatgcgcacgctcgacctaatcgacgaggcctacggcctagatttttacatcctgaaagcctcaggtgaggatttatgcagcaaattcggtatggacctcaagaggggaatgcttctgcggctagcgcggcaagacccacaactccaccctgaagatcctgagcggagagccgccatatacgacaaatacaaggaatttgcaataccggaggaggaagctgagtgggttggcctgacgctcgaagaagcaatcgaaaaacagaggctccttgaggagaaggacccggtgcctttatttaaaatttacgtggcggaacttattcagcagctgcaacagcaagccctgagcgagcccgccgttgtccagaagagggccagtggtcaatag

SEQ ID NO: 195317 - DNA, 147 bp, synthetic construct
  misc_feature 1..147: note = Description of Artificial Sequence: Synthetic coding sequence
  source 1..147: mol_type = other DNA
atgagccgggccggcggccggggcgagcagagccggtggggccggagggccgagctccggggccttgggaggcctgaagcacctttacggctgggccccgatgtctgcggttcagtaccttgcgcacgcggggccggttccgagtag

SEQ ID NO: 195318 - DNA, 723 bp, synthetic construct
  misc_feature 1..723: note = Description of Artificial Sequence: Synthetic coding sequence
  source 1..723: mol_type = other DNA
atgcccctgcacaagtaccccgtgtggctgtggaagcggctgcagctacgcgaagggatatgcagtaggttgcccggacactacctcagatccctcgaagaggaaagaacgccaactcctgtgcattaccggccacacggcgctaaattcaaaatcaatcctaaaaacggccagcgagagcgtgttgaagatgtacccatccccatttactttcccccagaaagccagaggggactgtggggcggcgagggctggattctgggccagatatatgcaaataacgataaacttagtaagcgcctcaagaaagtgtggaaaccgcagctctttgaacgagagttttactcagagatacttgataagaaattcactgttacagtgaccatgagaaccttagacctgatagatgaagcttacggcctcgatttttacatcttgaagaccccgaaggaagatttgtgcagcaaattcggcatggatctcaagagagggatgctgctgcggttagctagacaggacccccagcttcacccagaggacccagagcgcagagctgcaatatacgataaatacaaggagtttgccatccccgaagaggaggccgaatgggtgggtctgacactggaggaagcaattgaaaaacagagattgctcgaggaaaaggaccccgtgcctttgtttaagatatacgttgccgagctgatccagcagctgcagcagtag

SEQ ID NO: 195319 - DNA, 657 bp, synthetic construct
  misc_feature 1..657: note = Description of Artificial Sequence: Synthetic coding sequence
  source 1..657: mol_type = other DNA
atgcccctgcacaagtaccccgtgtggctgtggaagcggctgcagttgcgagagggcatctgcagccggctgcccgggcactatctgcgaagcctcgaagaggaacgcacacccacacccgtgcactacagacctcatggcgctaaattcaaaatcaaccccaaaaatggacagagagaaagagtcgaggacgtccccattcctatttactttccccctgagtcccagaggggattatggggcggcgaagggtggatcttgggacaaatctacgccaacaacgacaagctgtctaaacgcctcaaaaaagtgtggaagccccaactatttgaacgggagttttactccgagattctggacaagaaatttactgtgacagtaaccatgcggacattggatcttattgacgaagcttatggtctggatttctacatactgaagacccctaaggaggatctgtgtagtaaatttggaatggacctaaaaaggggaatgctgctccggctggccagacaagacccacagctgcacccagaagaccctgaaagacgagcagcaatttacgacaagtacaaagaatttgccatacccgaggaagaggccgagtgggtgggactgacactcgaagaggctatcgagaagcaacgccttctgtag

SEQ ID NO: 195320 - DNA, 585 bp, synthetic construct
  misc_feature 1..585: note = Description of Artificial Sequence: Synthetic coding sequence
  source 1..585: mol_type = other DNA
atgcccctgcacaagtaccccgtgtggctgtggaagcggctgcagctgcgagagggcatctgcagcaggcttcctgggcactatctcaggtctcttgaagaggagaggacccctacccccgtgcactaccgaccacacggagccaagtttaagattaatccaaaaaacggtcagagggaacgtgttgaggatgtgcccatcccgatctattttccacccgaatcgcaacgaggcttatgggggggcgaaggttggattctgggtcagatttacgccaacaacgataagctgtcaaagcggctcaagaaggtctggaaaccgcagttattcgaacgggaattttattccgaaattctcgacaaaaagttcaccgtgaccgtgaccatgaggacgcttgacctgatcgacgaagcttacggtctcgacttctatatactgaagacccctaaggaggatctgtgttctaagttcggcatggacctgaaacgagggatgctcctacgtttggctcggcaggacccccagctccatcccgaggatccagaaagacgtgcagctatctatgataaatataaggaattttag

SEQ ID NO: 195321 - DNA, 1047 bp, synthetic construct
  misc_feature 1..1047: note = Description of Artificial Sequence: Synthetic coding sequence
  source 1..1047: mol_type = other DNA
atgcccggctggcggctgctgacccaggtgggcgcccaggtgctgggtagacttggcgacggcttgggagctgctttggggcccggcaatcgcacacacatttggctgtttgttcgtgggctgcatggaaagtcagggacatggtgggatgaacacctgtctgaagagaatgtgcccttcatcaaacagttagtgagtgatgaggacaaggcccaactggctagtaagctgtgtcccctgaaagacgagccatggccaatccacccttgggagccaggatcatttagagtcggcctgatcgctctgaagctgggaatgatgcccttgtggactaaggatggccagaaacacgtggtaacactcctgcaggttcaagattgccacgttctgaagtacacctctaaagagaattgcaacgggaaaatggccacactaagcgtggggggtaagaccgtgagcaggttccgcaaggcgacaagtatcctggagttctatcgtgaactggggctgccaccgaaacaaacagttaagatttttaacattactgacaacgcggcaataaaacccggcacccccttatacgcagctcacttccgtcccgggcagtatgtggacgttacagccaagacgatcggcaaagggttccagggagttatgaagcgctgggggttcaaaggccagccagctacgcacggacagaccaagacacaccggcgacctggagcggtggccaccggggatatcgggcgcgtgtggcccggcaccaagatgcctgggaaaatgggaaacatctacagaaccgagtacgggttgaaggtctggcgaattaataccaagcataacatcatctacgtcaatggcagcgtgccagggcacaagaactgtctggtgaaggtcaaggacagtaaactgcccgcgtacaaagacctcggaaagaatctacctttcccgacttactttcctgacggcgatgaggaagaactcccggaggacctgtatgatgagaatgtttgccagcctggggctcccagcatcacttttgcctag

SEQ ID NO: 195322 - DNA, 1128 bp, synthetic construct
  misc_feature 1..1128: note = Description of Artificial Sequence: Synthetic coding sequence
  source 1..1128: mol_type = other DNA
atgcccggctggcggctgctgacccaggtgggcgcccaggtgctgggtcggctaggcgacgggctgggggctgcccttggacccggcaacagagtcaccaccaatagccttaacgtcagtctcatccgtcggaacgtgggatccgaggaaaaagtcggggatttaaagaaacggacacacatatggctgttcgtgagaggactgcacggcaagagtgggacttggtgggacgagcatctgagtgaagagaacgtgccgttcatcaagcaactggtgtctgacgaggacaaggcgcagctggcatccaaattgtgccctctgaaggatgaaccctggcccatccatccctgggaacctggcagcttcagagtgggtctgattgcacttaaactgggcatgatgcctctctggacaaaagatggacagaagcatgtggtgaccttgctgcaggttcaggattgccacgtactcaaatacacctctaaggagaattgtaatggcaaaatggccactttaagcgtgggtggtaagacagttagccgattccgcaaggcaactagtatcctggagttttacagagaactgggacttcctccaaagcagactgtgaagatatttaatattacagacaatgccgcaattaagccagggaccccactgtatgcagcacactttcgtcccggccaatacgtggacgtgaccgctaagacgattggtaagggttttcagggggtgatgaaacgttggggctttaagggacagcccgctacacatggacagactaagacacaccggagaccgggagctgtggccacaggcgacataggacgggtgtggcccggcacgaaaatgcccggaaagatgggaaatatctatcgaactgagtatgggctgaaagtgtggaggataaatacaaaacacaacatcatctacgtcaacggatcagtccccggacacaagaactgcctggtaaaagtaaaagacagcaagctccccgcttataaggaccttggcaaaaatctgcctttccccacatatttcccggacggcgatgaagaagagctccctgaagacctttacgacgaaaatgtgtgccagccgggcgcaccttccattaccttcgcatag

SEQ ID NO: 195323 - DNA, 1092 bp, synthetic construct
  misc_feature 1..1092: note = Description of Artificial Sequence: Synthetic coding sequence
  source 1..1092: mol_type = other DNA
tgattcttccccagccagcgggccagcgccggcgaccggagcggcggacattgtgagaatttcccaaccgcaaccgcgtccacctggaggtggagaggcgatagcctcaaagctgagcggcagggcgcgaggaaatccacacacatttggctatttgttcggggcctgcacgggaaaagcggtacatggtgggatgaacatctttctgaagaaaatgttccatttattaaacagctggtgtccgacgaagacaaggcccagctggcgagcaagctgtgtccactcaaggatgaaccgtggccaatacatccttgggaaccaggaagctttcgggtggggctaattgcactgaagctcgggatgatgcctctgtggactaaagacggtcagaagcatgtggtgactcttctccaggtgcaggattgtcacgtgctgaagtacacttccaaagagaattgcaacggaaaaatggccaccctgagcgtcggtggaaaaacggtgtcacggttcagaaaggccacgtcaatcctggaattttatagggagttaggacttccaccaaaacagaccgtcaagatctttaatatcactgataatgccgcaattaagcctggcaccccgctgtacgccgctcacttcaggccaggacagtatgtggacgtaaccgcgaagactatcgggaaaggcttccagggggtgatgaaaagatggggctttaaaggtcagcccgccacacacggtcagactaagacacaccgcagacccggagcggtcgccaccggcgacatcggccgtgtgtggccaggaacaaagatgccgggcaagatgggtaacatatatagaaccgaatatggtctgaaggtctggagaatcaatactaagcataatataatttatgtaaatggaagcgttccgggccacaagaactgccttgtcaaggtaaaagactccaaattgccagcctataaggacttggggaagaacttaccgtttccaacgtatttccccgacggcgacgaggaggagttaccagaagatctgtacgacgagaacgtatgtcagcctggtgcaccctccatcacgttcgcatag

SEQ ID NO: 195324 - DNA, 486 bp, synthetic construct
  misc_feature 1..486: note = Description of Artificial Sequence: Synthetic coding sequence
  source 1..486: mol_type = other DNA
atggccggcatcctgcggctggtggtgcagtggccccccggccggctgcagaccgtgaccaagggcgtggaatcactgatctgcaccgactggatccgtcacaagtttaccaggtctaggatcccagaaaaggttttccaggcttcacccgaggaccacgaaaaatacggtggcgatccccagaacccccacaaactgcatatcgtaaccaggatcaaatcaactagacgcagaccctattgggaaaaggatataattaaaatgctcggcttggagaaagcccacactccgcaggtacataaaaatatccctagtgtgaacgccaagctgaaagtagttaagcatcttattaggattaaaccactcaaactgccacaaggtctgcccgcagaagagaacatgtccaatacctgcctgaagagcacaggggagcttgtcgttcagtggcatcttaaacccgttgaacagaaggcacacgaaagttag

SEQ ID NO: 195325 - DNA, 486 bp, synthetic construct
  misc_feature 1..486: note = Description of Artificial Sequence: Synthetic coding sequence
  source 1..486: mol_type = other DNA
atggccggcatcctgcggctggtggtgcagtggccccccggccggctccagaccgtgaccaaaggtgtggaatctctgatctgtaccgattggattcgccacaagttcacgagatccaggatccccgagaaagtctttcaggcctcacctgaagaccacgaaaaatacgggggagacccacaaaacccgcataagctgcacattgtaacacgcattaagtccacccggcggcggccttactgggaaaaggatattatcaaaatgctgggcctagaaaaggcacacacgccacaagtccacaaaaatataccctcagtcaacgccaagctcaaggtggtgaagcatttaatcagaattaagccgcttaaattgccacaaggactccccgctgaagaaaacatgtccaacacctgtttaaagtctacaggagaactagtggtgcagtggcacctgaagcccgtggagcagaaggcacacgaaagctag

SEQ ID NO: 195326 - DNA, 705 bp, synthetic construct
  misc_feature 1..705: note = Description of Artificial Sequence: Synthetic coding sequence
  source 1..705: mol_type = other DNA
atggccgagcggggctacagcttcagcctgaccaccttcagcccctccggcaaattggtccagattgaatatgccctagcagcggttgctggtggagcaccttccgtcggtatcaaagcagcaaacggcgtcgtgcttgctacagagaagaaacaaaagtcgatcttatacgatgaacgatctgttcacaaagtcgagcctattactaagcacatcgggctcgtctattctggcatgggacccgactatagagtgctggtccatagggcccggaagctggcccagcagtattatctggtttaccaggaaccaatccccacagctcagcttgtgcagcgtgtggcctccgttatgcaagagtacactcagtcagggggagtgagaccatttggggtcagtttgctcatatgtggctggaatgagggccggccgtacctctttcagtccgacccttctggggcctacttcgcctggaaagccacggcgatggggaagaactatgtgaacgggaagacattcttagagaaacgctacaacgaggacttggaactcgaggacgccatccacactgctatcctcactctgaaggaatcttttgaagggcagatgaccgaggacaacatcgaagttggcatttgtaacgaggctggattcaggcggttgactccaacagaagtaaaagactaccttgcagccatagcatag

SEQ ID NO: 195327 - DNA, 324 bp, synthetic construct
  misc_feature 1..324: note = Description of Artificial Sequence: Synthetic coding sequence
  source 1..324: mol_type = other DNA
atggccctggccatgctggtgctggtggtgagcccctggagcgccgccagaggcgttctcaggaattattgggagaggctcctccgaaagctgccacaatccagaccaggctttccctctcctccctgggggcctgccctggctgtgcaaggacctgcgatgttcactgagccagccaatgacacctccggcagtaaagaaaactctagcctgctcgacagcattttttggatggcagcacccaaaaatcgccgtacaatcgaggtcaatcgatgtaggaggagaaacccacaaaagctcataaaagttaaggtcatgcactag

SEQ ID NO: 195328 - DNA, 279 bp, synthetic construct
  misc_feature 1..279: note = Description of Artificial Sequence: Synthetic coding sequence
  source 1..279: mol_type = other DNA
atggccgtgctggccggcagcctgctgggccccaccagccggagcgccgcattgctaggtggacgttggctgcagccgcgagcatggttaggttttccagacgcttggggcctccctaccccacagcaagctaggggaaaagcaaggggcaacgagtatcagccttccaacatcaagagaaaaaacaagcacgggtgggtgcggcgcctgagcacgccagcgggcgtacaagtgattctgcggagaatgctgaagggacgaaagtccctgagccactag

SEQ ID NO: 195329 - DNA, 513 bp, synthetic construct
  misc_feature 1..513: note = Description of Artificial Sequence: Synthetic coding sequence
  source 1..513: mol_type = other DNA
atggccgccagcgccttcgccggcgccgtgcgggccgccagcggcatcctacggcctctgaacatccttgcaagctctacctacagaaactgcgtcaaaaacgcatccctgatctccgctctgtcaaccggaaggttctcccacatacagactcctgttgtgtcatctaccccccggctgaccacaagcgagcgaaacttgacttgcgggcatacatctgttattctcaaccggatggcccccgtgctcccctctgtccttaagcttcccgtccgcagcctgacctacttctctgcccgaaagggaaagcggaaaaccgtcaaggcggtgatcgacaggttcctccgcctgcattgtggcctttgggttcggcgcaaagcaggttacaagaagaagctgtggaagaagacccccgctagaaagaaacgcttgagggaattcgttttctgcaataagacacagagcaagctgctggacaaaatgacgacctccttctggaagagacggaattag

SEQ ID NO: 195330 - DNA, 567 bp, synthetic construct
  misc_feature 1..567: note = Description of Artificial Sequence: Synthetic coding sequence
  source 1..567: mol_type = other DNA
atggccgccagcgccttcgccggcgccgtgcgggccgccagcggcattttaagacctctgaatatcctggcatcttccacctacaggaattgcgttaaaaacgcaagtcttatctcggcactcagcacaggacgcttctcccatatccagactcctgttgtcagctctacccctaggttaaccacttccgagcggaacttgacttgtggccatacctccgttatcttaaatagaatggcccctgtgctgcctagtgtgctaaagttaccagtacgctctctgacgtacttcagtgctcgcaagggcaagcgcaaaacagttaaggctgtgattgacagatttctgaggctgcattgtggactgtgggtgcggaggaaggctggatacaaaaagaagctctggaagaaaaccccagcaagaaaaaaacgcttacgagagtttgtgttctgcaataagactcagagtaagctgcttgacaagatgaccacctcattttggaaacggaggaactggtacgtcgatgacccttatcagaaatatcatgaccggaccaacctcaaggtgtag

SEQ ID NO: 195331 - DNA, 312 bp, synthetic construct
  misc_feature 1..312: note = Description of Artificial Sequence: Synthetic coding sequence
  source 1..312: mol_type = other DNA
atggccaacctgttcatccggaagatggtgaaccccctgctgtacctcagccgtcacacagtcaagccacgcgcactgtcaactttcttgttcggttctatacgtggagcagcccctgtggcggtcgaaccaggtgctgctgtgcggtctttactgtccccgggcctactgccccatctgctccctgcgctgggcttcaaaaacaagacagttttgaagaaaaggtgcaaggactgctatttggtgaaaagaagaggccgctggtacgtgtactgcaagacccatccccgtcataagcagcgccaaatgtag

SEQ ID NO: 195332 - DNA, 312 bp, synthetic construct
  misc_feature 1..312: note = Description of Artificial Sequence: Synthetic coding sequence
  source 1..312: mol_type = other DNA
atggccaacctgttcatccggaagatggtgaaccccctgctgtacttgtcccgacacacggtcaagcctagggccctttctactttcttgttcgggtctatccgcggagccgcgcccgtggccgtggagccaggggctgccgtccggtcactcttaagccccggtttattaccccatctgcttccagctcttggattcaagaacaaaactgttctgaaaaagaggtgcaaggattgttatctggtcaagaggcgcggcaggtggtacgtgtactgcaagactcacccacgacataagcagaggcagatgtag

SEQ ID NO: 195333 - DNA, 312 bp, synthetic construct
  misc_feature 1..312: note = Description of Artificial Sequence: Synthetic coding sequence
  source 1..312: mol_type = other DNA
atggccaacctgttcatccggaagatggtgaaccccctgctgtacctatcacgacacactgtgaagccaagggccctcagcacgtttttgtttggatccatcagaggtgccgcccccgtggcagtcgagccaggagcagcagtgagatccctgttgagccccgggcttttgccacacctccttcctgcgctgggattcaaaaataaaacagtactgaagaaaagatgtaaagattgctacctggtgaaaaggaggggcaggtggtacgtgtactgtaagacccatccacggcataaacagcgccagatgtag

SEQ ID NO: 195334 - DNA, 312 bp, synthetic construct
  misc_feature 1..312: note = Description of Artificial Sequence: Synthetic coding sequence
  source 1..312: mol_type = other DNA
atggccaacctgttcatccggaagatggtgaaccccctgctgtacttgtctaggcacacagtgaaaccaagagctctcagcacattcctctttggctccattaggggagccgcccccgtcgcggtggagcccggcgctgcggttcgatcactgctgagtccaggacttttgccccatctcttaccggcacttggattcaaaaacaagacagtcctgaaaaagagatgcaaggattgttacctggtcaaacgcagggggcgatggtacgtgtattgcaaaacccatcctcgccacaagcagaggcagatgtag

SEQ ID NO: 195335 - DNA, 1251 bp, synthetic construct
  misc_feature 1..1251: note = Description of Artificial Sequence: Synthetic coding sequence
  source 1..1251: mol_type = other DNA
atgcacttcgtgccctggctggcccggcccatcttccccccctgggacagaggttacaaggatccaagattctacaggtccccccctctccacgagcatccgctatacaaagatcaagcctgctatatattccaccatcggtgcaggcttctagagggagtgaaacaggcactttggttgactaaaactaaactaattgaaggcctgcccgagaaagtgctatccctcgtggacgatcccaggaaccacatcgagaaccaggatgagtgtgtactgaacgtgataagccacgcgaggctctggcaaaccactgaggagatccccaaaagggagacttattgtcctgttattgttgacaatcttattcagttatgcaagtcccagatcctcaagcaccccagtctggccaggcggatttgtgttcaaaatagcaccttctcagctacatggaatagagagtctctgctgctgcaggtgcggggatctggtggcgcgcggcttagcacaaaggatcccctacccactatcgccagccgggaagagattgaggcgaccaagaatcatgtgttggaaactttctaccctatcagtccaattatcgaccttcacgaatgtaacatctacgatgtgaagaacgacacaggatttcaagaggggtacccgtacccttacccacacacactttatctgttggataaagcgaatttaagaccccacagactccagcccgatcagctaagggccaagatgatcttattcgcattcggcagtgccctggcccaggccaggttgctgtacgggaatgatgctaaggtgttagagcaacccgttgtggtgcagagtgtggggacagatggtagggtgtttcactttctcgttttccagttgaatacaacagatctggattgtaatgagggtgtgaagaacctggcctgggtcgactcggaccaactcctataccagcacttttggtgcctgccggttatcaagaaacgggtcgtggtaaccgggccgtgctttagcaaatcacaaatgagcacttcatttgtcctgacacccagcttcaatgccggggaagaggttatgcagcgaaatctgagggcatcggcctccctgccccctagtaccggaagtccagcttctgaattggttaaagaacaggagcatgcagctgggagggtgctccgtcgagttatgcttgattccgagactcccagggaggagctgcccgcggccgatttctggaagtag

SEQ ID NO: 195336 - DNA, 879 bp, synthetic construct
  misc_feature 1..879: note = Description of Artificial Sequence: Synthetic coding sequence
  source 1..879: mol_type = other DNA
atgagcggcgcctgcgccccccggggcagccggagcctgctgccctggattggctgcacccggtccttagactggtcaccctcaccacttcggggcagatgcacctcatgtccaggatggcggggccggtcattccggcccggcaccgcggccacgagaacgcagggttcaactgccagacctctgttcacctcaattagatgcaccaagacacggcccgcgattagctttacaacagtcgctgcattctctaggagcctgttattgcaggtccgggggtccggaggagcacgcctgagtaccaaagatccactgcctactattgctagccgagaagagatcgaagcgactaaaaatcacgtactggaaaccttttaccccatatctcccattatcgatctgcatgagtgtaatatatatgatgtaaagaacgacactggcttccaggagggctacccatacccatatcctcataccctgtacctgctcgacaaggccaacttgcggcctcacagactccagccggaccagctgcgggccaagatgatactttttgccttcgggtcggccctcgctcaggcccgcttgttgtatggaaacgatgccaaggtgctcgaacagcccgtggttgttcaaagtgtgggtaccgatggccgcgtgtttcacttcctcgtatttcaacttaatacaaccgatctggactgtaatgagggcgttaagaatctggcttgggtcgattccgatcagctgctctatcaacatttctggtgcttgcccgttatcaaaaaaagagtggtggtggaaccggttggacctgtgggatttaaacccgaaacctttcgtaaattccttgcactgtatctgcatggggccgcctag

SEQ ID NO: 195337 - DNA, 1272 bp, synthetic construct
  misc_feature 1..1272: note = Description of Artificial Sequence: Synthetic coding sequence
  source 1..1272: mol_type = other DNA
atggccctggccagcggccccgcccggcgggccctggccggcagcggccagctgggactcggcggatttggcgctccacggaggggggcctacgaatggggtgtgaggtccacacggaagtctgagcctccccctctcgacagagtctacgaaataccaggcctggagcctataacttttgcaggcaagatgcatttcgtgccatggcttgctaggcccatttttcccccttgggatcgaggatacaaagatcctcgattctatcgtagccctcccctgcatgagcacccactttacaaggaccaggcatgctacatctttcaccatcgatgcagattgcttgagggggtgaaacaggccctttggttgacaaagactaaactgatagagggactgccagagaaggtcctaagtctcgttgacgatccgaggaatcacattgagaatcaggatgaatgcgttctcaatgtgatcagccacgccagactgtggcagaccaccgaagaaatacccaagcgtgaaacttattgtcccgttatcgtcgataatttaatccagttgtgcaaatcacaaattctcaagcatccttcacttgcaagaagaatatgtgtgcaaaattcaaccttttccgctacctggaatagggaaagcttattgcttcaggtgcgtggatctgggggggcacggctgagcacgaaggatccactgccgaccattgctagccgggaggagatagaagcaactaagaatcatgtcttagaaactttttatcccatcagtccaattatagatctgcacgagtgtaatatctatgacgtgaagaatgacactggattccaggagggctatccatacccatacccgcacactctgtacctgctcgacaaggccaatcttcggcctcataggcttcagcctgaccagctgcgggctaagatgatcctcttcgctttcggctccgctctggctcaggcacgtctcttatacggaaatgacgccaaggtgctggagcagcccgtagtagtgcagagcgtgggtaccgacggacgcgtgttccattttctagtgtttcagctgaacactaccgacctggattgtaatgagggcgttaagaacctggcttgggtggattctgatcagctgctgtaccagcacttctggtgtttacccgtgattaaaaagagagtggtagtggaaccagtgggcccagttgggttcaagcccgagacttttcggaagttcctcgcgctgtatctgcacggcgcagcctag

SEQ ID NO: 195338 - DNA, 795 bp, synthetic construct
  misc_feature 1..795: note = Description of Artificial Sequence: Synthetic coding sequence
  source 1..795: mol_type = other DNA
tgaagcctgctgctgcaggtgcggggcagcggcggcgcccggctgagtactaaggacccgctgccgacgattgcttcacgtgaagagatcgaggcaactaagaaccacgtgttagaaactttttatcccatcagccccataattgaccttcacgaatgtaatatctatgatgtaaagaatgacacagggttccaggagggctacccttacccgtacccccatacattgtatctgctagataaagctaacttaaggccccaccggctgcagcccgaccagctcagagcgaagatgatactattcgcatttggctctgccctcgcacaggcgaggttattatacggaaacgacgccaaggtgctcgagcaacctgtcgtggtgcaatctgttggaactgatggacgggtgttccatttcctggtgttccagctcaatacaactgatctggattgtaatgagggcgtgaaaaatctcgcctgggtggattctgaccagttgctgtaccaacacttttggtgtttgcctgtgatcaagaagcgtgtcgtggtgaccgggccatgctttagtaaatctcaaatgtctacaagttttgtccttactcctagtttcaacgccggggaggaagtcatgcagcggaacttaagagcatctgcaagtctccctccatctacaggcagccctgcatccgagcttgtgaaagaacaggagcacgccgcaggccgtgtccttaggagagtcatgctggattctgagactcctagagaagaactgccagcagctgatttttggaaatag

SEQ ID NO: 195339 - DNA, 1143 bp, synthetic construct
  misc_feature 1..1143: note = Description of Artificial Sequence: Synthetic coding sequence
  source 1..1143: mol_type = other DNA
atggccgccccctggtggcgggccgccctgtgcgagtgccggcggtggcgtgggttttccacctcagcggtcctagggaggcgcacgcctccattgggacctatgccaaactcggatattgacctgtccaacctggagcggctggaaaagtaccgatctttcgatcgctatcgccgccgtgccgagcaggaagcacaagcaccccactggtggcgcacctatcgggagtattttggagagaagaccgaccccaaggagaagattgatatcggcctccctcctcccaaagtgtcgcgcactcagcagctgctggagaggaagcaggcgatccaggaattacgcgccaacgttgaggaagaaagagccgcccgtctcagaaccgcttccgtccctttggacgcagtccgcgccgagtgggaacgaacttgcggcccttatcacaaacagaggttagctgagtattacggactgtacagagatctcttccatggcgccacttttgtccccagggttcctctccacgtcgcgtacgccgtcggcgaggatgacttgatgcctgtatattgtggaaatgaggtgacccctacagaagccgcacaagcccccgaggtgacatatgaggccgaggaagggtcactttggacactgctgctgactagcctggatggccacctgcttgaaccagacgctgagtacctgcactggctgctgacaaatatccccggcaaccgcgtcgctgagggccaggtgacctgcccatacttgcctccctttccagctaggggctccggaattcaccgattggctttcctgctttttaaacaagatcagcccatcgatttcagcgaagacgccaggcccagtccctgttaccaacttgcacagcgtacgtttagaacgttcgacttctataagaaacatcaggaaacaatgactcccgccggcctgtccttttttcagtgccgctgggatgatagtgtcacctacatttttcaccagctgctggacatgagagagccggtgttcgagttcgtgaggcccccgccctatcaccctaaacaaaagaggtttcctcacagacagcccctcagatatctggatcggtatagagattcacacgagccaacctacggaatttattag

SEQ ID NO: 195340 - DNA, 591 bp, synthetic construct
  misc_feature 1..591: note = Description of Artificial Sequence: Synthetic coding sequence
  source 1..591: mol_type = other DNA
atgcccgtgtactgcggcaacgaggtgacccccaccgaggccgcccaagctcctgaagtgacctacgaggccgaggagggttctctctggacactcctgctcactagcttggacggacatttactggaaccagatgccgaatatcttcactggctgctcacaaatatcccgggaaatagagtcgccgaggggcaggtgacgtgtccctacctgccacccttccccgctcgcggtagcgggatccataggcttgcattcctcctgtttaagcaagaccagccaattgacttcagcgaggatgccagaccctctccatgttaccagctcgctcagcgaacgttccggacatttgacttctataagaaacatcaggagactatgactccagcaggactttcattctttcagtgtagatgggatgacagcgtgacctatatctttcaccaacttttggatatgagggagccagtatttgaatttgtcagacccccaccttatcatccgaaacagaagcgttttccacatcggcaacctctccgatatttggacagataccgtgattcacacgaacccacttacggcatctactag

SEQ ID NO: 195341 - DNA, 1062 bp, synthetic construct
  misc_feature 1..1062: note = Description of Artificial Sequence: Synthetic coding sequence
  source 1..1062: mol_type = other DNA
atggaggccctggccatgggcagccgggccctgcggctgtggctggtggctcctgggggcggtatcaagtggcggttcatcgcgactagcagtgcttctcagctgagcccaacagagcttacagagatgagaaacgacctgtttaacaaggaaaaggcacgacagctctcacttacacctaggactgaaaagatcgaggttaaacacgtgggaaagactgaccctggtacggtgtttgtgatgaacaaaaacattagtacaccatatagttgtgcaatgcatctctctgagtggtactgccggaaatcaatccttgctctggtggatggtcagccttgggacatgtataaaccactgaccaagagctgtgagatcaaatttttgacatttaaggactgtgaccctggtgaagtcaataaggcctactggcggtcctgcgcaatgatgatgggatgcgtcattgagagggcttttaaagacgagtatatggtaaatctggttagggcacctgaagtgccagtgattagcggagcgttttgctatgatgtagtgctggactctaagcttgacgaatggatgcccaccaaagagaacctcagaagcttcactaaggacgcccatgcgctaatctacaaggacctgccatttgagacgctggaagtagaagccaaagttgcccttgaaatattccagcactctaaatataaagttgatttcattgaggaaaaagcaagtcagaatcctgagagaatcgtgaagctgcatcggataggggacttcattgacgtcagcgaggggccgctcatccctcgtacctcaatatgcttccagtatgaggtcagcgctgttcacaacctccagcctacccagccttccctgatccggaggttccagggagtatcactccccgtgcatctcagggcccactttaccatatgggacaaactactggagcggagtcgcaaaatgacacccttccccatcctgctgctctttaccactcaatccttcttcaccactagtccggaatcctacttgctccacggcaccgtgtccgaatag

SEQ ID NO: 195342 - DNA, 1017 bp, synthetic construct
  misc_feature 1..1017: note = Description of Artificial Sequence: Synthetic coding sequence
  source 1..1017: mol_type = other DNA
atggaggccctggccatgggcagccgggccctgcggctgtggctggtggccccaggaggcgggatcaagtggaggtttatagcaacatctagcgcgagtcaactgagtccaaccgagctcactgaaatgagaaatgacctctttaataaagaaaaagccaggcagttaagcctgacgccgcggaccgaaaagatagaggtcaagcatgtcggcaaaacagatcccggaactgtgtttgtcatgaacaagaacatctcgacaccatactcttgcgctatgcatttatctgagtggtattgcagaaaaagtatcctagcattggtggacggacagccatgggacatgtataagcctttgaccaaatcttgcgaaattaagtttctaaccttcaaagactgtgatccgggagaggtgaacaaggcgtactggcggagctgcgccatgatgatgggatgcgtaatcgagcgagcatttaaggatgaatacatggtaaatcttgttagagcaccagaagtgcccgttatatctggcgccttttgctatgacgtcgtcctcgactctaaattggacgaatggatgccaacaaaggagaacttacgttccttcaccaaggacgctcatgcgctgatttataaagacctgccattcgagacccttgaagtggaagcgaaagttgctcttgaaatctttcagcactcaaagtataaggtcgacttcatcgaggaaaaggcctcacagaatccagagaggatcgtaaagctccacagaataggagatttcattgatgtctccgagggtccactcattccgcgaacctctatctgcttccagtacgaagtgtccgcagtgcataacctgcagcccacgcaaccatccctgatcaggcggtttcagggggttagcctgcctgtgcacctgcgtgcacactttaccatttgggataagctgctcgagcgttcccggaaaatggtgactgaagaccagagcaaggcaactgaggaatgtacctccacttag

SEQ ID NO: 195343 - DNA, 936 bp, synthetic construct
  misc_feature 1..936: note = Description of Artificial Sequence: Synthetic coding sequence
  source 1..936: mol_type = other DNA
atgctgcagttcgtgcgggccggcgcccgggcctggctgcggcccacaggctcccaaggactgagctcactggccgaggaggccgcgagagcaactgagaatcctgagcaggtagcttctgagggattgccagagccagtacttcgtaaggtcgaattgccagtgccgacacatcggaggccagttcaggcctgggtggagtctctcagaggttttgagcaagaacgggtgggattagccgacttgcacccggacgtgttcgctactgctccccgcctcgacatccttcatcaggtcgctatgtggcaaaaaaattttaaaagaatctcgtacgccaagaccaagacccgcgccgaggtgagggggggcggcagaaaaccgtggcctcaaaagggtacgggccgagcccgccatggaagcatccgaagcccactgtggcgtgggggtggcgtggctcacggccctagagggcctacatcttactactacatgctccctatgaaggtccgggccttggggcttaaagtcgcccttactgttaaactcgcccaggacgacctccacattatggattctctggaactgccgaccggcgacccgcagtacctcactgagctggcacattatcggagatggggagacagcgtattactagtagacctgacccacgaggagatgccccagagtatcgtggaagccacctcccgcctgaagacttttaacctgattcccgccgtggggttgaacgtccacagtatgctgaagcatcaaacgcttgtgcttaccttgcctacagtggccttcctcgaggataagctcctgtggcaggattcacgctatcggccactgtatccattcagcttgccatactccgacttcccacgccctctgcctcatgcaactcaggggcctgccgcaacaccataccattgctag

SEQ ID NO: 195344 - DNA, 936 bp, synthetic construct
  misc_feature 1..936: note = Description of Artificial Sequence: Synthetic coding sequence
  source 1..936: mol_type = other DNA
atgctgcagttcgtgcgggccggcgcccgggcctggctgcggcccacggggagccaaggcctaagcagcctcgccgaggaggccgccagagctacagagaacccagagcaagtcgcctccgagggccttccagaaccagtgctcagaaaggtggagttgcccgtgcctacccacaggcgccccgtgcaggcctgggtggaaagcctcagggggttcgagcaggagcgcgtgggcttggcagatttacatccggacgtgtttgcgacggctccacgactggacatactgcaccaagttgccatgtggcagaaaaacttcaaacgcatctcctatgcaaagaccaagactagagctgaggtgcggggagggggtcgcaagccctggccccagaagggcaccggacgggcccgacatgggtccatccggtcccctctgtggaggggtggaggagtcgcccatggcccgagaggaccgacgagttattactatatgcttccaatgaaggttagggccctcggcttgaaagtcgccctgacagtgaagcttgctcaagacgatctccacataatggatagcctcgaactgccgaccggcgacccgcagtacctaaccgagttggctcactacagaagatggggcgactctgttctcctggttgacttgacacacgaggaaatgccacagagcatcgtagaggctacaagcagacttaaaacgtttaatctcattccagcagtggggttaaacgtgcactccatgctcaagcaccaaacgcttgtgctgaccttgccaaccgtcgcatttctggaggataagctcctttggcaggatagccgctataggccactttatccctttagcctgccatattctgatttcccgcgccctctcccacacgccacacaaggcccagcagctacaccctatcactgctag

SEQ ID NO: 195345 - DNA, 792 bp, synthetic construct
  misc_feature 1..792: note = Description of Artificial Sequence: Synthetic coding sequence
  source 1..792: mol_type = other DNA
atgctgcagttcgtgcgggccggcgcccgggcctggctgcggcccaccggcagccagggccttagcagcctagcggaggaggccgcccgagcgacagagaaccccgaacaggtggcgagtgaggggctgccagaaccagtcctcaggaaagtcgagctgcccgtccccacccataggcggcctgtccaagcttgggttgaaagcttgcgcggatttgaacaagagagggttggattggccgacctccatccagatgtgttcgccacagccccgaggctggacatcctgcaccaggtcgctatgtggcaaaaaaacttcaaaagaatctcatatgcgaaaaccaaaacccgcgcggaagtcagggggggtggtagaaaaccctggccacagaagggcaccggaagggctcggcacggaagtattcggagtcccctctggcgcggaggcggcgtggcacacggcccacgcggacctacatcctattattatatgctgcctatgaaggtgagagctctggggctcaaagtggcccttactgtgaaactggcccaggacgatctacatataatggattctctcgaacttcccacgggcgatccccagtacctgaccgaactggcacactaccgcaggtggggagattcagtgttgttagtggatcttactcacgaggagatgccacagagcatcgttgaggccacctcccgcctcaaaacttttaatctgatccccgcagtgggggagcagagagcccaagcacccagggtgcgcatgtgcaggctgcggtgttag

SEQ ID NO: 195346 - DNA, 792 bp, synthetic construct
  misc_feature 1..792: note = Description of Artificial Sequence: Synthetic coding sequence
  source 1..792: mol_type = other DNA
atgctgcagttcgtgcgggccggcgcccgggcctggctgcggcccacggggtcacagggtctatctagcctggctgaagaggccgctagagctaccgagaatcccgaacaggtcgcttctgaggggctgccagaaccggtgctacgcaaagtggaactccccgtccccacacacaggagaccagtgcaggcttgggtcgagtcactcagaggattcgagcaggagagggttgggctggccgacctccatccagatgtgtttgccaccgcacccaggctagacatccttcaccaggttgccatgtggcaaaaaaacttcaaaaggatatcttacgccaagactaagacccgggcagaagtgagaggggggggaaggaagccttggccacagaaagggactgggcgggcccgccacggctcaatccggtccccactttggcgcggagggggcgtagcccacggcccccgtggcccaacctcttattattacatgctgcccatgaaagtgcgcgcattgggactcaaggtggccttgaccgtgaagctagcacaagacgatctgcatattatggacagcctggaactgccaacaggggacccgcagtatctgaccgagctcgcccattacagaaggtggggcgatagcgtccttctagttgacttgacacacgaggagatgcctcagtcgatcgtggaagctaccagtagactaaagaccttcaacctgatccccgctgttggggagcaacgggcccaggccccacgcgtccgtatgtgtaggctgcgctgctag

SEQ ID NO: 195347 - DNA, 414 bp, synthetic construct
  misc_feature 1..414: note = Description of Artificial Sequence: Synthetic coding sequence
  source 1..414: mol_type = other DNA
atgggcgtgctggccgccgccgcccggtgcctggtgcggggcgccgacaggatgtctaagtggaccagtaaacgtggtcctcgtagtttcagggggagaaagggccggggggctaagggaattggattcctgacaagtggctggcgatttgtccagattaaggagatggtccctgaattcgtcgtgccagaccttaccggtttcaagctcaaaccctacgtgtcttatctggcccccgagagtgaagagacaccgttaaccgccgctcagctgttttctgaggcggttgctcctgctattgagaaggattttaaggacggcacatttgatcccgacaacttggagaagtacgggttcgagcctacgcaggaggggaaactgttccagctttacccgagaaatttcctgcgttag

SEQ ID NO: 195348 - DNA, 429 bp, synthetic construct
  misc_feature 1..429: note = Description of Artificial Sequence: Synthetic coding sequence
  source 1..429: mol_type = other DNA
atgggcgacgtgaaggagaactacctggagaccttcatcagcagccctaaattcggaaggacctgcgctgacggcgccctctactgtgtgtgtcacaagagcacctactctccactgcccgacgactataattgcaacgttgagctggcgctaacatcagacgggaggactatcgtgtgctaccacccttccgtagatattccctatgaacacaccaaacccattccacggccagatccggtgcacaataacgaggaaacccatgaccaggtgcttaagacgaggcttgaggagaaagtggagcatctggaggagggcccaatgattgaacaactatcaaaaatgttcttcaccaccaagcaccgctggtacccccatggccgctaccaccgttgtagaaagaatctgaacccacccaaagatcgttag

SEQ ID NO: 195349 - DNA, 429 bp, synthetic construct
  misc_feature 1..429: note = Description of Artificial Sequence: Synthetic coding sequence
  source 1..429: mol_type = other DNA
atggccgtggccgccgtgaagtgggtgatgagcaagcggaccatcctgaagcatctgttcccggtgcagaacggagccctttattgcgtctgccacaagtctacctacagcccattgcccgatgattataactgcaacgtggaacttgcactgactagtgacggacggacaatcgtttgttaccacccatctgtcgacatcccttacgagcacacaaaaccaattcccaggccagatccggtccataataatgaagagactcacgatcaagttttgaaaacccggctggaggagaaggtcgagcacctggaagaagggccaatgatagagcagctgtccaagatgttctttacaaccaaacacaggtggtatcctcatggccggtaccacagatgcagaaagaatcttaatccacctaaggataggtag

SEQ ID NO: 195350 - DNA, 429 bp, synthetic construct
  misc_feature 1..429: note = Description of Artificial Sequence: Synthetic coding sequence
  source 1..429: mol_type = other DNA
atggccgtggccgccgtgaagtgggtgatgagcaagcggaccatcctgaagcatttgttcccagtgcagaatggagcgctgtactgcgtgtgtcataaaagtacttactcccctctgccagatgactacaactgtaacgtagaactggccctaacatcagatggtagaacaattgtctgttaccacccttcagtagacataccttatgagcatactaagccgattccccgacccgaccctgttcacaataatgaggaaacccacgaccaagtgttgaagacgagattagaggagaaggtggagcaccttgaagaaggccccatgattgagcagttatcaaaaatgtttttcaccacgaaacatagatggtatccccatggacggtaccacagatgtaggaagaatcttaatccaccaaaagatcgatag

SEQ ID NO: 195351 - DNA, 429 bp, synthetic construct
  misc_feature 1..429: note = Description of Artificial Sequence: Synthetic coding sequence
  source 1..429: mol_type = other DNA
atggccgtggccgccgtgaagtgggtgatgagcaagcggaccatcctgaagcatctgtttcctgtccagaatggagcactttactgcgtgtgtcataaatccacatattcacccctcccagatgactacaactgcaatgtggaactagcccttacctccgatggtcgaaccattgtatgctatcatccaagcgttgatatcccatacgagcacaccaagcctatcccgaggccggatcctgtgcacaacaatgaggaaacccatgaccaggtgttgaaaacacggttggaggagaaggtcgagcatttggaggaggggcccatgatagaacaacttagtaagatgttttttaccactaagcacagatggtacccgcacgggaggtatcataggtgccgcaagaaccttaatcctccaaaggatcgttag

SEQ ID NO: 195352 - DNA, 609 bp, synthetic construct
  misc_feature 1..609: note = Description of Artificial Sequence: Synthetic coding sequence
  source 1..609: mol_type = other DNA
atgaccgcccggggcacccccagccggttcctggccagcgtgctgcataatggactcggacggtacgtgcagcagctacagaggctgtccttctccgtgagtagggatggagcctcaagtaggggggccagggagttcgtggagcgcgaggtgatagattttgcacgccggaaccctggcgtcgtgatctacgtgaatagccgcccttgttgtgtccccagggttgtcgctgaatacctgaatggggctgtgcgggaggaaagcatccactgtaagtccgttgaagaaatttcaaccctggtccagaagctggcggatcagagtggactggatgtgattcgtatccggaagcctttccataccgacaacccctcaattcagggtcagtggcacccatttaccaacaagcctactaccttcaggggactcaggccccgagaagtacaggaccccgcgcccgcgcaggataccgggctgagactgagcgcggtggctcctcagatattgctccccgggtggccggaccctatttccgtgcaaagctccgatctcccttgggggaacactcactaccgccctgagcccttgagctcaaccacctggctgtag

SEQ ID NO: 195353 - DNA, 648 bp, synthetic construct
  misc_feature 1..648: note = Description of Artificial Sequence: Synthetic coding sequence
  source 1..648: mol_type = other DNA
atgaccgcccggggcacccccagccggttcctggccagcgtgctgcacaatgggctcggaagatatgtacagcagctccagagactgagctttagcgtctctagagatggcgcttcgtctaggggcgcacgtgaatttgtggaacgagaggtgatagacttcgccaggcggaatcctggagtggtcatatatgtgaatagtaggccttgctgcgtgccccgagtcgtggctgagtacctcaatggtgccgtccgagaggaaagcattcattgcaaaagtgtggaggagatctctactcttgttcaaaagctggctgatcaatcgggccttgacgtcatcaggattagaaaaccctttcataccgataatcccagcatacagggccagtggcatcctttcaccaacaagcctaccacctttcgcggcctacgtccacgagaagtgcaggaccccgctcccgcacaagacaccggactgaggttatccgcagtagcgccccagatactgctgccggggtggccagacccaccggacctgcccactgttgaccctatctctagctccctcacttccgctcccgcaccaatgctgagcgcagtcagttgcctgccaattgtccccgctctgactacagtctgctctgcctag

SEQ ID NO: 195354 - DNA, 480 bp, synthetic construct
  misc_feature 1..480: note = Description of Artificial Sequence: Synthetic coding sequence
  source 1..480: mol_type = other DNA
atgaccgcccggggcacccccagccggttcctggccagcgtgctgcacaatggactggggagatatgttcagcagctgcaacggctcagtttctcggtgtcaagagacggcgctagttcgcgcggtgctcgtgagttcgtcgagcgggaagttatagatttcgcacgtcgcaacccaggcgtcgtcatttacgttaacagtcgcccttgctgcgtgccaagggtggtcgccgagtacctgaatggcgccgtcagagaagagagtattcattgcaaatcagttgaggaaattagcactttagtccagaaattagccgaccagtctggtctggacgtgattaggatcaggaaaccattccatacggataacccgtcgattcaaggacagtggcacccttttaccaacaagcctaccacattccggggtttacgcccacgcgaggtacaagaccccgcccccgcacaggtgcaagcgcaatag

SEQ ID NO: 195355 - DNA, 708 bp, synthetic construct
  misc_feature 1..708: note = Description of Artificial Sequence: Synthetic coding sequence
  source 1..708: mol_type = other DNA
atgaccgcccggggcacccccagccggttcctggccagcgtgctgcacaatggattgggaagatatgttcaacagctccaaaggttgtccttctcagtgagcagagacggagcctcatcccgaggtgcccgtgaattcgtcgaaagggaggtgatagactttgcacgtagaaatcccggggtcgtcatttatgtgaatagtcggccctgttgtgtccctcgtgtcgtggcagagtacctgaatggggctgttcgagaggaaagcatccactgtaaatctgtggaagaaatatctaccctggttcagaaattggccgatcaatccggtctggacgttattagaattcgcaagcctttccatacagataacccttccatccagggtcagtggcacccattcaccaacaagccaaccacattccggggcctcaggccaagagaggtgcaagatcctgctcctgcgcaggacgctgctgaatttctgggcgagggggccggcccctgttggtacagtatcgtggctctgccacaaaagcacattgcgatcgccattcatcccccgcagcccgctggacagtgccaccaggccattggccactggcctgagactgtgtgttcttgcactgccgacccgcctgctagactcgccaggcctaacatatctagcgtgataagatctagtcttggcaagtaccccctgcctagctag

SEQ ID NO: 195356 - DNA, 495 bp, synthetic construct
  misc_feature 1..495: note = Description of Artificial Sequence: Synthetic coding sequence
  source 1..495: mol_type = other DNA
atgaccgcccggggcacccccagccggttcctggccagcgtgctgcacaatggcctgggaaggtatgtgcagcagctacagagactctctttctccgtcagccgtgacggagcttcttccagaggcgcgcgcgagttcgttgagcgggaagtcatcgatttcgctagacgcaaccccggggtggtgatttatgttaattccagaccatgttgcgttccccgggtggtagccgagtacctcaatggcgctgtgcgtgaagaatccatccattgtaaaagcgtggaggagatctcgacactggtccagaagctggctgaccagagtgggcttgacgtcattagaatccgcaagccttttcacacagacaaccccagtatccagggacagtggcatccattcactaataagccaacaacctttaggggtcttcgcccccgagaggtccaggaccccgcacccgctcagtgcttgctcttaggggcagtgactttgtag

SEQ ID NO: 195357 - DNA, 480 bp, synthetic construct
  misc_feature 1..480: note = Description of Artificial Sequence: Synthetic coding sequence
  source 1..480: mol_type = other DNA
atgaccgcccggggcacccccagccggttcctggccagcgtgctgcacaatggattgggtaggtacgttcagcagttgcagcggctcagtttctctgtttctcgtgacggcgcgtcaagcagaggcgcgcgcgagtttgtggagcgagaagttatcgactttgccaggcggaacccaggggtggtgatctacgtgaacagccggccatgctgcgttcctcgcgtggttgctgagtacctgaacggggccgttagagaggaatcgattcattgcaagagcgtcgaggaaatctccacactcgtgcagaaactggccgaccagagtggcttggacgtgattaggatccgtaagccttttcacaccgacaacccctcaattcaggggcagtggcacccctttaccaataaaccaacaacttttagaggccttagaccacgggaggttcaggatccagctcccgctcaggtgcaggctcagtag

SEQ ID NO: 195358 - DNA, 555 bp, synthetic construct
  misc_feature 1..555: note = Description of Artificial Sequence: Synthetic coding sequence
  source 1..555: mol_type = other DNA
atgaccgcccggggcacccccagccggttcctggccagcgtgctgcataatggcctgggacggtatgtgcagcagctgcagcggctgagtttcagcgtgagccgggatggtgcttcaagcaggggcgctcgggagttcgtagaaagagaagtgatcgattttgcgcgccgaaatccaggcgtggtgatttatgtgaacagccgaccttgttgtgtcccaagggtggtggctgaatacctgaatggagctgtgcgtgaagagtcgatacactgcaagtccgtggaagagatttcgaccctggtgcagaaactggccgatcagtctggtctcgacgtcatcagaattcgaaaaccgttccacacagataatccaagcattcaggggcagtggcatccatttactaacaaacccaccacttttcgcgggctcagacccagagaggtgcaggaccccgcaccagcacaagacacaggcctacgcctgagtgcagtggctccccaaattctgctgcccggttggcccgacccgactagggcgacccgggctactcgttag

SEQ ID NO: 195359 - DNA, 786 bp, synthetic construct
  misc_feature 1..786: note = Description of Artificial Sequence: Synthetic coding sequence
  source 1..786: mol_type = other DNA
atgaccgcccggggcacccccagccggttcctggccagcgtgctgcacaacgggcttggacgctatgtacagcagctgcaaaggctgtctttctccgtgagccgagacggagcctcttctagaggggctagagaattcgtcgagcgagaagtcattgattttgcgaggcggaatccaggggttgtgatttatgttaacagccggccgtgctgtgttccccgggtagtcgctgaatatctgaatggcgctgtgcgcgaggagtccatccactgcaagtccgtcgaagagatctccacactggtccagaagctcgctgaccaaagcggactcgacgtgattaggattcgcaaaccgttccacactgacaatccatcaatccaaggacagtggcaccccttcaccaacaagcctacgacattccggggactcaggcccagagaagtccaggaccctgcccctgcccaagacgcagccgaatttctaggagaaggcgccggcccttgctggtatagtattgtggcgctcccccagaaacacattgccatcgccattcaccctccacagcccgcagggcaatgccaccaggctattggacattggccggagaccgtttgttcctgtactgctgatccccccgccagactagcaaggccaacccggcctccccattctggatcatacttgatactgatcgacctgtgtagttcaccctacgccgtgcggagttttttacctcccgattgcccgtgtaccgatcattgcgtactgagtgtgaaagccgcatag

SEQ ID NO: 195360 - DNA, 510 bp, synthetic construct
  misc_feature 1..510: note = Description of Artificial Sequence: Synthetic coding sequence
  source 1..510: mol_type = other DNA
tgaggcacccccagccggttcctggccagcgtgctgcacaacggcttgggacggtatgtccagcaactgcaaagactgagcttttcagtgtcccgcgacggcgccagtagtcggggcgccagagagttcgtcgagcgtgaggtgattgattttgcgagacgtaaccccggggttgtcatctacgtgaacagcaggccatgttgtgtacccagggtggtggctgagtatcttaatggcgcagtgagagaggaatctatccattgtaagtccgtcgaggagatttccacactggtgcagaaattagccgatcagagtggtcttgacgtgatcagaatccggaagccgtttcataccgacaatccctctattcaagggcagtggcaccccttcacaaataaaccaactacctttagagggctgagaccacgtgaggtccaggaccccgctcccgcccaggatgccgccgagtttctgggggagggggccggcccgtgctggactctggcatag

SEQ ID NO: 195361 - DNA, 999 bp, synthetic construct
  misc_feature 1..999: note = Description of Artificial Sequence: Synthetic coding sequence
  source 1..999: mol_type = other DNA
atggccagcggcctggtgcggctgctgcagcagggccaccggtgcctcctcgcaccagtggccccaaaacttgtaccacccgtgagaggcgtgaaaaagggattcagagcggcatttcggttccaaaaagaactggagcgacagcgtctgctacggtgccctcctccaccagtcagaagatcagaaaaaccaaattgggattatcacgcagagatccaagcatttgggcacaggttgcaagaaaacttcagcctcgacctacttaaaacggcctttgtcaattcatgttacatcaagtccgaagaagctaaaaggcagcaattaggcattgagaaagaagctgttctcctgaacttgaaatcgaaccaggaactcagcgaacaaggcaccagtttttcgcagacttgtctcacccaattcttagaggacgaataccccgacatgccaaccgagggaattaaaaatctggtagattttctgactggggaagaagtggtgtgtcatgtggctcgcaacctggctgtagaacaacttaccctgtccgaggaattcccagtgccccctgctgtgttgcagcagacgttttttgccgtaatcggagctctgttacagtcctccggaccagaacgtaccgcgctgtttattagggacttcctcattactcagatgaccgggaaggaactgtttgagatgtggaagataatcaatcccatgggtctccttgttgaggaacttaagaaaagaaatgttagtgctcccgagagtcggctcactcgccagagtggaggcacaaccgcgctgcctctctacttcgtcgggctttactgtgacaagaaactgatagccgagggacctggagagactgtccttgttgccgaggaagaagccgctcgtgttgccttgcgcaaactctacggcttcacagaaaacagaaggccttggaattattctaagcccaaagaaaccctgcgagcggaaaaatctatcaccgcatcgtag

SEQ ID NO: 195362 - DNA, 921 bp, synthetic construct
  misc_feature 1..921: note = Description of Artificial Sequence: Synthetic coding sequence
  source 1..921: mol_type = other DNA
atggccgcccccatcccccagggcttcagctgcctgagccggttccttggatggtggttcaggcagccggtgttggtgacacaatcagctgccatcgtccctgtgaggacaaagaaacgatttacccccccgatataccagccgaaatttaagactgaaaaagagtttatgcaacacgcacgaaaggctgggctcgtcattcctccagagaagagcgatcgatcaatccacctggcatgtacggcaggcatttttgatgcctatgtgccccccgaaggcgatgcgaggatcagttccctgtccaaggaaggactgattgagagaacagaacgcatgaagaagactatggccagccaagtgtcaatcagacggattaaagattacgacgcaaatttcaaaatcaaagacttcccagagaaagcgaaggatatttttatagaagcccacttgtgcctgaacaacagcgaccacgacaggcttcacacactagttactgagcactgtttccccgatatgacatgggatatcaagtataaaaccgttagatggagcttcgtggaatcacttgaaccaagtcacgttgttcaggttagatgttccagcatgatgaatcaaggcaacgtttatggacagattaccgtgcggatgcatacacggcaaacactggccatttatgatagattcggccggctgatgtacggccaagaagatgtgccaaaggacgtgctcgagtatgtggtgtttgaaaagcaactgacaaacccctacggctcctggagaatgcataccaaaatcgtgccaccctgggctccacctaagcagccgatcttgaagactgtcatgattccggggccccagctgaagcccgaggaggagtacgaggaggcccaaggcgaggctcagaaaccacagctagcctag

SEQ ID NO: 195363 - DNA, 693 bp, synthetic construct
  misc_feature 1..693: note = Description of Artificial Sequence: Synthetic coding sequence
  source 1..693: mol_type = other DNA
atggccgccgccggcctggccctgctgtgccggcgggtgagcagcgccctgaaatcaagcaggagtcttattacccctcaagtcccagcttgcacaggacttctgcacactacgctgagtagaaaaggcctcgaagagttctttgacgatcccaagaattggggtcaagagaaagtaaagagtggcgccgcctggacgtgtcagcagttgagaaacaagagtaacgaagacttacacaagctttggtatgtgctcctcaaggaacggaacatgctgttgaccttggaacaggaggccaaaaggcagcgactgccaatgccttcaccagagagactggataaagtggtcgattccatggacgcactcgataaggtggtccaggaacgtgaagacgcccttcggctactgcaaacaggacaggaaagggcccgccccggcgcttggcgccgggatatttttggaagaattatctggcacaagttcaaacagtgggttattccatggcatttgaacaaacggtataatagaaaaaggttctttgccctgccttacgtggaccacttcttacgacttgaacgcgagaaaagagccaggataaaggcaagaaaggaaaatcttgagcgcaagaaagctaagattcttctgaaaaaattcccccatctggccgaggctcagaagtcctctttagtttag

SEQ ID NO: 195364 - DNA, 423 bp, synthetic construct
  misc_feature 1..423: note = Description of Artificial Sequence: Synthetic coding sequence
  source 1..423: mol_type = other DNA
atgctgctgaccctggagcaggaggccaagcggcagcggctgcccatgccttcccctgagagattagacaaagtggtggactctatggacgcgctggataaggtcgttcaggaacgcgaggacgctttacggttattacagaccgggcaagagcgcgccagaccaggcgcgtggcggcgcgatatttttgggagaatcatttggcacaaatttaaacagtgggtgataccttggcacctgaataagagatataacagaaagcggttctttgctctgccatatgtggatcactttctgcgcctggaaagagagaagcgcgcccgcattaaggctcgcaaggaaaatctggaacggaaaaaggctaagatcctgttaaaaaagttccctcacctcgctgaggcccagaaaagttccctggtctag

SEQ ID NO: 195365 - DNA, 753 bp, synthetic construct
  misc_feature 1..753: note = Description of Artificial Sequence: Synthetic coding sequence
  source 1..753: mol_type = other DNA
atggccgccgccggcctggccctgctgtgccggcgggtgagcagcgctctgaaaagtagtagatcactcatcacgccacaggtgccagcctgcacagggttctttctgtctttactgcctaagtccaccccaaacgtcacctcatttcaccagtatcgcctattgcacactactctgagccgtaaggggctggaagaattttttgatgatccaaagaactgggggcaggaaaaggtgaagtcgggcgctgcctggacctgtcaacagctgagaaataagagcaatgaggatcttcataagctctggtacgtgttgctcaaagagcgcaatatgttactgaccctggagcaggaggccaagcggcaacgactccccatgccttcacccgaaaggctagataaagtggtcgatagtatggatgccctggacaaggtggttcaagagagggaggatgccttgagactgcttcagaccggtcaggaacgggccaggcctggggcctggcgccgcgacatctttggacgaatcatttggcacaaatttaaacagtgggttattccttggcatctgaataaacgctacaatcgaaagcggttctttgctctgccctacgtcgaccattttttgaggctggaacgcgagaagagggctcggatcaaggctaggaaggagaaccttgagcggaagaaggcaaagattctcctgaagaaatttccgcacctggctgaggcacagaaaagtagtctagtttag

SEQ ID NO: 195366 - DNA, 639 bp, synthetic construct
  misc_feature 1..639: note = Description of Artificial Sequence: Synthetic coding sequence
  source 1..639: mol_type = other DNA
atgagcggcaccctggagaaggtgctgtgcctgcggaacaacaccattttcaaacaggctttttctctgttaagattcagaacctccggtgaaaaacctatctacagcgtgggaggcatcttactgtccatatccagaccatacaagacaaaaccgacccatgggatcgggaagtataagcacctgatcaaggcagaggaaccgaaaaaaaagaagggcaaggttgaggtccgagcaattaacttaggaacagactacgagtatggtgtgctgaacatccacttaacagcatatgacatgactctcgctgagtcgtacgcacagtacgttcacaatctctgcaattcactctccatcaaagttgaggagtcctacgctatgccaactaagactattgaagtcctacagctgcaggaccagggcagtaagatgctcttggatagcgtattgacaacgcacgagcgcgtggttcagatttccggcttgtccgccaccttcgctgaaatttttctggaaatcatacagtcatcgctgcccgagggtgtccgactttccgtaaaggaacacaccgaggaggacttcaaagggcgctttaaggcccgccccgagcttgaggagctactggctaagctgaagtag

SEQ ID NO: 195367 - DNA, 585 bp, synthetic construct
  misc_feature 1..585: note = Description of Artificial Sequence: Synthetic coding sequence
  source 1..585: mol_type = other DNA
atgggcctgagcagctgccggaagaccagcagcggcctgcccctgattttgcattatggcgggatcctattgtccatctctagaccttataaaacaaagccaactcatgggataggcaaatataagcatctaatcaaggctgaggaacccaagaaaaaaaagggcaaggttgaggtgcgggctatcaatcttggaactgattatgagtatggtgtactgaacatacaccttaccgcatatgacatgacgcttgcggaatcctacgctcagtacgtgcacaacctgtgcaacagcctctcgattaaagtggaggagtcctatgctatgcctacaaagactattgaggttctgcagctgcaagatcaggggtccaagatgctcctcgactcagtgctgacaacacatgaacgtgttgtgcaaatctccggcctgagcgccacattcgcggaaatttttttggaaatcatacagtccagcctacccgagggcgtccgtctctccgttaaagagcacacagaggaggacttcaagggtaggttcaaagcacgcccagagctagaggagttgctcgcaaaactcaaatag

SEQ ID NO: 195368 - DNA, 501 bp, synthetic construct
  misc_feature 1..501: note = Description of Artificial Sequence: Synthetic coding sequence
  source 1..501: mol_type = other DNA
atggccgccaccatgttccgggccaccctgcggggctggcggaccggtgttcagagagggtgcggtctccgcttattgagtcaaacacagggacccccagattacccccggtttgtggaaagtgttgatgagtatcagtttgtggaaagattgctccccgcaactcgcattccggaccccccaaagcatgaacactatcccaccccttccggatggcagccccctagggacccacctcctaatttgccttatttcgtacgccgaagccggatgcacaatatcccagtctataaggatattactcacgggaaccgccagatgactgtgatacgcaaagtagaaggagatatctgggccctgcagaaagatgtggaagatttcctaagtccactgttggggaagactcccgtgacgcaggtcaacgaggtgacgggaacacttcggattaaggggtatttcgaccaggagctgaaagcatggctcctagaaaaaggcttctag

SEQ ID NO: 195369 - DNA, 501 bp, synthetic construct
  misc_feature 1..501: note = Description of Artificial Sequence: Synthetic coding sequence
  source 1..501: mol_type = other DNA
atggccgccaccatgttccgggccaccctgcggggctggcggaccggcgtacagcggggctgtgggcttagactgctatcccagacacagggccctccagactacccccgcttcgtggagagtgtcgatgagtaccagttcgtcgagcggttactgcctgccacaagaattccagacccccccaaacacgagcattatccgacaccctctggatggcagcctcccagggatccaccgcccaacctcccttacttcgtgcggaggagccgcatgcacaacattcctgtttacaaggatattacacacggcaatcgtcagatgacagtcatccgtaaggttgagggggacatttgggctctccaaaaggacgtggaggactttctaagccctctgctcgggaagacacctgtgacacaggtcaatgaagtaactggcacgttaagaattaaaggctatttcgatcaagaactaaaagcatggctactggagaagggcttctag

SEQ ID NO: 195370 - DNA, 477 bp, synthetic construct
  misc_feature 1..477: note = Description of Artificial Sequence: Synthetic coding sequence
  source 1..477: mol_type = other DNA
atggccgcccggagcgtgagcggcatcacccggcgggtgttcatgtggaccgtttcagggacaccctgtcgcgagttttggtcacgatttcgaaaggagaaggaacccgttgtcgttgagacagtggaggaaaaaaaagaacccatcctagtgtgccctccactgcgaagtcgcgcctataccccgcctgaggacttgcagtcccgtttggagtcatatgtaaaagaggtttttgggtcctccttgccttccaactggcaagacattagcctagaggactctaggttgaagtttaacctgctggctcacctcgcggatgacctcggtcatgtggtaccaaactcgcgtctgcatcaaatgtgtcgtgtcagggacgtgctcgatttttataatgttcccattcaggatagatccaagttcgacgaactgtcagcctccaacttgccacctaacctcaagatcacttggtcatattag

SEQ ID NO: 195371 - DNA, 408 bp, synthetic construct
  misc_feature 1..408: note = Description of Artificial Sequence: Synthetic coding sequence
  source 1..408: mol_type = other DNA
atggccgcccggagcgtgagcggcatcacccggcgggtgttcatgtggaccgtgagcggtaccccttgtcgcgaattttggtcaagatttcggaaggagaaggaacccgtcgtggtcgagaccgtggaggagaagaaggagcccatactggtttgccctccactccgatcaagagcctatactccaccagaagacctgcaaagccgactggaaagctatgttaaggaggtgttcgggagttccctacctagtaattggcaagatatttccttagaagacagtagactaaaattcaaccttctagctcacctggcagacgatttaggccatgtggtgccaaacagtagattgcatcagatgtgcagaggatatagctttgaggaaggcaagattcaactcggcatctag

SEQ ID NO: 195372 - DNA, 1146 bp, synthetic construct
  misc_feature 1..1146: note = Description of Artificial Sequence: Synthetic coding sequence
  source 1..1146: mol_type = other DNA
atggccagccccagcctggagcggcccgagaagggcgccggcaagtcagagtttaggaaccagaaacccaaacctgaaaatcaggacgaatcggagctcttgactgtccccgacggatggaaggagccggcttttagtaaggaagataacccccggggccttcttgaggaatcatcgttcgccaccctttttccaaagtacagggaagcatatttaaaggagtgctggcctttagtgcagaaggccctaaacgaacatcacgttaatgcgaccctggacctcatcgaaggctctatgaccgtgtgcacaacaaagaagacttttgacccttatatcatcattcgcgcccgtgacctcatcaaactgctcgccaggtctgtgtcgtttgagcaggcagtccgcatcctgcaggacgacgtagcttgtgacatcataaaaattgggtctttagtccgtaacaaagagcggtttgtgaagcgcagacaaagactgatcgggccaaaaggcagcacactcaaggctctcgagctcctcaccaattgttacattatggtccaagggaacacggtttcagccattgggcccttcagcggactcaaggaagtgaggaaagtcgtcttggacacaatgaagaatattcaccccatttacaatatcaagagcttgatgattaagcgggagctggccaaggactctgaactcaggtcacagtcttgggaaaggttcttacctcagttcaagcacaaaaacgtaaataagaggaaggaacccaagaaaaaaactgtgaaaaaagaatacacacctttcccccccccccagccagaatcgcagattgataaggagctggcgtctggcgagtacttcctgaaggccaatcagaagaaacgccagaagatggaagctataaaggctaagcaagctgaggcaatcagcaaaaggcaagaggagagaaacaaagcgttcattccgcctaaagagaagcctattgtgaagcccaaggaggcctcaaccgagacaaaaattgatgttgccagcataaaagaaaaggtgaagaaggccaagaataaaaagctaggggccctcacagcagaggagattgcccttaagatggaggccgatgagaaaaagaagaagaagaaaaaatag

SEQ ID NO: 195373 - DNA, 372 bp, synthetic construct
  misc_feature 1..372: note = Description of Artificial Sequence: Synthetic coding sequence
  source 1..372: mol_type = other DNA
atggccgccctgggcaccgtgctgttcaccggcgtgcggcggctgcactgctccgtggcagcttgggcaggcgggcaatggaggttgcagcagggtctggccgctaacccgtccggctacggaccactgacagaattacctgattggagttacgccgatggtaggcctgctccaccaatgaagggacagctgcggcgcaaggccgagcgcgaaacttttgccagacgagtcgttctcctatcacaggagatggatgctggcctgcaagcatggcagctaagacagcagaagctccaggaagagcagcgtaaacaggagaacgctctgaaaccaaagggcgccagcctcaagtcaccactgccttctcaatag

SEQ ID NO: 195374 - DNA, 369 bp, synthetic construct
  misc_feature 1..369: note = Description of Artificial Sequence: Synthetic coding sequence
  source 1..369: mol_type = other DNA
atggccgccctgggcaccgtgctgttcagcgtgcggcggctgcactgttcagtggccgcctgggcagggggtcagtggcgattgcagcaggggttggcagcgaacccttcaggatacgggccactcaccgagctccctgattggtcctacgccgacggccggccagcccctcccatgaagggacaattgcgccgtaaggctgagagagaaaccttcgccaggagggtggtgcttttatcccaggagatggacgccggtctacaggcttggcaattgaggcagcagaaactgcaggaagagcagcggaagcaggagaacgcattaaaaccgaagggggcatcacttaagagccccctgcctagtcagtag

SEQ ID NO: 195375 - DNA, 264 bp, synthetic construct
  misc_feature 1..264: note = Description of Artificial Sequence: Synthetic coding sequence
  source 1..264: mol_type = other DNA
atggccgccctgggcaccgtgctgttcaccggcgtgcggcggctgcactgctccgtggctgcctgggcagggggccagtggcgcctacagcaaggcttagccgcaaacccctccggttacggccctctgacagaacttccagactggagttacgccgagacatcctgcactgcagtgaccggaaatggccgctggattacctctatggccgcccaggcagccgaggtcgctggccgcactaaggaagctggtaagtgtagctag

SEQ ID NO: 195376 - DNA, 195 bp, synthetic construct
  misc_feature 1..195: note = Description of Artificial Sequence: Synthetic coding sequence
  source 1..195: mol_type = other DNA
atgaagggccagctgcggcggaaggccgagcgggagaccttcgcccgccgagtagttttacttagtcaggagatggacgccgggctgcaggcttggcagctcagacagcagaaacttcaggaggagcaaagaaaacaagagaacgccctcaagccaaagggggcttcactgaagtcacccctcccctcacaatag

SEQ ID NO: 195377 - DNA, 195 bp, synthetic construct
  misc_feature 1..195: note = Description of Artificial Sequence: Synthetic coding sequence
  source 1..195: mol_type = other DNA
atgaagggccagctgcggcggaaggccgagcgggagaccttcgcccgccgggttgtcctgctgtcccaggagatggacgccgggctgcaggcctggcagttgagacagcaaaaattacaggaggaacagaggaagcaggagaatgctctcaaaccaaagggagccagcctaaagtccccactgcctagccagtag

SEQ ID NO: 195378 - DNA, 195 bp, synthetic construct
  misc_feature 1..195: note = Description of Artificial Sequence: Synthetic coding sequence
  source 1..195: mol_type = other DNA
atgaagggccagctgcggcggaaggccgagcgggagaccttcgccagaagagtggtgttactgagccaggagatggacgcaggactgcaggcctggcaattgaggcagcagaagctccaagaagagcagagaaagcaagaaaatgccctgaaaccaaagggggcaagccttaagtcacctctgcctagccagtag

SEQ ID NO: 195379 - DNA, 339 bp, synthetic construct
  misc_feature 1..339: note = Description of Artificial Sequence: Synthetic coding sequence
  source 1..339: mol_type = other DNA
atggccgccgccctggcccggctgggcctgcggcccgtgaagcaggtccgggtccaattctgcccatttgagaaaaacgttgagtccacccggacgtttctgcaaactgtgtcttcagagaaagtgcgttctaccaacttaaattgcagcgtcattgcggatgtccgacatgatggatctgagccatgtgtcgatgttttattcggcgatggtcacaggctgatcatgcgcggcgcccatcttactgcgctcgaaatgctgaccgccttcgctagccacatacgggctagagacgccgcaggaagcggcgataaaccaggcgcagacacagggcgctag

SEQ ID NO: 195380 - DNA, 417 bp, synthetic construct
  misc_feature 1..417: note = Description of Artificial Sequence: Synthetic coding sequence
  source 1..417: mol_type = other DNA
atggccaccaagcggctgttcggcgccacccggacctgggccggctggggtgcctgggagttgctcaatcctgcgacctccggcaggttgttggccagggattatgctaagaagcctgtgatgaagggggcgaagtccggcaaaggagctgtcacgtcggaagccctcaaagatcccgacgtatgtacagaccctgtacagttgacgacatatgccatgggtgtaaacatctataaggaaggacaggatgttcccctgaagccagacgcagagtacccagagtggctgttcgagatgaatttgggcccccccaagactctggaagagctggaccccgaaagccgtgaatattggcgcaggcttcgcaagcagaatatctggagacacaacagactgagtaagaataagaggctatag

SEQ ID NO: 195381 - DNA, 387 bp, synthetic construct
  misc_feature 1..387: note = Description of Artificial Sequence: Synthetic coding sequence
  source 1..387: mol_type = other DNA
atggccgccgtgggcagcctgctgggccggctgcggcagagcaccgtaaaggccactggccccgcccttaggaggcttcacacctcctcttggcgagcagattcatccagggccagtctgactcgggtgcaccgtcaggcctatgctaggctctatccagtgctcctggtgaagcaggatggttccactattcatataaggtacagagagcccagacgaatgttagcaatgcctattgacctggatactctgtccccggaagaacgccgtgccaggcttaggaagagagaggctcagctccagtctaggaaagagtacgagcaggaactgtcagatgacttgcatgtggagcggtatagacagttttggacccggacaaagaagtag

SEQ ID NO: 195382 - DNA, 387 bp, synthetic construct
  misc_feature 1..387: note = Description of Artificial Sequence: Synthetic coding sequence
  source 1..387: mol_type = other DNA
atggccgccgtgggcagcctgctgggccggctgcggcagagcaccgttaaagccacaggccccgctctgaggagacttcatacctcttcctggcgggccgactccagcagggccagtctgacaagagttcacaggcaggcatacgccagactttatccggtactactcgtaaaacaggacggttcaactatacatatccgttaccgcgaacctaggcggatgctggccatgcccattgacctggacacactctctcccgaggagagacgagcaaggttaaggaaacgggaagcccaacttcaatccaggaaggagtacgaacaagagctatccgacgaccttcacgtcgaaaggtacagacagttttggacacggacaaagaaatag

SEQ ID NO: 195383 - DNA, 387 bp, synthetic construct
  misc_feature 1..387: note = Description of Artificial Sequence: Synthetic coding sequence
  source 1..387: mol_type = other DNA
atggccgccgtgggcagcctgctgggccggctgcggcagagcaccgtgaaggcaacaggcccggccttgcgccgattgcatacctcttcttggcgggcagactccagtagggccagtttgacccgggtgcacaggcaggcttacgccaggctatatccagtgctgttggttaagcaagatggatctacaattcacatccggtacagggaaccccgcaggatgctggcgatgcctatagatcttgacaccctctcgcctgaagaacgccgggcccggctaagaaagagagaggcccaactgcaatccaggaaagagtacgagcaggaactgagcgatgacctgcacgtggaacggtacaggcagttttggacgagaaccaaaaaatag

SEQ ID NO: 195384 - DNA, 387 bp, synthetic construct
  misc_feature 1..387: note = Description of Artificial Sequence: Synthetic coding sequence
  source 1..387: mol_type = other DNA
atggccgccgtgggcagcctgctgggccggctgcggcagagcaccgtcaaagcaactggacctgccctccggaggctgcacacttcttcatggagagccgattcaagtcgtgcctctcttactagagtccacaggcaggcttacgccagactgtaccccgtgctccttgtgaaacaggatggaagcaccatacacatacgctatcgtgaacctagacgcatgctagccatgcctatagatctagataccctgtcaccggaggaaaggagagcacgcctgagaaaacgggaggctcagcttcaatcaagaaaagagtatgagcaggaattgagcgacgatttgcacgtagagagatacagacagttctggacacgcacaaagaaatag

SEQ ID NO: 195385 - DNA, 495 bp, synthetic construct
  misc_feature 1..495: note = Description of Artificial Sequence: Synthetic coding sequence
  source 1..495: mol_type = other DNA
atggccgccgtgggcagcctgctgggcctggccgccagcagctggctcggcgggcagaacgcatcagatcacagtctctggctgctgcgcaagccgcgggggtcctcctgccctgggaccggtcatcagctgtgcaggctgaggcagagcacagtaaaagcaacgggcccagctttaaggagactgcacacaagcagttggagagccgacagctcccgggcctctttgacccgcgtgcatcgtcaagcatacgcccgcctctaccccgtgctgctcgtgaaacaggatgggagcaccatccacattcggtacagggaaccaagacgcatgctcgcaatgcccatcgatctggatacactctcacctgaagagcgccgagcccgactcaggaagagagaggctcagctgcagagtagaaaggagtacgaacaggaactgtcagatgaccttcacgtggaaagataccggcagttctggacgagaaccaagaaatag

SEQ ID NO: 195386 - DNA, 378 bp, synthetic construct
  misc_feature 1..378: note = Description of Artificial Sequence: Synthetic coding sequence
  source 1..378: mol_type = other DNA
atggccgccgtgggcagcctgctgggccagagcaccgtgaaggccacagggcccgctctaagaaggctacacacgagttcctggcgcgctgactcctcaagagctagtctgacacgcgtacaccgccaagcatatgctcggctgtatcccgtcctgctggtaaaacaggacggatcaacgatccacataaggtatagggagccccgacgcatgctggccatgcctatcgatctggacaccctctctccagaagaacgccgcgccaggctgcgtaagcgggaggcacagttgcagagccggaaggagtatgagcaagagctgtctgacgacctgcatgttgagagatatcggcaattctggacaagaaccaagaagtag

SEQ ID NO: 195387 - DNA, 387 bp, synthetic construct
  misc_feature 1..387: note = Description of Artificial Sequence: Synthetic coding sequence
  source 1..387: mol_type = other DNA
atggccgccgtgggcagcctgctgggccggctgcggcagagcaccgtcaaagctactggccctgcattgagacggttgcataccagctcatggagagctgatagctcccgggcctcgctcacacgggtccaccggcaggcgtatgcccggctgtaccccgttttgctggtgaagcaagacggcagcaccatacatataaggtaccgcgagccacgaaggatgcttgccatgcctatcgatctggatactttgagccccgaggaacggcgagcccggctcaggaagagagaagcccagctgcaatcccgcaaagagtatgagcaagagctctccgacgacctacatgtcgaaagataccgacagttctggacccgtactaagaagtag

SEQ ID NO: 195388 - DNA, 387 bp, synthetic construct
  misc_feature 1..387: note = Description of Artificial Sequence: Synthetic coding sequence
  source 1..387: mol_type = other DNA
atggccgccgtgggcagcctgctgggccggctgcggcagagcaccgtcaaggcgaccggaccagccctccgccggttgcacacttcttcctggcgcgccgacagcagtagggcttcactaaccagagtgcacaggcaggcttacgcaagactgtatcctgtcctactggtgaaacaggacggttcaactatccatataagatatagggaacctagacgcatgctggccatgccaatcgatctggacacgctgagccctgaagagcgacgagccagattacgaaagagagaagcccagctgcaaagccgaaaagagtatgaacaggagctttcagatgatctccatgtggagaggtacaggcagttctggaccaggacaaagaagtag

SEQ ID NO: 195389 - DNA, 387 bp, synthetic construct
  misc_feature 1..387: note = Description of Artificial Sequence: Synthetic coding sequence
  source 1..387: mol_type = other DNA
atggccgccgtgggcagcctgctgggccggctgcggcagagcaccgtgaaggccacgggacccgctttaaggcgcctgcacacaagctcatggcgggccgacagcagcagagcgtcactgacgagagtccaccggcaagcgtacgcacgactgtatcctgttctgctggtgaaacaggacggcagcactatccacattcgatacagggagccccgccgaatgcttgccatgcctattgaccttgatacactcagccctgaagaaagaagagcccgacttaggaaacgtgaagcccagctccagtctcgcaaggaatacgaacaggaactgtccgacgacttgcatgtcgagcgctatcgccaattttggactcgcaccaagaaatag

SEQ ID NO: 195390 - DNA, 387 bp, synthetic construct
  misc_feature 1..387: note = Description of Artificial Sequence: Synthetic coding sequence
  source 1..387: mol_type = other DNA
atggccgccgtgggcagcctgctgggccggctgcggcagagcaccgtgaaagctacagggcccgccctgagacgtttgcacacgtcaagttggagggccgactctagtcgtgcctccctcacaagggtgcaccgtcaagcgtatgcaagattgtacccagttcttctagtcaaacaggatggatctactattcacattcggtatcgtgagccccggaggatgctcgccatgcctatcgatctggacacactttcaccggaagaacgcagggcaaggctgcgcaaacgcgaggcccaactgcagtccaggaaggaatatgagcaggaactctccgacgacctccatgttgaaagataccggcaattttggacgagaacaaaaaaatag

SEQ ID NO: 195391 - DNA, 495 bp, synthetic construct
  misc_feature 1..495: note = Description of Artificial Sequence: Synthetic coding sequence
  source 1..495: mol_type = other DNA
atggccgccgtgggcagcctgctgggcctggccgccagcagctggctggggggtcagaatgcctccgatcacagcctctggctgcttagaaagcctaggggatctagttgccctggcacagggcaccagctctgtaggctcagacaatccacagtgaaggctacaggcccagcactgcgcaggctgcacacatccagctggcgtgccgattcatcacgggccagcctgacgagggtgcatagacaggcctatgctcggctctatccagtgcttctggtgaagcaggacgggtccactattcatatcagatatcgcgaaccgagacggatgttagccatgccaatcgacctggacacactgagtcccgaagaacgtcgcgctaggctgcgaaaaagagaggcgcagttgcaaagtcgcaaggagtatgagcaggaactgtctgatgacttgcacgtagaacggtataggcagttctggacgaggactaaaaaatag

SEQ ID NO: 195392 - DNA, 387 bp, synthetic construct
  misc_feature 1..387: note = Description of Artificial Sequence: Synthetic coding sequence
  source 1..387: mol_type = other DNA
atggccgccgtgggcagcctgctgggccggctgcggcagagcaccgtcaaggccacaggccctgctcttcggaggctgcacacatcgtcttggagagctgactcgtcgagggctagtctgacaagggtgcatcggcaagcttacgcccggttgtatcctgtgttactggtcaagcaggatggctcaaccatacatattcgctacagggagcctcgacggatgttagccatgccgatagacctggacacactgtctcctgaggaacgtcgcgcgcgattgcggaagcgcgaggcccagctgcagtccagaaaagaatacgagcaggagctgtcagatgacttgcacgtggagcgatataggcagttttggactcgaacaaagaagtag

SEQ ID NO: 195393 - DNA, 387 bp, synthetic construct
  misc_feature 1..387: note = Description of Artificial Sequence: Synthetic coding sequence
  source 1..387: mol_type = other DNA
atggccgccgtgggcagcctgctgggccggctgcggcagagcaccgtgaaagctacaggaccagcccttaggcgccttcatacatcatcgtggcgagctgactcttctagggcctccctgacgagagtgcaccggcaagcctacgcgcgtctgtatccggtcctgctcgtgaagcaagacggatctacaatccacatccgctaccgagagccacgccggatgctagccatgcctatagatttggacaccctgagccctgaggagcgcagggcccgcctccgaaagcgggaggctcaactgcagagtcgcaaggagtacgagcaggaactctcagatgacttacacgtggaacggtacagacaattctggaccagaactaaaaagtag

SEQ ID NO: 195394 - DNA, 387 bp, synthetic construct
  misc_feature 1..387: note = Description of Artificial Sequence: Synthetic coding sequence
  source 1..387: mol_type = other DNA
atggccgccgtgggcagcctgctgggccggctgcggcagagcaccgttaaggccaccggccccgcattgaggcggctccatacatcctcttggcgggccgactcttcccgtgcttctctcacaagggtgcaccgacaggcctacgctcgactgtatccagtcctgctggttaagcaggatggttctaccattcacattagataccgggagcctcgacgcatgttggctatgccgatcgatcttgataccctttctcccgaagagcggagggccaggttaagaaagagggaagcccagctgcagagcagaaaggagtacgaacaggaactctcagacgacctgcatgtggagaggtatcgacaattctggaccaggaccaaaaagtag

SEQ ID NO: 195395 - DNA, 387 bp, synthetic construct
  misc_feature 1..387: note = Description of Artificial Sequence: Synthetic coding sequence
  source 1..387: mol_type = other DNA
atggccgccgtgggcagcctgctgggccggctgcggcagagcaccgtgaaagccaccgggccagccctgaggcgcctccatacgagcagctggcgggctgactcttctcgcgcatccctgacccgagtccaccgccaggcctatgcaagactgtacccagtgcttttagtgaagcaggacggatccacaatacatattcgctacagggagcctcgacgcatgttggccatgcctatagacttggacaccctatcccccgaagaacgacgcgctcgtctccgaaagagagaggcacaactccagtctagaaaggaatacgagcaggagctgtccgacgacctgcatgtggagcgctacagacagttttggaccaggaccaaaaagtag

SEQ ID NO: 195396 - DNA, 387 bp, synthetic construct
  misc_feature 1..387: note = Description of Artificial Sequence: Synthetic coding sequence
  source 1..387: mol_type = other DNA
atggccgccgtgggcagcctgctgggccggctgcggcagagcaccgtaaaggccaccggccccgcccttagacgattgcatacgtcgagctggagggccgatagctcccgcgcatccctgacacgggtacatcgccaggcctatgctaggctttaccctgtgctcctggtcaagcaagatgggtctacgattcacattcgatatagggagccccggaggatgttggccatgcccattgatctggatactttatcaccagaggaaagaagggctcgactgcggaagagagaggcacagttgcagtcaaggaaagaatacgagcaggagctgtctgacgacttgcacgtggaaaggtacaggcagttctggacaagaaccaagaagtag

SEQ ID NO: 195397 - DNA, 387 bp, synthetic construct
  misc_feature 1..387: note = Description of Artificial Sequence: Synthetic coding sequence
  source 1..387: mol_type = other DNA
atggccgccgtgggcagcctgctgggccggctgcggcagagcaccgtcaaagcaactggacctgctcttcggcgtcttcatacatcaagttggcgggctgactcatctcgggcctctctaaccagagtccatcgccaagcctacgccaggctgtatcccgtacttctggttaagcaggacgggagcaccatccacatccgctaccgtgaaccccgacgtatgttggcaatgcctatcgatctagataccctgagtcctgaagaaaggagggcgcgactgaggaagagagaggcacagctccagagcaggaaggaatacgagcaggagcttagtgatgacctacatgtagagagataccgtcagttctggactaggaccaagaaatag

SEQ ID NO: 195398 - DNA, 387 bp, synthetic construct
  misc_feature 1..387: note = Description of Artificial Sequence: Synthetic coding sequence
  source 1..387: mol_type = other DNA
atggccgccgtgggcagcctgctgggccggctgcggcagagcaccgtgaaagctacaggtcccgccctgagacggctccacacaagcagttggcgcgccgactcgtcacgcgcgagcctaactcgagtgcacaggcaagcctacgctagattgtatcctgtcctcctcgtgaagcaggacggctcgacaatacacatacggtacagagagcccaggagaatgttggcgatgccgatcgatctggatacactgtcccctgaggaacgacgcgccaggctgcgtaagcgggaggcacagctccagtctagaaaagagtacgagcaggagctatcagatgacttacacgtcgaaaggtatagacagttctggactagaacaaagaaatag

SEQ ID NO: 195399 - DNA, 387 bp, synthetic construct
  misc_feature 1..387: note = Description of Artificial Sequence: Synthetic coding sequence
  source 1..387: mol_type = other DNA
atggccgccgtgggcagcctgctgggccggctgcggcagagcaccgtgaaggctactggccctgccttaagaagactccatacttcctcctggcgggccgacagttcacgggcttcgctgactagagttcaccgccaggcttacgcacggttataccctgtgctgctagtcaagcaggatggctcgaccattcatatccggtaccgtgaaccacgccgaatgcttgctatgccgatagacctagatacgctatcaccagaggagcggagagctcgtttgcggaagcgtgaggcccagcttcagtccaggaaagagtatgaacaggaactgtctgatgacctccatgtggaaaggtaccgacaattctggaccaggactaaaaaatag

SEQ ID NO: 195400 - DNA, 387 bp, synthetic construct
  misc_feature 1..387: note = Description of Artificial Sequence: Synthetic coding sequence
  source 1..387: mol_type = other DNA
atggccgccgtgggcagcctgctgggccggctgcggcagagcaccgttaaagcaaccggcccagctctgaggaggctccatacctcttcttggagggccgatagctcaagagctagcctcacacgtgtccatagacaggcatatgcacgcttatatcctgttttactcgtgaaacaagatggttcaaccatacacattcgctaccgggagcctcgtcgaatgctggctatgccaatcgacctggatactctttcaccggaggaacgtcgtgcccgcctcaggaagcgcgaggcacagctgcaatcaaggaaggagtacgaacaggagctgtcggatgatctgcatgtggaaaggtaccgccagttttggacacggacaaagaagtag

SEQ ID NO: 195401 - DNA, 495 bp, synthetic construct
  misc_feature 1..495: note = Description of Artificial Sequence: Synthetic coding sequence
  source 1..495: mol_type = other DNA
atggccgccgtgggcagcctgctgggcctggccgccagcagctggctgggcggacagaacgcctccgaccatagcctctggcttctacgtaaaccacgaggtagctcctgtccaggcactggtcaccaactgtgtaggctgaggcaatccacagttaaggccaccggccccgcactcaggcgcctacacacaagtagctggcgcgccgactcctctcgcgcatcacttactcgagtccacaggcaggcctacgcacgtctgtatccggtgctgctggttaaacaggacggttcaaccattcatattaggtaccgggaacctcgccgcatgctggcaatgcccatcgatcttgacacattatctccagaggagcgccgcgctcgactgcggaagcgggaggcccagctgcagagccgcaaggagtacgaacaagaactatctgacgacttgcatgtggagaggtacagacaattctggacaagaaccaagaagtag

SEQ ID NO: 195402 - DNA, 231 bp, synthetic construct
  misc_feature 1..231: note = Description of Artificial Sequence: Synthetic coding sequence
  source 1..231: mol_type = other DNA
atggccgccgtgggcagcctgctgggccggctgcggcagagcaccgtcaaagctaccggccctgcactcaggcggctgcatacatctagttggagagccgacagttccagggcctcactgacccgcgtacaccgccaggcatatgcccgcctgtatcctgtgctacttgttaaacaggatggctctactatacacattagatatagagaaccaagacgtatgctggcctag

SEQ ID NO: 195403 - DNA, 702 bp, synthetic construct
  misc_feature 1..702: note = Description of Artificial Sequence: Synthetic coding sequence
  source 1..702: mol_type = other DNA
atggccgcccccgtggtgaccgcccccggccgggccctgctgcgggctggcgccggtagattactacggggaggagtgcaagagctgctgaggcccagacatgagggtaacgcccctgatctcgcctgtaacttctctctgtcacagaaccggggaaccgttattgtggagaggtggtggaaggtccctctcgccggtgaaggacggaaaccaagactgcacagaaggcatcgagtgtataagctggttgaagacactaagcatcgaccaaaagagaacctggagctcatcttgactcagagcgtcgaaaacgtgggagtgcgaggagacctcgtgtcagtgaagaagtctttaggaaggaatcgcctcttaccacaggggctggccgtctacgccagccctgagaataaaaaactgtttgaggaagagaaactgttgcggcaagaaggtaaacttgagaaaattcaaacaaaggcaggagaagctctcggtgtcgtggttgccccacataccctcaagctgcctgaggaacctatcactaggtggggggagtactggtgtgaggtgacggttaacggtttagacacagtgcgggttcccatgtctgtagtcaattttgagaagccaaagacaaaaaggtacaaatactggctggcacaacaagctgctaaagcgatggcaccaacctccccccagatctag

SEQ ID NO: 195404 - DNA, 804 bp, synthetic construct
  misc_feature 1..804: note = Description of Artificial Sequence: Synthetic coding sequence
  source 1..804: mol_type = other DNA
atggccgcccccgtggtgaccgcccccggccgggccctgctgcgggctggggctggcaggctacttaggggaggcgtgcaggagctgctgcggcccagacacgagggtaatgcccctgacttggcgtgtaactttagcctgtctcaaaataggggcaccgttattgtggaaagatggtggaaggtgccgcttgctggagaaggtaggaagccccggttacataggaggcaccgcgtatataaacttgtggaggacactaagcaccgacctaaggaaaaccttgaactgattttgacacagtcagtggaaaacgttggggtgcgaggagacctcgtttctgtgaaaaagagcctggggaggaacagactgttgccgcaggggctcgctgtatacgcatccccagagaataaaaaactgttcgaagaagaaaaactactgaggcaagagggcaaactggagaaaatccagacgaaggcgggagaagccaccgtgaagtttctgaagtcttgccgtctcgaggttgggatgaagaacaacgtaaagtgggagctcaaccccgaaatagtcgctcgacacttttttaagaatttgggagttgtggtcgctccacacacgttaaaattgccggaagaaccaatcacccgatggggggagtattggtgcgaggtgaccgtgaacggactggacaccgttcgggtgcccatgtctgtggtgaactttgaaaagcctaagaccaagcgatacaagtactggctagctcagcaggctgcaaaagcaatggcccccaccagtcctcaaatctag

SEQ ID NO: 195405 - DNA, 606 bp, synthetic construct
  misc_feature 1..606: note = Description of Artificial Sequence: Synthetic coding sequence
  source 1..606: mol_type = other DNA
atggccgcccggaccgccttcggcgccgtgtgccggcggctgtggcagggtttagggaacttctcagttaacacttctaaaggcaatacagctaagaacggcgggttgctcctgtctacaaacatgaagtgggtccagtttagcaacttacacgttgacgtgcccaaggacctgactaagccggtggtcactataagcgatgagccggacatcctgtataaaagattatctgtgctggtcaaaggccacgacaaggccgtgcttgattcgtacgagtacttcgcggttctcgcggccaaggagctgggcattagcatcaaggttcacgagcctcccaggaaaattgagcggtttacactgctgcagagcgtgcacatttataaaaagcaccgagtgcagtacgagatgaggactctataccggtgtcttgaactggagcacttaacagggtcaacggcagacgtgtacttagaatacattcagcgcaatcttcccgagggcgttgctatggaagtgactaagacacagctggagcagctccctgagcacattaaagaacccatctgggagactctctcagaggagaaagaagaaagtaagagttag

SEQ ID NO: 195406 - DNA, 585 bp, synthetic construct
  misc_feature 1..585: note = Description of Artificial Sequence: Synthetic coding sequence
  source 1..585: mol_type = other DNA
atgcaggccgtgcggaacgccggcagccggttcctgcggagctggacctggccacaaactgccggccgcgtcgtggcgaggaccccggccggcaccatttgcacaggtgctagacagctgcaggatgcggcagctaagcagaaagtggagcaaaatgctgccccatcacatacgaagttctctatttacccccccatcccaggcgaagaatccagcctgagatgggccgggaaaaagttcgaggagatccccatcgcacatattaaggcctcccataataatacccagatacaggtggtgtctgcatccaacgaaccgctggcattcgcatcatgcgggactgaagggttcaggaacgccaagaaagggacaggaatcgcagctcagaccgctgggatcgccgcagcagcacgtgccaaacagaagggtgtgatccacatcagagtcgtggtgaagggtctgggtccaggccgattgtccgctatgcacggcctgattatgggaggactcgaagtgataagtatcaccgataatactcccataccacacaacggatgtagaccccggaaagctaggaagctgtag

SEQ ID NO: 195407 - DNA, 486 bp, synthetic construct
  misc_feature 1..486: note = Description of Artificial Sequence: Synthetic coding sequence
  source 1..486: mol_type = other DNA
atgcaggccgtgcggaacgccggcagccggttcctgcggagctggacgtggccccagacagcggggcgggtagttgctagaacacccgccggcactatttgtaccggggcaagacagctgcaggatgcagccgccaagcaaaaggtagaacagaacgcagcaccttctcacaccaagttcagcacacaaattcaagtggtgtcagcgtccaatgaacctctggcttttgcctcttgtgggacagagggcttccgcaacgcaaagaaaggaaccggcattgcggcgcagacagcaggcattgcggctgctgcccgggccaagcaaaagggagtgatacatatccgagtggtcgtgaagggattaggccctggcaggcttagtgcgatgcatggcctgatcatgggtggcctggaagtcatctcaatcacggacaacacccctattccccataatggttgccgtcccagaaaggctaggaaattgtag

SEQ ID NO: 195408 - DNA, 417 bp, synthetic construct
  misc_feature 1..417: note = Description of Artificial Sequence: Synthetic coding sequence
  source 1..417: mol_type = other DNA
atgagctggagcggcctgctgcacggcctgaacaccagcctgacctgtgggcccgcccttgtaccgcggctgtgggccacttgctccatggcaactctcaatcagatgcataggctggggcctcctaagcgaccacctagaaaactgggcccaaccgaaggcaggccccaactaaaaggcgtggtactatgtaccttcacccgaaagccaaaaaagcctaatagtgctaatcgaaagtgctgtcgcgtgaggttgagcaccggacgggaagctgtctgttttattcctggggaaggacacaccctgcaagaacaccaaatcgtgctggtcgagggaggccgcacgcaggacctcccaggcgtcaagttgacagtggtccgaggcaaatatgattgcgggcacgttcaaaagaaatag

SEQ ID NO: 195409 - DNA, 417 bp, synthetic construct
  misc_feature 1..417: note = Description of Artificial Sequence: Synthetic coding sequence
  source 1..417: mol_type = other DNA
atgagctggagcggcctgctgcacggcctgaacaccagcctgacctgcgggcccgccctggttcctagactgtgggccacctgctcaatggcaacccttaatcagatgcacaggctcggcccgcccaagagaccacctcgcaaattaggtcccaccgagggacgtccgcagcttaagggagttgtcttgtgcacctttacaaggaaacctaaaaaaccaaattcagccaatagaaagtgttgccgcgtgagactctctactgggagggaagccgtgtgctttatccccggggagggccatacacttcaggagcatcagatcgtgctggtcgagggaggccgaacgcaagacctcccaggcgtgaagttgacagtggtgcgcggaaagtatgactgtggacatgttcagaagaagtag

SEQ ID NO: 195410 - DNA, 417 bp, synthetic construct
  misc_feature 1..417: note = Description of Artificial Sequence: Synthetic coding sequence
  source 1..417: mol_type = other DNA
atgagctggagcggcctgctgcacggcctgaacaccagcctgacctgtggtccagcactggtgcccagactgtgggccacatgctctatggctaccctgaaccagatgcatcgcctgggaccgcccaaaagaccgccgcgcaagcttgggccaacagagggaagaccacagcttaagggtgtcgtcctctgcactttcactagaaaaccaaaaaagcctaacagcgcaaataggaagtgttgccgggttagacttagtactggccgggaggctgtttgtttcatacctggcgagggtcacacactgcaagaacatcagatcgtactcgtcgagggcggaaggacccaggaccttcccggcgtcaagctgaccgtggtccgcgggaagtacgattgcggtcacgtgcaaaagaagtag

SEQ ID NO: 195411 - DNA, 387 bp, synthetic construct
  misc_feature 1..387: note = Description of Artificial Sequence: Synthetic coding sequence
  source 1..387: mol_type = other DNA
atggccgccttcatgctgggcagcctgctgcggaccttcaagcagatggttccgtcctcagcttctgggcaggttcgcagtcactacgtcgattggcgtatgtggagggatgtgaagcgccggaagatggcctacgagtatgctgacgagcggctgcgtataaatagcctccgcaaaaataccattttacccaagatccttcaggatgttgccgatgaagagattgccgcgctgcctagagactcttgcccagttcgcatcagaaaccgatgcgttatgaccagtcggccacgcggagtgaagcggcgctggcgcttgtcccgcattgttttccggcacctggccgatcacggacagctctctggcatccagagagcaacctggtag

SEQ ID NO: 195412 - DNA, 774 bp, synthetic construct
  misc_feature 1..774: note = Description of Artificial Sequence: Synthetic coding sequence
  source 1..774: mol_type = other DNA
atgctgcgggtggcctggcggaccctgagcctgatccggacccgggcggtgactcaggtcctggtgccaggcttacctggcggcggctcagcaaaatttccattcaaccagtgggggttgcagccacgctcactactgttgcaggccgccagagggtatgtcgtgcggaaacccgcccagtctagacttgacgatgaccccccccccagcacgctactgaaggactatcagaacgtccccggaattgagaaagtggacgatgttgtcaaacgcttgttgagtctggagatggccaataagaaggagatgctcaagattaaacaagagcaattcatgaagaagatcgttgccaacccagaggacacaaggtccttagaggcccggatcatcgcgctttccgtgaaaattcggagctacgaggagcacctggaaaagcatcgcaaagataaggcacacaagcgctatctgctgatgagcattgaccagaggaaaaagatgctgaaaaaccttcggaacaccaactatgatgtgttcgagaagatttgttgggggctgggcatcgagtacaccttccctccactctactaccgacgtgctcatcggcgctttgtaacgaagaaggctctttgtatacgcgtgtttcaggaaactcagaaactcaagaagagacgccgtgccctgaaggcagccgcagcggcacagaaacaggccaaaagacgaaacccagactccccagctaaggcaatcccaaaaaccttgaaagatagtcagtag

SEQ ID NO: 195413 - DNA, 300 bp, synthetic construct
  misc_feature 1..300: note = Description of Artificial Sequence: Synthetic coding sequence
  source 1..300: mol_type = other DNA
atggtgcacctgaccaccctgctgtgcaaggcctaccggggcggccacctgaccattagactggccctgggggggtgcaccaaccgtcccttctatcggattgttgctgctcacaacaagtgccccagggacggtcgttttgtggagcagctcggatcctatgatccacttcccaattcacacggtgagaaactcgtggcgctgaatctggatagaatacgccactggatcggatgcggcgctcacctgtccaaaccgatggagaagctcctgggacttaagtacagccacgtcttctag

SEQ ID NO: 195414 - DNA, 414 bp, synthetic construct
  misc_feature 1..414: note = Description of Artificial Sequence: Synthetic coding sequence
  source 1..414: mol_type = other DNA
atggtgcacctgaccaccctgctgtgcaaggcctaccggggcggccatctgacaatacgtcttgcgttgggaggatgtacaaatagacctttctatcgcatcgtcgccgctcataataaatgcccacgagacgggagattcgtagagcagctcgggtcttatgatcctttgcccaattcccatggagagaaacttgtcgcgcttaacctcgatcgcattcgccattggataggctgtggagctcacctgagtaagccaatggaaaagctgctagggctggccgggttcttccccctgcaccctatgatgatcacgaacgcggagagattgcggcggaaacgcgcacgtgaggtgctactggcctcacaaaagaccgatgcagaagcaacagatacagaggccacagagacatag

SEQ ID NO: 195415 - DNA, 372 bp, synthetic construct
  misc_feature 1..372: note = Description of Artificial Sequence: Synthetic coding sequence
  source 1..372: mol_type = other DNA
atggtgcacctgaccaccctgctgtgcaaggcctaccggggcggccacttgactattagattagctctcgggggatgtaccaacagacctttctatcgcattgtggccgcacacaacaaatgccctagagacggtcggtttgtggaacaactggggagctatgacccactccctaattcccacggcgaaaagcttgttgctcttaatctggatcggatccgccattggatcgggtgcggtgcccacctgagcaagcccatggaaaaactcctgggcaagaccgacgcacgtttccccgagcagggggaagaaagacccgagcagcaccattttccagaggacttggcccctgcccgcggaaggggcctgtag

SEQ ID NO: 195416 - DNA, 393 bp, synthetic construct
  misc_feature 1..393: note = Description of Artificial Sequence: Synthetic coding sequence
  source 1..393: mol_type = other DNA
atgagcgtggtgcggagcagcgtgcacgcccggtggatcgtgggcaaggttattggaacaaagatgcagaaaactgccaaggttagggtcactcggctggtcctggacccctatctgctgaagtacttcaataagcggaagacttacttcgcacacgatgcgctgcagcagtgcaccgtgggtgatatcgtactgctccgcgcactgccagttcccagggcgaagcacgttaaacacgagctggcagagattgtgtttaaagtgggcaaggtgatcgatcctgtgaccgggaagccatgtgctggcactacctacctggagtctcccctgtcttccgaaacaactcagttgtccaagaatctggaggagctcaacatctcctcagcccagtag

SEQ ID NO: 195417 - DNA, 390 bp, synthetic construct
  misc_feature 1..390: note = Description of Artificial Sequence: Synthetic coding sequence
  source 1..390: mol_type = other DNA
atgagcgtggtgcggagcagcgtgcacgcccggtggatcgtgggcaaagtcattggcaccaaaatgcagaagacggccaaggtccgcgtgaccagacttgtattggatccctatctcctcaagtactttaacaaacggaagacttatttcgcccacgatgccctgcaacagtgtacagtgggtgatatcgttctgctccgcgctctccccgtccccagagcaaagcatgtgaagcacgaattggcggaaatcgtctttaaagttggtaaggttattgatcccgtcaccggtaaaccatgtgccggcaccacttacctggagtcacccctgtcctctgagactacgcagctgtctaagaacctagaggagttgaatatcagttctgcatag

SEQ ID NO: 195418 - DNA, 384 bp, synthetic construct
  misc_feature 1..384: note = Description of Artificial Sequence: Synthetic coding sequence
  source 1..384: mol_type = other DNA
atggccgccctgaaggccctggtgagcggctgcggccggctgctgagaggcctactggccggacccgccgccacatcctggagtcgccttccagcacgggggtttagggaagtggtggagacccaagaaggtaaaaccactatcatcgagggtcgaattacggccaccccaaaggagtcacctaaccctcctaacccctctggccagtgtccaatctgcaggtggaatctgaagcataagtataattacgacgatgtgttattactttcacagttcatccggcctcatggtggcatgctccctcggaagatcacgggcctgtgtcaggaagagcatcggaagattgaggaatgtgtgaagatggctcatcgtgccggaacttag

SEQ ID NO: 195419 - DNA, 813 bp, synthetic construct
  misc_feature 1..813: note = Description of Artificial Sequence: Synthetic coding sequence
  source 1..813: mol_type = other DNA
atggccgccctgaaggccctggtgagcggctgcggccggctgctgcgcgggttgctggcgggcccagccgccacttcctggtctcggttacccgccaggggctttagagaagttgtggaaacccaggaagggaaaaccacaataatcgagggaagaatcactgcgacgcctaaggaaagtccgaatccccccaatccaagtggccagtgccccatctgtcggtggaatctgaagcacaaatataactacgatgacgtgttgctactgtcacagtttatccgcccgcacggaggtatgttgcctcgcaaaattactggcctctgtcaggaggagcaccgcaagatagaggagtgcgtgaaaatggcacacagagctgggagaagaccttggggccccaggggggccgaggggtgtaggcattcactaccaacacagttaccacatgtcagcgctccccccggtcgcaaagtggacatccggtccgttaattacacccaccaccctatgcctaccttccctctcccctgggccttcccactggcaccctcggagctgcagagagagctgcagagactgtcacccctgcctcgacactctgggctcttgcccaatcatcgccctcgcctgcctgaaggcgttgtgcctaagtcaaaaccccagctcaataggtacctaacacgctgggcccctggttctgtgaagcccatctacaaaaagggtcctcgctggaaccgcgtgcgcatgcccgttggaagccctctcctccgcgacaacgtctgttacagtcgcaccccatggaagctataccactag

SEQ ID NO: 195420 - DNA, 591 bp, synthetic construct
  misc_feature 1..591: note = Description of Artificial Sequence: Synthetic coding sequence
  source 1..591: mol_type = other DNA
atggccgccctgaaggccctggtgagcggctgcggccggctgctgagagggctgcttgctgggcctgccgctacgtcttggagtcggctccctgctcgaggattccgcgaagtggtagaaacccaagaaggaaaaacaactatcatcgaaggacgaatcaccgccacacctaaagaatctcccaacccccccaacccttccggacagtgccccatctgccgctggaatctgaagcacaaatataactacgatgacgtgctgcttctgtcccagttcatcagaccccatggtgggatgttaccgcggaaaataacggggctttgtcaggaagagcaccggaaaattgaagaatgtgtgaagatggcacatcgggccggcctgctccccaatcaccgtcccaggttgcctgagggggtggtgcccaagtctaagccacagctgaatcgatatctgacacggtgggcgccaggatctgtgaaacctatctacaaaaaaggcccaaggtggaatagagtccgcatgccagtggggtctccattacttcgcgacaacgtttgttacagccgaacaccctggaagctatatcactag

SEQ ID NO: 195421 - DNA, 795 bp, synthetic construct
  misc_feature 1..795: note = Description of Artificial Sequence: Synthetic coding sequence
  source 1..795: mol_type = other DNA
atggccgccctgaaggccctggtgagcggctgcggccggctgctgagaggcttattagccgggcctgcagccactagttggtctcgcctgccagcccgaggctttcgcgaggttgtcgagacccaggaaggtaaaactaccattatcgagggtcggatcactgccacaccgaaggaaagtcccaaccctcctaaccccagtggacagtgtccaatctgtcgatggaatttgaagcacaaatacaattatgatgatgtattgctcctcagtcagttcatacgcccccatggtggcatgttgccaagaaagatcactgggttatgtcaggaggagcacaggaagatagaagagtgtgtgaaaatggcccatagagccggtagaagaccgtggggcccaaggggtgctgagggctgtcgccatagtttaccgacccagcttccccatgtgtcagccccacctggccgaaaagttgatattaggtcggtgaactacactcaccacccgatgcccaccttcccgctcccctgggcatttccattagcacctagcgagctccaaagggagttgcagcgcctctctcctctgccgcgacatagcggtctcttacccaatcaccggcctcgtctgcctgaaggagtggtcccaaagtccaagccacagctgaatcgatacctgacacggtgggccccaggctcagtcaagccgatttataagaaagggccgcgctggaaccgggtgagaatgcccgtgggcagtccactactccgtgacaacgtctgttactcccggacatag

SEQ ID NO: 195422 - DNA, 777 bp, synthetic construct
  misc_feature 1..777: note = Description of Artificial Sequence: Synthetic coding sequence
  source 1..777: mol_type = other DNA
atggccgccagcgtgctgaacaccgtgctgcggcggctgcccatgctctcactatttagaggctctcacagggtacaggtgccccttcagactttatgcactaaggccccctctgaagaggatagtttgtccagtgtacccatctcgccttataaagatgagccctggaagtatctggaatctgaagaataccaagaaaggtatgggtcccggcccgtgtgggccgattatcgacggaatcacaagggaggtgtccccccacagcggacaagaaagacttgtattagacgtaacaaagtggtcgggaatccttgtccaatatgccgggaccacaaactgcacgttgactttcgcaacgtgaaattattggaacagttcgtgtgtgcccatacaggtataatcttctacgccccatatacgggtgtgtgcgtgaagcagcacaagcgtcttacacaagctatacagaaggcacgagatcacgggctactaatttatcatattccgcaagtcgaaccccgtgatctggacttttccacaagccacggtgccgtaagcgccacgcccccagctccgaccctcgtgtctggcgacccgtggtacccatggtacaactggaagcaaccacctgagagggagctgtcgagactgcggaggctgtaccagggtcacttgcaggaggaatccggccctccgcccgagagtatgccaaaaatgcctccacgcaccccagctgaggccagttccactggacaaaccggtccacagagcgcactctag

SEQ ID NO: 195423 - DNA, 777 bp, synthetic construct
  misc_feature 1..777: note = Description of Artificial Sequence: Synthetic coding sequence
  source 1..777: mol_type = other DNA
atggccgccagcgtgctgaacaccgtgctgcggcggctgcccatgttgagccttttcagagggagccatcgcgtgcaggtaccgctgcagacgctctgcaccaaagcaccgagtgaggaagattcactctccagcgttccaatctccccttacaaagacgaaccctggaagtatttggaatctgaggagtaccaggagcggtatggcagtcggcccgtgtgggcggactaccggcgcaaccacaagggcggggttccacctcaacgcactcgaaagacttgtattaggcggaataaggttgtgggaaatccctgccctatttgccgggatcacaagctgcatgtggatttccggaacgtgaagctgctagagcagttcgtatgcgctcacactggcataatcttctatgctccttacacaggggtctgcgtgaaacagcataaaagactgacacaggctatccaaaaagctcgcgaccatgggctactgatctaccacatcccgcaggtcgagcctagggacctggattttagcacatcccacggagccgtgtctgctactccccccgctccaacactggtctcaggcgacccatggtacccctggtacaattggaagcagccacctgagagggagctgagtaggctgcgcagattgtaccagggacacttgcaggaggagtcagggcccccaccagagtccatgcccaagatgccgccacgcaccccagccgaagcgagttccacaggtcagaccggtcctcagtctgcactctag

SEQ ID NO: 195424 - DNA, 648 bp, synthetic construct
  misc_feature 1..648: note = Description of Artificial Sequence: Synthetic coding sequence
  source 1..648: mol_type = other DNA
atggccgccagcgtgctgaacaccgtgctgcggcggctgcccatgctctccctgtttcggggctcacaccgggtgcaggtgcccctgcaaaccctgtgtactaaagcccctagcgaggaggattcgctgtcttccgtgcccatatctccttacaaagacgaaccatggaaatatctagaatcggaggagtaccaggagaggtatggctccagacctgtgtgggccgactacaggcgaaatcataaaggaggcgtccctcctcagcgaacccggaagacttgtatcaacgtcaagcttctggagcagttcgtgtgcgctcatacggggatcatcttctacgctccctacaccggcctgctcatatatcacatcccacaggtcgagccccgagatctggacttctcaacttcccacggggccgtgtccgctactccccccgctcccacattagtgtccggcgacccttggtacccatggtataattggaaacagcctcccgagagagaactgagcagacttaggaggctgtaccaaggccatctccaagaggagtccgggccgcccccagagtctatgcctaaaatgcctccacgaactcctgccgaggcatcctctacaggtcagaccggcccacagagtgccctgtag

SEQ ID NO: 195425 - DNA, 648 bp, synthetic construct
  misc_feature 1..648: note = Description of Artificial Sequence: Synthetic coding sequence
  source 1..648: mol_type = other DNA
atggccgccagcgtgctgaacaccgtgctgcggcggctgcccatgctcagcctttttagggggtcccacagagtgcaggtcccactgcagacactttgcaccaaggcgccgagtgaagaggatagcttgtcctctgtacccatttctccatacaaggacgaaccctggaagtaccttgaaagtgaagagtatcaggaacggtatggatcccgcccggtttgggccgactatcgtcgtaatcataagggaggcgtaccaccgcagcggactagaaagacatgtatcaatgtgaagctgctggagcagttcgtctgcgcgcatacaggcatcatcttctacgcaccctacacaggacttctcatctaccatattccgcaggtcgaacctcgcgacctggacttctccacatctcacggagcagtgtctgccaccccccccgctcccaccctggtcagtggagatccctggtatccatggtacaactggaaacagccacctgagagggaactgtcacggctacgcagactgtatcagggccatttgcaggaggagagcgggcctcccccagagagcatgccaaagatgcccccacgcacccctgctgaagcttcttcaacgggacaaacaggcccacagtcagccctctag

SEQ ID NO: 195426 - DNA, 777 bp, synthetic construct
  misc_feature 1..777: note = Description of Artificial Sequence: Synthetic coding sequence
  source 1..777: mol_type = other DNA
atggccgccagcgtgctgaacaccgtgctgcggcggctgcccatgctttccctgtttcgcggtagtcatcgcgtacaggtgcccctccagacactgtgtacaaaggcaccatcggaagaggattccctgagcagtgtgccgatttcgccttacaaagacgagccttggaaatacttggagagcgaggagtaccaggagcgctacggctctcgacctgtgtgggcagattaccggaggaaccacaaaggaggggtccccccacagcggaccagaaaaacatgtatccggcgcaataaggtcgtgggcaacccttgtccaatttgcagggaccacaaactccacgttgactttcggaatgtcaagctcctggagcagtttgtctgcgcccacacagggatcatattctacgcaccttatacgggcgtctgcgtgaaacagcataaacgcctgacccaggccatccagaaggcgagggaccacggtctgctcatataccatattccccaagtggagccccgcgatttagactttagtacctcccacggcgccgtgtccgcgacaccccccgcccccacactggtgtcaggagacccttggtatccatggtacaattggaagcagcctcccgaacgcgagttgagcagattgagaaggttataccagggacatcttcaagaggaatcgggtccacccccggagagcatgccaaaaatgccccccagaacacccgccgaggcctcctcaacaggacagaccgggcctcagtccgctctttag

SEQ ID NO: 195427 - DNA, 648 bp, synthetic construct
  misc_feature 1..648: note = Description of Artificial Sequence: Synthetic coding sequence
  source 1..648: mol_type = other DNA
atggccgccagcgtgctgaacaccgtgctgcggcggctgcccatgttgtctctgttcaggggcagtcaccgcgtccaggtaccactacagacactctgcaccaaggcgccatccgaggaggattcactctccagcgttccaatctccccctacaaggacgagccttggaagtatctggagagcgaggagtaccaggagagatatgggagtcgaccggtgtgggccgattataggcggaaccacaaaggcggggtccccccacaaagaacacgtaagacctgcataaacgtaaagctgctagagcaattcgtctgtgcccacactggcataatcttttacgcgccgtatactggtcttctgatttaccatattccacaggtcgagccgagggaccttgacttttccacaagccacggggccgtctctgccactccgccagctcccactctggtgagcggtgacccctggtatccatggtataactggaaacagcccccggaaagagagctctcccgactgcgacggctctatcaaggacacctgcaggaagagtcgggccccccccccgaatccatgcctaagatgccacccaggacccctgctgaagcaagctccaccggtcagactggacctcagagtgccctgtag

SEQ ID NO: 195428 - DNA, 648 bp, synthetic construct
  misc_feature 1..648: note = Description of Artificial Sequence: Synthetic coding sequence
  source 1..648: mol_type = other DNA
atggccgccagcgtgctgaacaccgtgctgcggcggctgcccatgttgtctctattccgcggctcccacagagtgcaggtaccattgcagactctgtgcaccaaggccccctccgaggaagattcattatcctcggtgcccatctcaccatacaaggacgaaccttggaaatacctcgaatccgaggaataccaggaacggtacggttctcgccctgtctgggctgactatagaaggaaccacaagggcggcgttcctccccagcggacccgaaagacttgtatcaatgttaagcttctggaacaattcgtgtgcgctcatactggcattatcttttacgccccgtataccggtctgctgatttaccatattccccaagttgaacctagggacctggacttttcaacctcacacggagcagtgtcagcaacccctccggcacccaccctggtctccggggatccttggtacccttggtataactggaagcagccgcccgaaagagaactgagtcgtctccggaggctctatcagggacatttacaggaggagagtgggcctccaccagaatccatgcccaagatgccccctaggacgcctgctgaggcctcatctaccgggcagactggcccacagtctgccctatag

SEQ ID NO: 195429 - DNA, 777 bp, synthetic construct
  misc_feature 1..777: note = Description of Artificial Sequence: Synthetic coding sequence
  source 1..777: mol_type = other DNA
atggccgccagcgtgctgaacaccgtgctgcggcggctgcccatgctgagcttattccgggggagtcaccgggtgcaggtgccactccagactttatgcacgaaggctccctccgaagaggatagtctgagtagtgtcccaatctcgccatacaaggatgaaccctggaagtacctggaaagcgaagaataccaggagcgatatgggtcccgccccgtctgggccgattatcgacgtaatcataagggcggcgtgcccccacaaaggaccaggaagacctgcatccgccgcaacaaggtcgttggcaacccctgcccaatatgccgggaccataagctccatgtagacttccgcaatgttaaattattggaacaatttgtttgcgctcacacaggcatcatattctatgcaccctacaccggcgtttgtgtgaagcaacacaagcgtctgacccaagccatccagaaggcccgagatcatggactgctgatctatcacatccctcaggtggaaccccgcgacctggacttttccactagtcacggcgctgtgagtgcaaccccgccagcccccacccttgtctcaggtgacccttggtacccctggtataattggaaacagccacccgaacgtgagttatcacgccttcgtaggctgtaccagggtcacctacaagaagaatctggtccaccaccagaatccatgccaaagatgccaccacggacaccagctgaggccagctcgacggggcagactggcccccagtccgcactatag

SEQ ID NO: 195430 - DNA, 648 bp, synthetic construct
  misc_feature 1..648: note = Description of Artificial Sequence: Synthetic coding sequence
  source 1..648: mol_type = other DNA
atggccgccagcgtgctgaacaccgtgctgcggcggctgcccatgcttagtttgttccgaggtagccaccgggtgcaagtgcctcttcagacgctctgcactaaagctccttcagaagaggattccctttcctcagtacccatttccccctataaagacgaaccttggaagtaccttgaaagtgaagagtatcaggagcgttacggctctaggccggtctgggccgattatagacgaaaccacaagggaggcgtgcctccccagaggaccaggaagacttgtatcaacgtgaaactgctcgagcagttcgtttgcgcacacaccggaattatattttatgccccgtacacaggcctgctgatttaccacatccctcaggtagagccaagagatctcgacttttccacatcccacggtgccgtttctgcaactccacccgccccaactctcgtgtctggcgatccttggtacccttggtacaattggaaacagccccccgagcgagaactgtctcggctccgcagactttaccagggccacctgcaggaggaatccggcccccccccagagagtatgccaaaaatgccccccaggacgccagctgaagcatcctctaccggtcagaccggtccacagtctgccttatag

SEQ ID NO: 195431 - DNA, 777 bp, synthetic construct
  misc_feature 1..777: note = Description of Artificial Sequence: Synthetic coding sequence
  source 1..777: mol_type = other DNA
atggccgccagcgtgctgaacaccgtgctgcggcggctgcccatgctctcactttttcggggttcacaccgagtgcaggtgcccctccagaccctttgtactaaggcaccttctgaagaagattctttgtcatcggtgcccataagcccctataaggatgagccttggaaatacctggagtcagaggagtatcaagagaggtatggttcccgccccgtgtgggccgactaccggaggaatcataaagggggtgttccacctcagagaacacgcaagacatgtattcgacggaacaaggtggttggcaacccttgtccaatttgcagagatcacaaactccacgtggacttcaggaatgttaagttgctggagcagttcgtttgtgcacatacaggcatcattttttatgccccttacaccggtgtctgcgtcaagcagcataagcgcctgacccaggctattcaaaaggccagagaccatgggctgctcatatatcacattcctcaggtggagcctcgcgatttggatttttcaacctcacatggtgcagtgtccgccactccaccagcacctacactcgtatccggcgacccttggtacccttggtataattggaaacagcctccagagagagaactgagccggctacggcggctgtatcagggccacttacaggaagaaagcgggccacctcccgagtcaatgcctaagatgccaccaaggacacctgcggaagcaagcagcaccggccagactggtccccagtccgccttatag

SEQ ID NO: 195432 - DNA, 648 bp, synthetic construct
  misc_feature 1..648: note = Description of Artificial Sequence: Synthetic coding sequence
  source 1..648: mol_type = other DNA
atggccgccagcgtgctgaacaccgtgctgcggcggctgcccatgctttcactgtttaggggctctcatcgggtccaggtgcctttgcagacactctgtacaaaggcaccatccgaagaggactccctgagttccgttccaatttcaccttacaaagatgaaccctggaagtatctggaatccgaagagtaccaggaaaggtacggttccaggcccgtctgggccgactaccgaaggaaccataaagggggggtcccccctcagcggactcgcaagacttgtattaacgtgaagctgctggaacagttcgtgtgcgcacatacaggcattatcttctatgccccatatactggtctactcatatatcacattccacaagtcgagcccagagacctggatttctccacttcccacggagcagtctcagccactccccctgcaccaacactggtaagcggtgacccttggtatccatggtacaactggaaacagccacccgaaagagaattgtcacgattaaggcgcctataccagggacacctacaagaggaatcaggccccccaccagagtctatgcctaaaatgcccccacgaactccagcagaggcctcaagcacaggacagacgggcccacagagcgcactctag

SEQ ID NO: 195433 - DNA, 648 bp, synthetic construct
  misc_feature 1..648: note = Description of Artificial Sequence: Synthetic coding sequence
  source 1..648: mol_type = other DNA
atggccgccagcgtgctgaacaccgtgctgcggcggctgcccatgctgtccctatttagagggtcccacagggtgcaggtgcctctccagacgctctgcacaaaggcgccctccgaggaggactcattatctagcgtgcctatatctccctataaggatgagccctggaagtacttagagtccgaagaataccaggaaaggtacggcagtcgaccagtttgggccgactataggagaaatcacaaagggggtgtgcctcctcagagaacacgaaagacttgcattaatgtgaagctcctggagcagtttgtttgtgcccatacaggtatcatcttctacgccccatacacaggcctgctgatttaccacatccctcaggtcgaaccaagagatcttgacttttctacctctcacggcgctgtatctgctactccccctgccccaaccctggtgtccggcgatccctggtacccttggtacaactggaagcagcctcccgaacgcgagttgtcgcgcctccgccgtctgtaccagggccatcttcaggaggagtccgggccccccccagaatcaatgcctaagatgccacctcgcactccggccgaagcaagtagtaccggacagacaggaccacagtcagctctctag

SEQ ID NO: 195434 - DNA, 777 bp, synthetic construct
  misc_feature 1..777: note = Description of Artificial Sequence: Synthetic coding sequence
  source 1..777: mol_type = other DNA
atggccgccagcgtgctgaacaccgtgctgcggcggctgcccatgctctctctattcagggggtctcaccgcgtccaggttccccttcagacactctgtaccaaggctccctccgaggaagatagcctgtcctctgtcccaatttctccatacaaggatgagccctggaagtacctggagtccgaggagtatcaggagagatacggaagccggcccgtttgggctgactatcggcggaatcacaagggaggagtgccaccccagcgtacacgcaaaacttgtattcggcgcaataaagtggtgggcaacccctgtccgatctgccgcgatcataaactgcatgtagatttccgcaatgtgaaactcctggagcagttcgtgtgcgcccacactgggattatcttctacgctccatatacgggggtttgtgttaaacaacacaaaaggttgacccaggcaatccagaaggcccgtgatcacggactgctgatttaccacatccctcaagtagaaccaagggacctggatttcagcacctcacacggtgcagtgagcgcaacaccgcctgctccaactctcgtgtccggcgacccttggtatccttggtataactggaaacagcctccagagagagagctttctagactgcggaggctctaccaagggcatctacaagaagagtctggacccccccccgagtccatgccgaagatgcctccaagaaccccggccgaggccagctccactggccagactggccctcagagcgccctttag

SEQ ID NO: 195435 - DNA, 777 bp, synthetic construct
  misc_feature 1..777: note = Description of Artificial Sequence: Synthetic coding sequence
  source 1..777: mol_type = other DNA
atggccgccagcgtgctgaacaccgtgctgcggcggctgcccatgttgagcctttttcgaggctctcatcgagtgcaagtaccgcttcaaacgctgtgcaccaaagccccctctgaggaagattccctctcatccgttcctataagcccttataaagacgagccgtggaagtatctggagtctgaggaataccaggagcgatacgggagccggcctgtgtgggccgactatcggagaaaccataagggcggtgtacctcctcaacgcacacgaaagacatgcatccgccgtaacaaggtcgtaggaaatccctgtccaatttgtcgtgaccacaaactgcatgtggacttcaggaacgtcaagctactggaacagttcgtgtgcgctcacacaggtatcatattctacgcaccatacacaggtgtatgcgtgaaacagcataagcgattaactcaggccatacaaaaggcccgagaccatggcctgctcatttaccacatccctcaggtggagccacgggacctggatttcagcacatctcacggagctgtgtcggcgacgccacctgcccctacgctcgtgtctggagacccctggtatccttggtacaattggaaacagccccctgaaagagaactttctcgcctgcgaaggctataccagggccatctccaagaggagtctgggccaccccccgagagcatgcctaaaatgcctcctaggactcccgccgaggcttcctcgacagggcaaacaggaccacagagtgccctgtag

SEQ ID NO: 195436 - DNA, 366 bp, synthetic construct
  misc_feature 1..366: note = Description of Artificial Sequence: Synthetic coding sequence
  source 1..366: mol_type = other DNA
atggccgccagcgtgctgaacaccgtgctgcggcggctgcccatgctgtccctgtttcgggggtcccatagggtccaggtcccattgcagaccttgtgcaccaaggccccctccgaggaagactccctttcaagtgtaccaatttctccctacaaggacgaaccatggaaatatttggaatctgaggaataccaggaaaggtatggctctagacccgtctgggcagactataggaggaatcataaaggaggggtccctccacagcggacccgaaaaacatgtatcaggcgcaataaagtggtaggcaatccctgcccgatatgtcgcgatcacaagctccatgtggactttagggagagcgtctag

SEQ ID NO: 195437 - DNA, 366 bp, synthetic construct
  misc_feature 1..366: note = Description of Artificial Sequence: Synthetic coding sequence
  source 1..366: mol_type = other DNA
atggccgccagcgtgctgaacaccgtgctgcggcggctgcccatgttgagtctgttccggggtagccatagggtacaggtgccactgcagacactgtgtaccaaggccccatctgaggaagactccctgagcagcgtccctataagcccctataaggacgagccatggaagtatctcgagtccgaggaataccaggagaggtacggaagccgacccgtgtgggcagattatcggcggaaccacaaggggggagtgcctccacagcggacgagaaagacctgcatccggaggaataaagtggtcggcaacccttgtccaatttgccgggaccacaagctgcacgtggatttccgagaatccgtgtag

SEQ ID NO: 195438 - DNA, 366 bp, synthetic construct
  misc_feature 1..366: note = Description of Artificial Sequence: Synthetic coding sequence
  source 1..366: mol_type = other DNA
atggccgccagcgtgctgaacaccgtgctgcggcggctgcccatgctgtccctttttcgcgggagccatagagtgcaggtgcccttgcagacattgtgtaccaaggctccctcagaggaggatagtctatcctctgttcctatcagcccttacaaagatgaaccttggaagtacctggaatctgaggagtatcaggaaaggtacggttcccgcccagtttgggcagattacagaagaaatcacaaggggggggtaccgcctcagcggacccgcaagacatgtatcaggagaaacaaggtggtgggtaatccctgcccgatttgcagagaccacaaactgcatgtcgacttcagggaatccgtgtag

SEQ ID NO: 195439 - DNA, 366 bp, synthetic construct
  misc_feature 1..366: note = Description of Artificial Sequence: Synthetic coding sequence
  source 1..366: mol_type = other DNA
atggccgccagcgtgctgaacaccgtgctgcggcggctgcccatgctgtcactattcagagggagccatagagtgcaggttcccctgcaaacactttgcacaaaggctccatccgaagaagactctctcagttcggttcccataagcccatataaagacgagccatggaagtatttggagtcggaggagtatcaggaaagatacgggtcccgacccgtctgggccgattacaggcggaatcacaaaggtggggttccccctcagagaacaaggaaaacatgcataagacgcaacaaagttgtaggcaacccatgccctatttgtagggatcataagttgcacgtggattttcgtgagtctgtttag

SEQ ID NO: 195440 - DNA, 366 bp, synthetic construct
  misc_feature 1..366: note = Description of Artificial Sequence: Synthetic coding sequence
  source 1..366: mol_type = other DNA
atggccgccagcgtgctgaacaccgtgctgcggcggctgcccatgctctctttgttccgcggtagccacagagtgcaggttccgctgcaaacactatgcacaaaggcaccatcagaagaggattctctgtctagcgttccaatcagcccttacaaggacgaaccttggaagtatcttgaatcagaagaataccaagaacgctacgggtcaagacccgtttgggccgattaccggagaaaccacaagggaggtgtcccccctcagcgtaccaggaaaacctgcatccgacgaaacaaggttgtgggaaatccgtgccccatctgtcgcgaccacaagctccatgttgacttccgtgagagcgtgtag

SEQ ID NO: 195441 - DNA, 366 bp, synthetic construct
  misc_feature 1..366: note = Description of Artificial Sequence: Synthetic coding sequence
  source 1..366: mol_type = other DNA
atggccgccagcgtgctgaacaccgtgctgcggcggctgcccatgctctctctctttcggggatcacaccgcgtgcaggtgccacttcagacactgtgtaccaaggctccttctgaagaagactctcttagttctgtaccaataagtccttataaggacgagccctggaagtatctcgagagtgaggaataccaggaacggtatgggtccagaccggtctgggccgactaccgaagaaaccataaaggaggtgtccccccacagcgtacacgcaaaacttgtatccgacgcaacaaggtggttggaaacccatgtcccatctgccgggaccacaagttgcacgttgacttccgggagtcagtgtag

SEQ ID NO: 195442 - DNA, 366 bp, synthetic construct
  misc_feature 1..366: note = Description of Artificial Sequence: Synthetic coding sequence
  source 1..366: mol_type = other DNA
atggccgccagcgtgctgaacaccgtgctgcggcggctgcccatgttgtctctgtttcgtgggtcacatcgcgtccaagtgcctctccagaccttgtgtaccaaagctcctagcgaggaagattctctgtcttcagtcccaatctctccctataaagacgagccctggaaatacctggaatcagaagaatatcaggaacgatatggttcaaggccagtgtgggcggattaccgccgtaaccataagggaggagtgccgccgcagcgaactaggaagacttgcattcgccggaacaaagtcgtgggcaatccctgccccatctgcagagatcacaagctccatgtagacttcagggagtcagtttag

SEQ ID NO: 195443 - DNA, 429 bp, synthetic construct
  misc_feature 1..429: note = Description of Artificial Sequence: Synthetic coding sequence
  source 1..429: mol_type = other DNA
atggccgccgtggtggccgtgtgcggcggcctgggccggaagaagttgacccacctggtgactgcagccgtgtcgctgacccatcctggcacccacaccgtgctttggcggcggggatgctctcaacaagtaagcagcaatgaggacttgccaatctctatggaaaatccctataaggaaccactcaaaaaatgtatcctttgtggtaagcacgttgactacaagaatgtacagctgctgtctcagtttgtgagcccatttactggatgcatctatggccgacacataaccggactgtgcggcaaaaagcagaaggagatcacaaaagcaatcaagagagcccagattatgggatttatgcctgtaacctataaagatcccgcctatctgaaagacccgaaagtttgcaatatccgctatagagaatag

SEQ ID NO: 195444 - DNA, 345 bp, synthetic construct
  misc_feature 1..345: note = Description of Artificial Sequence: Synthetic coding sequence
  source 1..345: mol_type = other DNA
atggccgccgtggtggccgtgtgcggcggcctgggccggaagaagttgacacatctggtgactgcggccgtgagtttgacccacccagggacgcatacagtcctatggaggcgggggtgcagtcaacaagtatctagtaatgaggacttgttactctcccagttcgtgagccctttcaccggctgtatctacggtcgacatattacgggcctgtgtggcaaaaagcaaaaagaaatcacgaaagcaatcaaacgcgcccagattatggggtttatgcctgtgacctataaggatcctgcctacctgaaagatcccaaagtgtgtaacattcggtatcgggaatag

SEQ ID NO: 195445 - DNA, 891 bp, synthetic construct
  misc_feature 1..891: note = Description of Artificial Sequence: Synthetic coding sequence
  source 1..891: mol_type = other DNA
atggccaccagcagcgccgccctgccccggatcctgggcgccggcgctcgggccccgtcccggtggttggggtttctggggaaagctacccccagacccgcacgcccctctcggagaacactggggagtgctaccgctctcatgattcgcgaaagcgaggatagcacggacttcaatgacaaaatcctgaacgagccacttaaacattctgacttcttcaatgtgaaggaactgttcagcgtgcgcagcctgtttgatgccagagtacaccttgggcataaggctggctgcaggcaccgctttatggagccgtacatcttcggatctaggcttgatcacgatatcatcgatctggaacagaccgcgacacatctgcagctagctctgaatttcaccgcccacatggcttatcgtaagggcatcatcctgtttatctcaagaaatagacaattttcttacttaatagaaaatatggcccgtgattgcggcgagtacgcccacacccgttacttccgcggcgggatgcttacaaacgccagacttctttttggccccacagtaagattaccagatcttattatcttcctccatacccttaataatatcttcgaaccccacgttgcagttagggacgctgccaagatgaatatcccaaccgtcggcatcgtggatacaaactgcaatccatgtctgatcacttatcccgtgcctggcaacgatgatagcccattagccgttcatctatactgccgccttttccaaaccgccattactcgtgctaaggaaaagcgtcagcaggttgaggccttgtacagattacaagggcaaaaagaacctggggatcagggccccgcccatcctccaggcgcagacatgtctcacagtctgtag

SEQ ID NO: 195446 - DNA, 891 bp, synthetic construct
  misc_feature 1..891: note = Description of Artificial Sequence: Synthetic coding sequence
  source 1..891: mol_type = other DNA
atggccaccagcagcgccgccctgccccggatcctgggcgccggcgcccgagccccgtccagatggctggggtttctaggaaaagccacacctaggcctgccaggccgtctaggcgcacgcttggcagcgccaccgccctcatgattcgcgaatctgaggatagcaccgattttaatgataaaatcctcaatgagcctctgaagcacagcgatttcttcaatgtgaaggagctgttcagcgtccggagtctgttcgacgcccgggtgcatctcgggcataaagccgggtgtcggcacaggtttatggagccttatatttttggatctcggctcgatcacgacatcatcgacttggaacaaacggcaacacatctacaactggccttaaacttcacagcccatatggcctaccggaagggaatcatcctcttcatctcaagaaacagacagttcagctatctgatcgagaatatggcccgtgactgtggcgagtacgcgcataccagatacttcagggggggaatgttaaccaatgctcggcttttgttcggccccaccgtgcggctgcccgacctgatcatcttcttacacaccctgaacaatatcttcgagccacacgtcgctgttcgtgatgcagccaagatgaatatcccaactgtgggaattgtcgacacgaattgcaacccatgtctcatcacatatcccgtgcctggtaacgacgactctccactggcagtgcatctttattgccgcctcttccagaccgctattactagggccaaagagaagcgccagcaggtggaggctttgtatcgactccagggacaaaaggaacccggcgaccaggggccagcacacccacctggcgccgatatgagccacagcctgtag

SEQ ID NO: 195447 - DNA, 813 bp, synthetic construct
  misc_feature 1..813: note = Description of Artificial Sequence: Synthetic coding sequence
  source 1..813: mol_type = other DNA
cggcggggccccctgggcatgcggtggggcgccggcgtggtgcactcagggctgggagctagaacaagtatttatttcccacccggagctagggcaccctcccggtggctcggctttctagggaaggcaactccccgcccggcaagaccaagtaggcggactctcgggtccgccaccgcgttgatgattcgtgaatccgaggacagtacagattttaacgataaaatattgaacgaaccccttaagcatagcgactttttcaatgttaaagagctgttctccgtcaggtccttgttcgacgctagagtgcatctcgggcacaaagcaggatgtcgacaccgtttcatggaaccatatatttttggtagtcgccttgatcacgacatcatagatctggaacagacagcaacccacctccagctggccctcaacttcactgctcatatggcctacagaaagggtataatactcttcatctctcgtaaccgacagttttcttatttgattgagaacatggccagagactgtggagaatatgcgcacacccgatactttcgaggggggatgctcacaaacgcccgccttctgtttggccccaccgtacggcttcccgatctcattatcttcctgcatacgctgaacaatatattcgagcctcacgtggctgtgagggacgctgccaagatgaacatcccaaccgtagggatagtggataccaattgcaacccttgcctcatcacataccctgtgcctgggaatgatgactccccactggccgttcatctctactgccgcctattccaaactgcatag

SEQ ID NO: 195448 - DNA, 264 bp, synthetic construct
  misc_feature 1..264: note = Description of Artificial Sequence: Synthetic coding sequence
  source 1..264: mol_type = other DNA
atggccaagcacctgaagttcatcgcccggaccgtgatggtgcaggagggcaacgtggaatccgcttataggacactgaacaggatactcacaatggatggactcattgaggacataaagcaccgcagatattatgagaagccttgcagaagacggcagagagagtcctacgaaagatgcaggagaatttataacatggaaatggcaagaaaaatcaatttcttgatgcggaagaaccgcgcagacccctggcaaggatgctag

SEQ ID NO: 195449 - DNA, 264 bp, synthetic construct
  misc_feature 1..264: note = Description of Artificial Sequence: Synthetic coding sequence
  source 1..264: mol_type = other DNA
atggccaagcacctgaagttcatcgcccggaccgtgatggtgcaggagggaaatgtggaatcagcttaccgaaccctgaatagaatactcacaatggatgggctgatcgaagatatcaagcaccgccgttactatgaaaaaccttgcagacgcaggcagcgggagtcttacgaacgatgtcgacggatatacaatatggaaatggcgagaaaaataaacttcctcatgcgcaagaatagagccgacccttggcagggctgttag

SEQ ID NO: 195450 - DNA, 1083 bp, synthetic construct
  misc_feature 1..1083: note = Description of Artificial Sequence: Synthetic coding sequence
  source 1..1083: mol_type = other DNA
atggcccccctgggcaccaccgtgctgctgtggagcctgctgcggtccagtcccggagtagagcgggtgtgctttcgagcccggattcagccttggcatggaggtctgttgcagcctctgccatgtagctttgagatgggcctgcctagacgacgcttcagttccgaggctgcggagtccggcagcccagagaccaagaagcctactttcatggacgaggaggtgcagagcattctgaccaagatgaccggcctgaacctgcaaaagacctttaaacccgccattcaggaacttaagccccccacttataagctcatgacccaggcccaacttgaagaggcaacaaggcaggcagtggaagcagctaaagtgaggttgaaaatgcccccagtcctcgaagaacgggtacctatcaatgacgtgcttgcagaagataaaatactcgaaggtactgagactactaagtatgtctttaccgatatatcgtatagtatccctcaccgagaacgttttatcgttgtccgggagccgagcggcacactacgtaaggccagctgggaagagcgggacaggatgatccaggtgtactttcccaaggaggggaggaaaatactaacccccatcatttttaaggaggaaaacctacgaaccatgtactcacaggaccgtcatgttgatgttttgaatctgtgttttgcacagttcgaacctgacagtaccgaatacatcaaagtgcatcacaagacctatgaggatatagacaaacgtggcaagtatgacctgctcagatccacgagatattttggtggaatggtatggtatttcgtgaacaacaaaaagattgacggactactcattgatcaaattcaacgggacctcatagacgacgcgacaaatcttgttcagctgtaccacgtgctgcaccctgacggccaatccgcgcaaggcgctaaggaccaggcagctgaaggcatcaatttgataaaagtgtttgccaagacagaggctcagaagggggcctatatagaattgaccctccaaacataccaggaggccctgtcccgacactccgccgcttcgtag

SEQ ID NO: 195451 - DNA, 1080 bp, synthetic construct
  misc_feature 1..1080: note = Description of Artificial Sequence: Synthetic coding sequence
  source 1..1080: mol_type = other DNA
atggcccccctgggcaccaccgtgctgctgtggagcctgctgcggagttccccgggcgtggagagagtgtgtttccgtgctcggatacagccatggcatggcggcttactgcaaccgctcccatgctcttttgaaatgggactgcctagaaggcgcttctcctctgaggccgaatcaggaagtcctgaaaccaaaaagcccacattcatggatgaggaggtacaatctattctaactaagatgacaggtttgaacctacagaagacattcaaacccgcaattcaagagctgaaaccccccacatacaagctgatgacccaggcacagttggaagaagctacgcgtcaggcagttgaagctgccaaggttcggttaaaaatgcctcctgtgctcgaagaaagagtccccattaatgacgtgctggccgaggataagatcctggagggcaccgagactaccaaatacgtgtttacagacatatcatactccatcccacaccgggagcgattcatcgttgttcgggaaccctccggtactcttcggaaggcgtcatgggaggagcgggatcgcatgatacaggtgtacttcccaaaggaggggcgcaaaattcttacccctattatcttcaaggaagaaaacctgaggacaatgtattcccaggacaggcacgtagacgtgctgaatctgtgtttcgcgcagtttgaaccagactctaccgagtacatcaaggtgcaccataagacttatgaggatatcgacaaaagaggaaagtatgatctgttgcggagtacccgttattttggaggcatggtgtggtattttgtgaacaacaagaaaatcgacgggttacttatagatcagattcagcgggatctgatcgatgatgctaccaatcttgtccagctgtaccacgttctccacccagacggtcaaagtgcccagggagcgaaggaccaggcggcagaaggtatcaacctgatcaaggtttttgccaagactgaggcacagaagggcgcgtacatcgagctgactctccagacgtaccaggaagcactctccaggcatagtgccgcgtcctag

SEQ ID NO: 195452 - DNA, 960 bp, synthetic construct
  misc_feature 1..960: note = Description of Artificial Sequence: Synthetic coding sequence
  source 1..960: mol_type = other DNA
atgagccggaacgagaccgagcaccggtacctgggcacccacttcggcgcagagagtggaagtccagagaccaaaaagccgacctttatggatgaggaagtccagtctatcttaacaaagatgacgggcctgaatctgcagaagactttcaaacccgcgatccaagagttgaagccacctacctacaaactgatgacacaggcccaactggaggaggcgacaagacaggcagtagaggctgccaaggtacggctgaaaatgccccccgttctcgaagagagagtgcctatcaatgatgtcctcgccgaggataagatacttgaagggactgagaccacgaagtatgtattcacagacatcagctactccatcccccaccgtgagcggttcattgttgttcgggagccgtctgggactctgaggaaagcttcctgggaagagcgtgatcgtatgatacaggtgtatttccctaaggaaggccggaagatcttaacccccatcatcttcaaggaggaaaaccttaggacgatgtattctcaggacaggcacgtggatgtgctcaacctctgttttgcccagtttgaaccggactccactgagtacatcaaggtccaccacaaaacatacgaggacattgacaaacggggaaaatacgatttgcttcgctctactcggtactttggaggcatggtgtggtactttgtaaacaacaaaaaaatcgacggtctgttgattgatcaaatacagcgagaccttatcgacgacgctaccaacttggtgcaactttatcacgtactgcaccccgacgggcagtctgcccaaggagccaaggaccaggccgccgaggggattaatctgattaaagtgttcgctaaaaccgaggcccagaaaggagcctacatcgagctgacactccagacctaccaggaggctctttctaggcacagcgcggcatcatag

SEQ ID NO: 195453 - DNA, 1083 bp, synthetic construct
  misc_feature 1..1083: note = Description of Artificial Sequence: Synthetic coding sequence
  source 1..1083: mol_type = other DNA
atggcccccctgggcaccaccgtgctgctgtggagcctgctgcggagctctcccggggtcgaaagagtatgctttcgcgccaggatccagccatggcacggaggcctgttgcagcccctgccgtgttctttcgagatggggttacctaggagacgattctcgtccgaggcagccgagagtggcagtccggagactaagaagcccacattcatggacgaagaggtccagagcattctgactaagatgacagggctgaacctccaaaagacattcaaaccggctatccaggagctaaaacctccaacatacaaactgatgacccaggcacagctcgaggaagcaacacgtcaggcagtggaggccgctaaagttcgactgaagatgcctccggttctggaggaacgagtaccaattaacgacgtgctggctgaagacaaaattctggagggaaccgagaccacgaagtatgtctttaccgacataagttactccattccccatcgagaaaggttcatcgttgtacgagaacctagcgggacgcttcgaaaagcctcttgggaggaacgggacaggatgatccaggtgtactttcccaaagaagggcggaaaattctcacgcccattatttttaaggaggaaaatttgcgtaccatgtactcacaggaccgacacgtggacgtgctgaacttgtgcttcgcccagttcgagcccgacagcactgagtacatcaaggtacaccacaaaacatacgaagatatcgacaagcgtggcaaatacgatctgcttaggagtacacgatactttggagggatggtctggtactttgtgaacaataaaaagatcgatggcctgttgatagatcaaattcagagagacctgattgatgacgcaacaaatctggttcagctttatcacgtgctgcacccagatggtcagtctgcgcaaggagccaaagatcaagctgctgaggggattaatctgattaaggtattcgccaagaccgaggctcaaaaaggcgcatatatcgagctgacactgcaaacctatcaggaagcactgtcgcggcacagcgctgcctcatag

SEQ ID NO: 195454 - DNA, 507 bp, synthetic construct
  misc_feature 1..507: note = Description of Artificial Sequence: Synthetic coding sequence
  source 1..507: mol_type = other DNA
atggcccccctgggcaccaccgtgctgctgtggagcctgctgcggtccagtcccggtgttgaaagggtgtgctttagggcacggattcagccatggcacgggggcctgcttcagccacttccttgtagtttcgagatggggctgccgcgaagaagattctccagtgaggctgaaagtggcagccccgaaacaaaaaagcccacatttatggacgaggaggtgcaatccattctcaccaaaatgacaggacttaatctccagaaaacctttaagcccgccatccaagagctaaagccccccacatataaactcatgactcaggcccagctcgaggaggccacccggcaggccgttgaagctgcgaaggtgaggctgaaaatgcctccagttctagaagagagggttccaattaatgatgtgttggctgaggacaagatcctagaaggcacggagactacaaagtacgtcttcacagatatcagctattccattccgcacagatgctag

SEQ ID NO: 195455 - DNA, 573 bp, synthetic construct
  misc_feature 1..573: note = Description of Artificial Sequence: Synthetic coding sequence
  source 1..573: mol_type = other DNA
atggccggcagccggctggagaccgtgggcagcatcttcagccggacccgcgacttggtgagagccggtgtcttaaaggagaaacctctgtggtttgatgtgtacgatgcgttccccccgctacgagagcctgtttttcaacgtccgagagttcgttacggaaaggcgaaagcacctatacaggacatctggtaccacgaagacagaataagggctaaattctactcagtttacggctcaggtcaaagggcttttgatctattcaacccaaactttaagtcaacctgtcagcggtttgttgaaaagtatactgagctccagaagctgggtgagactgatgaggaaaagctgttcgttgagaccggaaaggcattgctcgccgagggtgtgatcctccggcgggtaggcgaggctagaacgcaacacggcgggagtcacgtctctcgcaaaagtgaacacttgagcgtaaggccacagactgcacttgaggaaaatgagactcagaaagaagttccccaagaccagcatttagaagctcccgccgatcagtccaagggactgctgccgccatag

SEQ ID NO: 195456 - DNA, 504 bp, synthetic construct
  misc_feature 1..504: note = Description of Artificial Sequence: Synthetic coding sequence
  source 1..504: mol_type = other DNA
atggccgccagcgtgtgcagcggcctgctgggcccccgggtgctgtcctggtctagggagctgccttgtgcctggcgtgctttgcacactagtcccgtgtgtgctaagaaccgagccgctcgggtcagggtcagcaagggcgataaacccgtgacctatgaagaggctcacgctccccattatattgcccatcgaaagggctggttgtctcttcacacagggaacctcgacggtgaagaccacgcagcagaaaggaccgtcgaggatgtatttctccgtaagttcatgtgggggaccttccctggatgtctggcagatcaactcgtgctcaaaaggcgtgggaaccagttggaaatttgtgctgtagtgcttcggcagctttcccctcacaagtattattttttggtgggctacagtgagaccctactgagttacttctataagtgtcctgtgcgccttcatctacaaaccgtaccctccaaagtggtctataagtatctctag

SEQ ID NO: 195457 - DNA, 522 bp, synthetic construct
  misc_feature 1..522: note = Description of Artificial Sequence: Synthetic coding sequence
  source 1..522: mol_type = other DNA
atgcccatgaagggccggttccccatccggcggaccctgcagtacctctctcagggcaatgttgtctttaaagattccgtgaaagtaatgactgttaactataacacccacggggaactgggagaaggggcacgtaaatttgtcttctttaacatccctcaaattcagtacaagaacccctgggttcaaatcatgatgtttaagaatatgacacccagcccttttctacgcttttacctcgattccggcgagcaggtgttagtcgatgttgaaaccaagagcaacaaggagattatggaacacattagaaagatcttgggcaaaaacgaggagaccctcagagaggaggaggaggaaaaaaagcagcttagtcatcccgcaaatttcgggcctcgcaaatattgccttagggagtgtatctgtgaggtggagggccaggtgccctgtccgagccttgtcccacttcctaaagaaatgcgtggtaagtacaaggccgccttgaaggccgatgctcaggattag

SEQ ID NO: 195458 - DNA, 333 bp, synthetic construct
  misc_feature 1..333: note = Description of Artificial Sequence: Synthetic coding sequence
  source 1..333: mol_type = other DNA
atgcccatgaagggccggttccccatccggcggaccctgcagtacctgagtcaggggaatgtggtgttcaaagattccgtgaaagttatgacagtcaattacaatactcacggagagctgggcgaaggtgctcgaaaattcgtttttttcaacatacctcagatccaatataagaatccttgggttcagattatgatgtttaaaaacatgacccccagcccatttttgagattttatctcgattcgggggaacaggtgctggtagacgtcgagacaaaaagtaacaaagagataatggagcacatccggaaaattctgggcaagaacgagtag

SEQ ID NO: 195459 - DNA, 390 bp, synthetic construct
  misc_feature 1..390: note = Description of Artificial Sequence: Synthetic coding sequence
  source 1..390: mol_type = other DNA
atgcccatgaagggccggttccccatccggcggaccctgcagtacttgtctcaggggaatgttgttttcaaggactctgtgaaggtcatgaccgttaattataacacgcatggcgagttgggagagggcgcccggaagtttgtttttttcaatatcccccaaattcagtataaaaacccgtgggtccagataatgatgtttaagaacatgaccccatcgccatttctccggttctatcttgggaaaccaagtggtaaacggcgacgccgcaagtcctctttcctaacacaacccacgtccgccctggaaagcactgcttgtggcagcgcatcagtgaaatggaaagggcgctgtcctgctcccgcatggtgccactaccctcgtcgatag

SEQ ID NO: 195460 - DNA, 333 bp, synthetic construct
  misc_feature 1..333: note = Description of Artificial Sequence: Synthetic coding sequence
  source 1..333: mol_type = other DNA
atgcccatgaagggccggttccccatccggcggaccctgcagtacctgagtcagggtaatgtggtcttcaaggatagtgttaaagtgatgactgtgaattacaacacccacggagagttaggcgaaggggcgcgcaagtttgtctttttcaacattccccagattcagtataagaatccctgggtgcagatcatgatgtttaagaatatgacaccctcccccttccttcgcttttatctcgattccggtgagcaagtactcgtggatgtagagacaaaaagcaataaggagatcatggaacacatccgtaagatcctgggaaaaaatgaatag

SEQ ID NO: 195461 - DNA, 438 bp, synthetic construct
  misc_feature 1..438: note = Description of Artificial Sequence: Synthetic coding sequence
  source 1..438: mol_type = other DNA
atgcccatgaagggccggttccccatccggcggaccctgcagtacctgtcccagggtaacgtggtgtttaaagatagcgtgaaggtgatgactgttaattacaacactcatggcgaacttggcgagggggccaggaaatttgtgttctttaatatcccccagatccaatacaagaacccgtgggtgcagattatgatgtttaaaaacatgacaccttcacccttcctgaggttctacctggactccggcgaacaggtcctcgtagacgttgaaactaaatcaaacaaagagattatggagcacatacgcaaaatactcgggaagaacgaacattacctcgccgcccctagtaaacccgtgtcatccgcagtggtgcccgtcacccaggaagcggaggctggaggcagcctcgagccacgcagactgagactcgaatag

SEQ ID NO: 195462 - DNA, 618 bp, synthetic construct
  misc_feature 1..618: note = Description of Artificial Sequence: Synthetic coding sequence
  source 1..618: mol_type = other DNA
atgctgcgggccctgagccggctgggcgccggcaccccctgccggcctcgtgcacccctggtcttacccgccagggggagaaagaccagacacgacccattagccaagtctaagatcgagcgggtgaatatgcctccggccgtagacccagctgagttttttgtgctcatggaacggtaccaacattacagacagacagtgagagctttaagaatggagttcgtgagcgaggtgcagaggaaagttcacgaggcaagagctggcgtgttggctgaaaggaaagcactcaaagatgccgcggagcaccgcgaactaatggcttggaaccaggccgagaatcggcgactacatgagctccgcatagcgcgcctgaggcaggaggagagggaacaggagcaacgacaggccctggaacaggcccggaaagccgaagaggtccaagcctgggcccagaggaaagaaagggaagtcctccagctgcaagaggaggtaaagaatttcattaccagggaaaatttggaggcaagggtcgaggcggctctggactcacggaagaactacaattgggcgatcacaagagagggtctggttgtgcgaccccagcggcgtgattcatag

SEQ ID NO: 195463 - DNA, 1245 bp, synthetic construct
  misc_feature 1..1245: note = Description of Artificial Sequence: Synthetic coding sequence
  source 1..1245: mol_type = other DNA
atggccgccagcatcgtgcggcggggcatgctgctggcccggcaggttgttctgccacagctttctccagccggcaagcgctatttgctgagctctgcctacgtagattcccacaaatgggaggcacgagagaaagagcactactgcttggctgatctggccagccttatggataagactttcgagcggaaactgccggtaagctctctaaccatcagcaggctgatcgataatatatccagcagagaggagatagaccatgccgaatattatttatataaatttagacattcaccaaattgttggtacctgcggaattggaccattcatacttggataagacagtgcctgaagtatgatgcgcaggataaagcattgtacacccttgtgaacaaagtgcaatatggaatttttccagacaactttacctttaacttacttatggattctttcatcaagaaagagaactacaaagatgccctctcagtggtgttcgaggtcatgatgcaagaagcatttgaggtgccttccacccagttgctctctctttacgtcctttttcactgtctggccaaaaagaccgacttttcatgggaggaggaaaggaactttggcgctagtctgctcctcccagggctgaaacaaaagaattccgtaggattctcatctcagctatatggttatgcactgctcggcaaagtcgagctacagcaaggcctgcgggctgtttaccataacatgccgctaatttggaaaccgggttacctggatagagctctgcaggtgatggaaaaggtggccgcatcccctgaggatattaagctgtgcagggaggctctagacgttctgggagccgtgctaaaggcactgacttccgctgacggcgcctctgaggagcaaagtcagaatgacgaggacaatcaggggagcgaaaaactcgtagaacagctggacattgaagagacagagcagagcaagttgccacaatacctcgagcgcttcaaagccctccatagcaaactgcaagcacttggtaaaatcgaatctgaggggctcctcagcctgaccacccagctcgttaaagagaaactgtccacatgcgaggcagaagacatcgctacctatgagcagaatcttcagcagtggcatttggacttggttcagctcatccagagggagcaacagcagcgagaacaggcaaagcaggagtatcaagcccagaaagccgcaaaagcttccgcctag

SEQ ID NO: 195464 - DNA, 1077 bp, synthetic construct
  misc_feature 1..1077: note = Description of Artificial Sequence: Synthetic coding sequence
  source 1..1077: mol_type = other DNA
atggacaagaccttcgagcggaagctgcccgtgagcagcctgaccattagcagattgatcgacaacatctcgtctagggaagaaattgatcacgcagagtactacctgtataagttcagacatagtcccaactgctggtacctaagaaactggaccatacacacctggattagacagtgcctgaagtacgacgcccaggacaaagcactgtacacactcgtgaacaaggtgcagtacggcatatttcccgataatttcaccttcaatcttctgatggatagctttataaagaaggaaaactacaaggatgcactgagtgtggtgtttgaggtaatgatgcaagaggcctttgaggtgccctcaacccagctcctgagtctctatgttctcttccattgcctggcaaagaaaaccgacttcagttgggaggaggaacgcaattttggggctagcctccttcttcccgggctgaagcaaaagaactctgtagggttttcgtctcaactgtacggctacgctctactgggcaaggtggagctccagcaggggttgcgtgcagtatatcacaatatgcccctgatttggaaacctggctatcttgaccgggcccttcaggtgatggaaaaggtggccgcctctccagaagacattaagctctgcagagaagccctggatgtcctgggtgccgtcctgaaggcattgactagcgccgacggggctagcgaggaacagtcccagaacgatgaggataaccagggcagcgaaaaacttgtcgaacagcttgacatagaggaaaccgagcagtcaaaactgcctcagtacctggagcgctttaaggctctccatagtaaactgcaggccctgggaaagatagagagcgagggcctgctcagtcttactacccagttagtgaaggaaaagctctccacatgcgaggccgaggatattgctacatatgaacagaacctccagcaatggcatctggacctggttcagctgatacagcgcgaacagcagcagagagaacaggccaaacaggaatatcaggcacagaaggcagctaaggcttcggcctag

SEQ ID NO: 195465 - DNA, 1287 bp, synthetic construct
  misc_feature 1..1287: note = Description of Artificial Sequence: Synthetic coding sequence
  source 1..1287: mol_type = other DNA
atggccgccagcatcgtgcggcggggcatgctgctggcccggcaggtggtgcttccccaattgtctcccgccggcaaaaggtatctcctgagctcagcctacgtggatagccataaatgggaggcccgggagaaagaacattactgcctggccgatttggcctcactgatggacaagaccttcgaacgcaaactccctgtgtcgagccttaccatttccaggctaatagacaacatttcttcacgtgaagaaatcgatcatgccgaatattatctctataaaaaaggtgagtgctccagcagcaatccacagaactattctagattcaggcacagccctaactgttggtacttacgaaattggactatccatacatggattcggcagtgccttaaatatgatgcccaagataaggcgctatacactctggtgaacaaagttcagtatgggattttccccgataattttacttttaatttattaatggactcttttatcaaaaaagagaactacaaggacgctctttcagtcgtctttgaagtaatgatgcaggaggctttcgaagtgccatccacccagctgctcagtctgtatgtcctctttcactgtctcgctaaaaagactgacttctcatgggaggaggagcggaattttggcgctagcctacttctgccagggctaaaacagaaaaactcggtagggttctcatctcagttgtatggctatgcgctcttagggaaggtcgagctacaacaggggctcagggccgtttatcacaatatgcctcttatctggaaaccaggctacttggatagggctctgcaggtaatggaaaaagtggctgcctctccagaagacatcaaactgtgcagagaagccttagatgttctgggcgcagtccttaaagctctgaccagcgctgacggagcttctgaggaacagtcccaaaacgatgaagacaaccagggatccgaaaagttggtcgagcagttggacatcgaggagacggagcagtctaagttgccccagtatctcgagcgttttaaagctctacactcaaagctccaggccttaggcaagattgaatctgaggggctgttatctctcactacgcaactggtaaaagagaagcttagcacgtgtgaggctgaagatatcgccacctacgaacagaaccttcagcagtggcatctggatctggtccagctgattcaaagggaacagcaacagcgagagcaggctaagcaggaatatcaggcacaaaaagccgccaaagcctcagcatag

SEQ ID NO: 195466 - DNA, 564 bp, synthetic construct
  misc_feature 1..564: note = Description of Artificial Sequence: Synthetic coding sequence
  source 1..564: mol_type = other DNA
atggccgccctgtgccggacccgggccgtggccgccgagagccacttcctccgagtcttcctattcttcagaccttttcggggtgtcgggactgagagcggtagcgagtctgggtcatcgaatgcaaaggaacctaagacccgtgctggcgggttcgcaagcgcattggagcgtcactcagagttgctgcagaaagtggagcctctccaaaaaggtagtcctaaaaacgtggaatctttcgcgagcatgctgaggcattcccctctgactcagatggggcctgccaaggataaactggtgatcggtcggatattccatattgtagaaaatgatctttatatcgactttggtgggaaattccattgcgtatgccgtaggccggaggtggacggtgaaaaataccaaaaaggtaccagagtgaggttgagactgctggacctggagttgacgtctaggttcctcggcgccactacagataccaccgtcctagaggctaatgctgtgctgttggggattcaggagtctaaggatagcagaagtaaggaagaacaccacgagaaatag

SEQ ID NO: 195467 - DNA, 1320 bp, synthetic construct
  misc_feature 1..1320: note = Description of Artificial Sequence: Synthetic coding sequence
  source 1..1320: mol_type = other DNA
atggccgccgcccggtgctggcggcccctgctgcggggcccccggctgtccctgcacacagccgcaaatgcggctgctactgccactgagaccacatgtcaggacgttgccgccacgcctgtggccaggtacccccccatcgtcgcctccatgactgcggactccaaagccgctcgtctcaggaggatcgagagatggcaagcgaccgtgcatgcggctgaaagcgtggacgagaaactgcgcattttgaccaagatgcaattcatgaaatatatggtctacccccagacgttcgcccttaatgccgaccgatggtaccagtattttacaaagaccgtctttcttagcgggctgccaccccctcctgccgagccagagccagaacctgagcctgagccagaacccgcgcttgatctggccgcattacgagccgtagcctgtgattgtctgttacaagaacacttctacctgagaaggagaagacgagtacacagatacgaggagagtgaggtgatttccttgccctttcttgatcagctggtaagtacgcttgtggggttactcagcccccacaatcccgctctggctgccgcggcacttgattaccggtgtcccgtgcacttctattgggtcagaggagaggaaattatcccccgaggacaccgcaggggaagaatcgacgatttgagatatcagatcgatgacaagccaaacaatcaaatccggatttcgaaacagctcgccgagtttgtgcccctggactacagcgtccccatagaaattcccactattaaatgtaaaccggacaaactgccgttgttcaaaagacaatacgagaaccatatcttcgtgggcagtaagaccgcggatccatgttgttatggccacacccagtttcatttgcttccagacaagctgcgccgggagaggctgttgcggcagaactgtgccgaccagatcgaagtggtgttccgcgctaatgccatcgctagcctttttgcctggactggagcacaggccatgtatcagggcttctggtctgaggccgacgtaacaaggccattcgtttcccaggctgttataacagatgggaagtatttctcatttttctgctaccagttgaatactctggccctcacaacccaggcagaccaaaacaacccgaggaagaatatctgctggggaacgcaatctaaaccgctttacgagacgattgaggacaatgacgtcaaaggcttcaatgacgatgttctgctgcagattgttcacttcctcctaaatagacctaaagaggaaaaatctcagcttctcgagaactag

SEQ ID NO: 195468 - DNA, 1188 bp, synthetic construct
  misc_feature 1..1188: note = Description of Artificial Sequence: Synthetic coding sequence
  source 1..1188: mol_type = other DNA
atgttcccccgggtgagcaccttcctgcccctgcggcccctgagccgacaccccctgtcaagtgggtccccagagactagcgcggcggccataatgctcttgacagtccggcacggtacggtccggtatcggtcttctgcactgttagcacgcactaaaaataatatacagagatacttcggaactaactctgttatctgcagcaaaaaagataagcagtcggtacggaccgaggaaacatcaaaagaaacctctgagagccaggatagtgagaaagagaataccaagaaggatttactcggaatcattaagggcatgaaagtggaactttccacggtgaatgtcaggaccaccaaaccgcccaaacgccgccctctaaaatccctggaagcaacattgggtcgcttgagacgggccaccgaatatgctcccaaaaaacggatcgagccactctcaccagagctcgtcgccgccgcttccgctgtagccgactcccttccgttcgataaacagaccacaaaatctgaactgctgtctcagctccagcagcatgaggaggaaagccgtgcgcagcgggatgcgaagcgtcccaagatatcgttttccaatataatcagtgacatgaaggttgcaaggtccgccacagcgagggtgcggtcacggcctgagcttaggatccagttcgacgaggggtatgacaattatcctggacaggaaaaaacggacgatctgaaaaaaagaaagaatatctttactggcaaacggcttaatattttcgatatgatggctgtcacaaaggaagcccctgagacagacactagcccgtctctgtgggatgttgagtttgccaagcagttggctaccgtgaatgaacagccacttcagaacggctttgaagagcttatccagtggaccaaggaaggaaagctctgggaattccctattaacaacgaggcaggatttgacgacgacggatccgagtttcatgaacatatttttctggaaaaacacctagagtccttcccgaagcaggggccaatccgccacttcatggaactagtcacatgtgggttgtccaaaaacccttatctttctgttaaacagaaggttgagcacatcgagtggttccgtaattacttcaatgaaaagaaagacatactgaaagagagtaatatacagtttaattag

SEQ ID NO: 195469 - DNA, 321 bp, synthetic construct
  misc_feature 1..321: note = Description of Artificial Sequence: Synthetic coding sequence
  source 1..321: mol_type = other DNA
atgagcagcctgagcgagtacgccttccggatgagccggctgagcgcccgattgttcggggaagtcactcggcccactaacagtaagagtatgaaagttgtgaagctgttttcggaactgcccttagccaagaaaaaagaaacctatgactggtacccgaaccatcatacctatgcggagctgatgcagaccttgagatttctcggcctgtaccgggatgagcaccaagactttatggacgagcagaagcggctcaagaagctgcgggggaaggaaaagccaaaaaaaggcgaaggaaagagagccgcgaagcggaaatag

SEQ ID NO: 195470 - DNA, 321 bp, synthetic construct
  misc_feature 1..321: note = Description of Artificial Sequence: Synthetic coding sequence
  source 1..321: mol_type = other DNA
atgagcagcctgagcgagtacgccttccggatgagccggctgagcgcaaggctttttggagaggtgacacgcccaactaacagtaagtcaatgaaggtcgtcaagttattcagcgaactacccctcgctaagaagaaagagacttacgactggtaccccaaccatcacacctacgccgagctgatgcagactctgaggtttttaggtctgtatcgggatgagcaccaggacttcatggacgagcagaagaggctgaaaaagttgaggggtaaagaaaagccaaagaagggagaaggcaaacgagcagctaaaagaaaatag

SEQ ID NO: 195471 - DNA, 321 bp, synthetic construct
  misc_feature 1..321: note = Description of Artificial Sequence: Synthetic coding sequence
  source 1..321: mol_type = other DNA
atgagcagcctgagcgagtacgccttccggatgagccggctgagcgcccggctctttggtgaagttacccggcccacaaactcaaaaagcatgaaagtggtaaagctgttcagcgagcttcctctggcaaaaaaaaaggagacatacgactggtatccgaaccatcatacctatgccgagcttatgcaaaccttgaggttcctcgggctgtacagggacgagcaccaggactttatggatgaacagaagcgccttaaaaagttaagaggaaaggaaaaaccaaagaaaggggaggggaaacgtgccgcaaaaaggaagtag

SEQ ID NO: 195472 - DNA, 321 bp, synthetic construct
  misc_feature 1..321: note = Description of Artificial Sequence: Synthetic coding sequence
  source 1..321: mol_type = other DNA
atgagcagcctgagcgagtacgccttccggatgagccggctgagcgcacgtttgttcggagaagtgacgagacctactaattccaagagtatgaaggtcgttaagttgttttccgagctacccctcgccaagaaaaaagagacttatgactggtatcctaatcaccatacgtacgcagagcttatgcagacattgaggtttttagggctgtaccgggacgaacatcaggactttatggacgaacagaagcgattgaaaaaacttagaggcaaagagaagcccaagaagggcgagggcaaacgtgcagccaaacgaaagtag

SEQ ID NO: 195473 - DNA, 339 bp, synthetic construct
  misc_feature 1..339: note = Description of Artificial Sequence: Synthetic coding sequence
  source 1..339: mol_type = other DNA
atgagcagcctgagcgagtacgccttccggatgagccggctgagcgctaggctgttcggcgaagtcaccagaccgaccaatagtaaatctatgaaagttgttaaactgttctcagagctgccccttgctaaaaaaaaggagacctacgactggtacccaaaccatcatacttacgctgagctgatgcagacccttcggtttttagggttgtaccgcgatgagcaccaggacttcatggatgagcagaagagacttaagaagctgcgggggaaagaaaaaccaaagaagggcgagggcaagcgggctgctaagcggaaaaaaaaaaagaaaaaacgttag

SEQ ID NO: 195474 - DNA, 678 bp, synthetic construct
  misc_feature 1..678: note = Description of Artificial Sequence: Synthetic coding sequence
  source 1..678: mol_type = other DNA
atggcccggaagaaggtgcggccccggctgatcgccgagctggccaggagggttagggctttgcgggagcagctaaatcgacctcgcgattcacaattgtacgcggtggattacgaaaccttgacgagaccattcagtggacggcgcttacctgtgagagcctgggccgatgtgcgcagagaaagcaggctgctgcaactgctgggccgcttacctttgtttgggctgggaaggctcgtaaccaggaaatcatggctctggcagcatgatgagccatgctactggcggctgactagggtcaggcccgactataccgcccaaaatctagaccatggcaaagcctggggtatcttgacatttaaagatgcttcgttctcaagctccgggaagacggagtctgaggctagggagattgaacatgttatgtaccacgattggcgcctggtaccgaaacatgaggaggaggcatttaccgcatttacccctgctcctgaggactcgttagcatccgtcccatatcctccattactgcgtgcgatgattatcgctgaacggcagaagaatggcgacacatctaccgaggagcctatgctcaatgtgcagagaatcagaatggagccttgggactatcccgcgaaacaggaagataaaggaagagctaaagggacaccggtgtag

SEQ ID NO: 195475 - DNA, 657 bp, synthetic construct
  misc_feature 1..657: note = Description of Artificial Sequence: Synthetic coding sequence
  source 1..657: mol_type = other DNA
atggcccggaagaaggtgcggccccggctgatcgccgagctggccagaagagtcagagcattgcgagagcaactgaataggccacgagactctcagttatatgcagtcgattatgaaacactgacaagacccttctccggtcgccgcctgcctgtgcgagcttgggctgatgttcgacgcgagtcccggctactgcaactgctggggcgcctgcccctgttcgggttaggaagacttgtaacccgtaaaagctggctttggcagcatgacgagccatgctattggcggctgaccagggtgagacctgactacacagcacagaacctcgatcatgggaaggcctggggtattttgacctttaagggaaaaacagaatctgaggctcgggaaattgagcatgtgatgtaccacgattggcgactggtgcctaagcatgaggaggaggcttttacggccttcacacctgcaccagaggatagtcttgcatccgtgccgtatccgccactccttcgtgccatgatcatcgcagaaaggcaaaaaaacggtgatacgtctaccgaagaacctatgctgaacgtccagaggattcggatggagccctgggattacccggctaaacaggaggacaaaggacgggccaaaggcaccccagtctag

SEQ ID NO: 195476 - DNA, 972 bp, synthetic construct
  misc_feature 1..972: note = Description of Artificial Sequence: Synthetic coding sequence
  source 1..972: mol_type = other DNA
atggccgccgccgccctgcccgcctggctgagcctgcagagccgggcacgtacgctgagagctttcagtacggctgtatatagcgcaacgccagtgccgacacctagcttaccagagagaacgcctggcaatgagcggccccctcggcggaaagccctccctccacgaaccgagaaaatggctgtggatcaggactggccttctgtgtaccccgtcgctgccccattcaaacctagcgcagtcccattgccagtgaggatgggatatccagtgaagaagggggtgcctatggccaaggagggtaacctggagcttctgaaaatacccaactttctccacctgacacccgtcgcaataaaaaaacactgtgaggcccttaaagacttttgcaccgagtggcccgctgccttggactccgacgaaaagtgtgaaaagcacttcccgatcgagattgactctacagactacgtatctagtgggcccagcgtgcgaaacccacgggcgcgggtggtggtgctgagggtgaaactgagttctttgaacctggatgaccatgcaaagaaaaagctgattaaactggtgggggaacgctattgcaaaaccacagatgtccttaccataaaaaccgataggtgtcctcttaggcggcagaattatgattacgcagtatacttgctgaccgtattgtaccacgagtcctggaacactgaggaatgggagaaatccaagactgaggctgacatggaggagtatatctgggaaaatagcagctccgaacgcaatatcttggaaacgctcttacagatgaaggccgcagagaagaacatggagatcaacaaagaagagctgttgggcacaaaggagattgaagagtataagaaatcagtcgtctcattgaagaatgaggaggaaaacgagaactcaattagccagtataaagaatccgtcaaaaggctcctaaacgttacctag

SEQ ID NO: 195477 - DNA, 864 bp, synthetic construct
  misc_feature 1..864: note = Description of Artificial Sequence: Synthetic coding sequence
  source 1..864: mol_type = other DNA
atggccgccgccgccctgcccgcctggctgagcctgcagagccgggcacgcacactgcgggctttttccaccgccgtttattcagcaacacctgttcctacacccagcctgcccgagaggacaccgggtaacgagcggcctcctagaaggaaggcactaccacctagaacggaaaagatggcagttgaccaggactggcctagtgtctatcccgttgctgcacccttcaaaccatcagcagtccccctgccagttcgtatgggatatcctgtgaagaagggtgtccctatggctaaagagggaaacttagagctgctgaaaatccctaatttccttcatctgactcccgtagccattaagaaacattgtgaggcactgaaagacttctgtacagagtggccagctgcactcgactctgatgagaagtgcgaaaagcactttccgatagaaatcgactccactgactatgtcagttccggaccaagtgtaaggaatcctagggctcgggttgtagttctgcgcaggtgcccattacgaaggcagaattatgattatgccgtttacctgcttactgtactgtaccacgaaagctggaataccgaggaatgggagaagtccaagacggaggcagatatggaagagtacatctgggaaaactcctcctctgaacgtaacattttggaaacactcctgcagatgaaagccgcagagaaaaatatggaaatcaacaaggaagagttgctcgggaccaaggaaatcgaagaatataagaagagtgtggtgtctctgaagaatgaggaggagaatgagaactctatcagtcaatataaggaaagcgtcaaacgcctgctcaacgtcacatag

SEQ ID NO: 195478 - DNA, 585 bp, synthetic construct
  misc_feature 1..585: note = Description of Artificial Sequence: Synthetic coding sequence
  source 1..585: mol_type = other DNA
atggccgccgccgccctgcccgcctggctgagcctgcagagccgggcccggacgttgcgggcatttagcaccgccgtttacagcgcaacacctgtacctactccttctctgcccgagcgtacaccaggaaacgagcgcccccctaggaggaaagcccttccacccaggactgagaaaatggccgttgatcaagactggccgtctgtatatcctgtcgccgccccctttaaaccatccgccgttcctctccccgtgagaatgggctatcctgttaagaaaggggtgccaatggctaaggaaggaaatctagagttgcttaaaataccaaattttctacacctgacacctgttgctataaagaaacattgcgaagctctgaaggacttttgtaccgaatggcccgcggcactggactcagacgaaaagtgcgagaaacacttccccatcgaaatcgacagcacagattacgtatctagcggtccaagcgtgcgtaatcccagggcgcgggtagtcgtcttgagggtgcctttcaaggaagctgagctgaggctttgctcagtatccacaaatagcgttataccttag

SEQ ID NO: 195479 - DNA, 312 bp, synthetic construct
  misc_feature 1..312: note = Description of Artificial Sequence: Synthetic coding sequence
  source 1..312: mol_type = other DNA
atgatgggcagcaagatggccagcgccagccgggtggtgcaggtggtgaaaccacatacccctctgatccgctttccggatcgacgagacaatccaaaacctaacgtgtctgaagccctcagaagcgctggactgccgtcccactcctctgttatttcgcagcacagcaaggggtccaaatctccagatctgctgatgtaccagggtccgccagacacagctgaaataatcaaaacgcttccacagaaataccgcaggaaacttgtgtcccaggaggagatggaatttatccagagaggcgggcccgaatag

SEQ ID NO: 195480 - DNA, 1293 bp, synthetic construct
  misc_feature 1..1293: note = Description of Artificial Sequence: Synthetic coding sequence
  source 1..1293: mol_type = other DNA
atggccaccgccgtgcgggccgtgggctgcctgcccgtgctgtgctcaggcaccgcgggtcatctgcttggaagacaatgtagcctcaacactctacctgccgcctcaatcctggcctggaaatcagttctgggaaacggccatttaagctcactgggcacgagagacactcacccctacgcttcccttagtcgcgccctgcagacacaatgctgcatcagcagccccagtcacttgatgagccagcagtaccggccttacagcttcttcaccaaactcaccgctgacgaactttggaagggcgccttggccgagactggggcaggcgccaaaaagggacggggcaagcggacaaaaaaaaagaaaagaaaggacctcaatagaggccagataatcggcgagggtaggtacggcttcctgtggcccgggctgaacgtgcccctcatgaagaacggagctgtgcagactatagcccagcgctccaaggaggaacaggagaaggtggaggcagatatgatccagcaacgcgaggagtgggaccgtaagaagaagatgaaagtaaagagagaacggggttggtctggaaactcctggggtggaatctcccttggacctcctgatcctggcccatgcggcgaaacctacgaagactttgatacacgtattcttgaggtaagaaacgtgttcactatgactgcaaaggaggggagaaaaaagtcgatccgggtgctggtggctgtcgggaacgggaagggagcagccggtttcagtattggtaaagctactgacaggatggacgcgttccggaaggcaaaaaatagggctgtgcatcatctgcactacattgagaggtacgaagaccatactattttccacgatatttctctgcggttcaaaaggactcacattaagatgaagaaacagcctaaagggtacgggttaagatgccacagggccatcatcaccatctgtaggctgattggaatcaaggacatgtacgccaaagtgagtggcagcatcaatatgctgtctttaacacaaggtctgttcaggggattgagccggcaggagacacatcagcaactagcggataagaagggcctgcacgtggtagagattcgggaggagtgtgggccattgcctattgtggttgcttcgccccgcggtcccttgcgtaaggaccccgagccagaagatgaagtccccgacgtcaaattagactgggaagacgtcaagacagctcaaggtatgaagcgctcagtttggtccaatctaaagcgggccgctacctag

SEQ ID NO: 195481 - DNA, 378 bp, synthetic construct
  misc_feature 1..378: note = Description of Artificial Sequence: Synthetic coding sequence
  source 1..378: mol_type = other DNA
atgccccggtacgagctggccctgatcctgaaggccatgcagcggcccgagaccgcggctacgctcaaaagaactatcgaggctctgatggatcgaggcgcaattgtccgggatctcgagaatttaggagagagggccctcccctaccggatctccgcccatagccagcagcacaaccggggcggctactttctggtcgatttctatgcccccactgctgcagtggaaagcatggtggagcacctcagccgggacatcgacgtgattcgagggaatatcgtgaagcaccctctgacccaggagctgaaggaatgtgaaggcatagtgccggtccctctggccgagaagctttactcgacgaagaagcggaaaaaatag

SEQ ID NO: 195482 - DNA, 729 bp, synthetic construct
  misc_feature 1..729: note = Description of Artificial Sequence: Synthetic coding sequence
  source 1..729: mol_type = other DNA
atggccgcccccgccgtgaaggtggcccggggctggagcggcctggctttaggggtgcgtcgggctgtcttacagttacccggtttgacgcaggttcggtggagcagatactcacctgaatttaaagacccgctgatcgataaggaatactaccggaagcccgtagaggagctgaccgaggaagaaaagtacgtgagagagctgaagaaaacccagctgattaaggccgcaccagccggcaaaaccagtagtgtcttcgaagaccccgttatcagcaaatttacgaatatgatgatgattggcggaaataaagttctggcccgctcgttaatgatccagactctcgaggccgtcaaaaggaaacaattcgagaagtatcacgcagcaagcgctgaggagcaggcgactatcgaaagaaatccctatacaatttttcaccaggcgctgaagaactgcgaacccatgattggtctagtccccatactcaagggcgggcggttctaccaggtgcctgtcccacttccagaccgcaggcggagatttttagctatgaagtggatgatcacagagtgcagagataagaaacaccagcgtaccttgatgccggaaaaactcagccacaaacttctcgaagcgtttcataatcaaggacccgtgatcaaacggaagcatgatctgcataagatggccgaagctaacagagcgctggcccactacaggtggtggtag

SEQ ID NO: 195483 - DNA, 1191 bp, synthetic construct
  misc_feature 1..1191: note = Description of Artificial Sequence: Synthetic coding sequence
  source 1..1191: mol_type = other DNA
atggccgccccctgcgtgagctacggcggcgccgtgagctaccggctgctcctgtggggccggggctctctggcccggaaacagggattgtggaaaactgctgcacctgaactgcagacaaatgttaggtcacagatcctacgcttaaggcatacggcctttgttataccaaaaaagaatgtgcccacttctaaacgcgagacctacacggaggacttcattaaaaaacagattgaggaattcaatatcggcaagaggcatttagcaaatatgatgggagaggatcctgagacgttcacacaagaggacatcgatcgggccatcgcttacctgttcccttccggcttgttcgaaaaacgcgccaggcccgtgatgaaacaccccgagcagatctttcctaggcagcgggcaatccagtggggagaggacgggaggcccttccattacttattctacaccggaaaacagtcctattacagcctcatgcacgatgtatatggaatgctgctcaacttggaaaaacatcagtctcatctgcaggccaagagcctgttaccagaaaaaactgtcactcgggatgtcattgggagcagatggttaattaaggaggaactcgaagaaatgcttgtggaaaagctgagtgacctggattatatgcagttcatcagactgttggagaagctcctcacatcacagtgtggggcagcagaggaagagtttgtgcagaggtttagacggagcgtcactctggagtccaaaaagcaactgatcgagccagtgcaatacgatgagcagggcatggcgttctctaaaagtgaggggaagaggaagacggccaaggctgaggccattgtttacaagcatggatctggacggattaaggtgaacgggatcgattaccaactgtatttccctattactcaggatcgggaacagctgatgtttccatttcactttgttgatcgccttggtaaacacgatgtcacctgtacagtgagcggggggggaaggtctgctcaagcaggcgccattagactcgccatggcgaaggctctttgcagcttcgtgactgaagacgaagtggagtggatgcgccaggccggattgctgactaccgacccgagggttcgtgaacgtaaaaaacccggccaagaaggggcacggagaaagttcacctggaaaaaaagatag

SEQ ID NO: 195484 - DNA, 1122 bp, synthetic construct
  misc_feature 1..1122: note = Description of Artificial Sequence: Synthetic coding sequence
  source 1..1122: mol_type = other DNA
atgtgggtgtgcagcaccctgtggcgggtgcggacccccgcccggcagtggcgaggactgctacccgcctctggctgccacgggcccgccgcctccagttactccgcatcagccgagcccgccagagtcagagccctggtatatggacaccacggagatcccgcaaaagtcgtggagttaaagaacctcgagttggctgccgtgaggggctccgacgtccgcgtcaagatgctggctgcccctataaatccatccgacatcaacatgattcagggaaactatggcttcttgcccgaactccctgctgtggggggcaatgagggagttgcccaggtggtggccgtcggaagcaacgtaaccggattgaaaccgggggattgggtgattcctgccaacgccggccttggtacgtggcgaactgaagccgtgttcagcgaggaggctctgattcaagtgccgagcgatatcccgttacagtcagcagccaccctgggtgtaaacccctgcactgcgtataggatgctgatggatttcgaacagcttcagcctggggattcagtaatccagaacgcatctaactccggggtgggtcaagccgtgatccagatcgccgccgctctgggtctgcggaccatcaacgtggtcagggacaggcccgacatccagaagttgtcagatcgcctgaagagcttgggagccgagcacgtgatcaccgaagaagaattgcgtagaccagagatgaaaaatttctttaaggatatgccccaaccccggctggcattaaactgtgtgggaggaaaatcttctacggagctgcttcgacagttggccaggggcggcacaatggtcacctacggaggcatggccaagcaacccgttgtagcctcagtttcactcctgattttcaaagatctgaaactacgcggcttctggctatcacagtggaaaaaggaccattcgcccgatcagtttaaggagcttattctcaccctgtgcgatctgatccggcggggccaactgactgcccctgcatgttctcaggtgcctcttcaagactatcaaagcgccctcgaagcctctatgaagccctttatcagttcaaagcagatactcacgatgtag

SEQ ID NO: 195485 - DNA, 894 bp, synthetic construct
  misc_feature 1..894: note = Description of Artificial Sequence: Synthetic coding sequence
  source 1..894: mol_type = other DNA
atgctggccgcccccatcaaccccagcgacatcaacatgatccagggaaactacgggttcctgcctgaattgccagccgtaggcggcaacgaaggggtggctcaggtggtggctgtggggtccaacgtgactggactgaaacccggggattgggtaatccccgccaatgctgggctcggcacgtggagaactgaggccgtgttttccgaggaagccctgattcaggtgccttcagatatcccactgcaatctgccgctacactgggcgtgaacccttgcactgcttataggatgctcatggactttgagcagttgcagccgggcgattccgtgatccagaatgccagcaattctggcgtgggtcaggcggttatccaaatagccgccgcattgggacttcgcacgattaatgtcgtgagagaccgcccagacatacagaagttgagtgaccggttgaaaagcctcggcgcagagcacgtgattaccgaagaagaattgaggcggcccgaaatgaaaaacttctttaaggacatgccccagccccgcctagcgctcaactgcgtcggaggaaaatcttctactgagctgctgcgccagcttgctcgcggcggcacaatggtcacctacggtggcatggctaagcagccagtagttgccagcgtgtcattgttgatctttaaggaccttaaactgcgaggattctggttatcacaatggaagaaagaccactcgccagaccaattcaaagaactgatcctgaccttatgcgatctgatccggagggggcaactgactgcaccagcctgtagccaggttccactccaagattaccagtcggcattggaggctagcatgaaaccttttatatcttctaagcagattctcactatgtag

SEQ ID NO: 195486 - DNA, 789 bp, synthetic construct
  misc_feature 1..789: note = Description of Artificial Sequence: Synthetic coding sequence
  source 1..789: mol_type = other DNA
atgatccagggcaactacggcttcctgcccgagctgcccgccgtgggcgggaacgagggggtggcacaggtggttgccgtgggttctaatgtgacagggctaaagcccggcgactgggtgattccagctaacgcgggcttaggaacatggaggaccgaagctgttttttccgaagaggccctgatccaggtgccctctgacatccctctgcagtcagccgccacactcggggtgaacccatgcactgcctacagaatgcttatggactttgaacagttgcagcccggagacagcgtcatccaaaacgcgagcaacagtggggtaggacaggccgtaattcagatcgcggctgccctaggcctccgaaccatcaatgtggtgcgtgatagaccagacatccagaagcttagtgatcggctcaagtcactgggggctgaacatgtgatcactgaggaagaattgcgccgacctgaaatgaagaatttcttcaagatacgcaaactgagactgcgcaaagaagaaatgctaaaccagaatcatattgtgtataaaggctcccgagagagtgagctagctagtgtgtcacccaacagcaagccactgaacttacctgaacctccaccacataacatgcctagacacgcaccagctacggcatgcagtcaattgtgctggtgggagaagctgcatcgcgcagccgccgcagttagcgcctggcggaatcatggcaatctttggggtgacggacaagccgcacgtagaagtctatgtgagcccgcccacttctag

SEQ ID NO: 195487 - DNA, 570 bp, synthetic construct
  misc_feature 1..570: note = Description of Artificial Sequence: Synthetic coding sequence
  source 1..570: mol_type = other DNA
gccaccctgggcgtgaacccctgcaccgcctaccggatgctgatggacttcgagcagctgcaaccaggcgacagtgtgatccaaaacgcctctaactcaggcgtgggccaggccgtaatccaaatcgcggccgcactggggcttcgcactatcaacgttgttagagacaggcctgatatccagaagctgtcagacagattaaaatcgctcggcgcggaacacgtgataactgaagaggagcttcgccgaccagaaatgaagaatttctttaagatcagaaagctgagactgaggaaggaggaaatgctgaaccaaaaccatattgtgtacaagggtagtcgggagtccgagctagcaagcgtcagccctaattcgaaacctcttaacctgccagaacccccgcctcataacatgccaaggcacgcgcctgccaccgcttgcagccaactatgctggtgggagaagctgcaccgggccgccgcagccgtgtctgcctggcggaatcacgggaacctgtggggagacggacaggcagcccggagaagtctatgtgaaccggcccatttttag

SEQ ID NO: 195488 - DNA, 1200 bp, synthetic construct
  misc_feature 1..1200: note = Description of Artificial Sequence: Synthetic coding sequence
  source 1..1200: mol_type = other DNA
atgcagagcctgagcctgggccagaccagcatcagcaagggcctgaattaccttactatcatggcccctggcaacctgtggcacatgcggaataacttccttttcggatctcgctgttggatgactagattctcggccgagaacattttcaagagcgtgtcgtttaggctatttggcgtgaaatgtcacaataccgactccgagccgctgaagaacgaagatcttctgaagaacctattaactatgggcgtagatatcgacatggcccgaaagcgccagccaggcgtcttccatcgtatgatcaccaatgagcaagatttgaaaatgtttctgctctccaagggagcatcaaaggaggtgattgccagcatcatcagccgttatccgcgggcaattacacgcacgcctgaaaatctgtctaagaggtgggatctttggaggaaaatcgtgacaagcgatctggaaattgttaatatccttgaacgtagccctgaatccttctttaggagtaataataatttaaacctggagaataatatcaaatttctgtactcagttggactgactcggaagtgcctgtgccggctgcttaccaatgcacccaggacattctctaactctctggacctgaacaagcagatggtcgagttcctgcaagccgctggcctaagcctcggacacaatgatcctgccgactttgtgaggaaaattattttcaagaacccattcatcctcatccagagcaccaagagagtaaaggctaatatcgagttcttgcgatctactttcaatctcaactctgaggagcttctggtgttaatatgtggccccggggccgaaattcttgatttatccaatgattatgcccggaggtcttatgccaatatcaaggaaaaactgttctccctcggttgcaccgaggaggaagtgcaaaagtttgtcctgagttaccccgacgtgatttttctagcagaaaaaaaattcaacgataagatcgattgcctcatggaagaaaacattagcatcagccagatcatcgaaaacccgagggtcttggactcatcaatctctaccctgaagtcccgaatcaaagaattagtaaatgccggctgcaatttgtctaccctgaacatcaccctgctgagctggtctaagaaacgctacgaggccaaactgaagaagctttcccggttcgcatag

SEQ ID NO: 195489 - DNA, 477 bp, synthetic construct
  misc_feature 1..477: note = Description of Artificial Sequence: Synthetic coding sequence
  source 1..477: mol_type = other DNA
atgcagagcctgagcctgggccagaccagcatcagcaagggcctgaattatctgacaatcatggctccaggaaatctgtggcacatgagaaataattttctgttcggttcccgctgctggatgacgaggttctccgccgagaacatatttaagtctgtgtcttttagattgttcggagtgaagtgccataacaccgactccgaacccctgaagaacgaagacttactgaagaatttactaaccatgggcgtcgacatcgacatggcacggaagagacagcccggcgtttttcataggatgattaccaatgagcaggacctgaaaatgttcttgctctctaaaggagcaagcaaggaagtgatcgccagcataatcagtcgctatccaagggctatcactcgcacacctgaaaacctcagcaaaagatgggatctctggcgcaaaattgtgacctctgatctcgaaatagtaaattag

SEQ ID NO: 195490 - DNA, 2184 bp, synthetic construct
  misc_feature 1..2184: note = Description of Artificial Sequence: Synthetic coding sequence
  source 1..2184: mol_type = other DNA
atgaaccagaagctgctgaagctggagaacctgctgcggttccacactatatacagacagctgcacagtctctgccaacgaagggcactgcgtcagtggcgtcatgggttttcttccgcctaccccgtctggacagcccaactttgtgcctggccctggccaaccgacgttctcactggcgcagctttatcccaatacagactcctcgttaccaagaaagaagaaggcccatggaagtctcagctgagctccacgaagagcaagaaagtggtcgaggtgtggattgggatgactatcgaagagctcgctcgtgcgatggagaagaataccgactatgtctacgaagccctcttaaacactgacattgacatcgattcgttggaagcagacagtcacttggacgaagtctggattaaggaagtcatcactaaggccggtatgaagcttaaatggtctaagttgaaacaagacaaggtcagaaagaacaaagatgcagtaagaagaccccaggctgaccccgctttactaacacccaggtcaccagtggtgactattatgggacacgttgaccatggcaagacaacactcctcgacaagttcaggaagacacaggtggctgccgttgaaacaggaggaatcacgcagcacattggcgccttccttgtgtctcttcctagtggggagaagataacctttcttgatacccctggtcatgctgcattttctgcaatgagagcccggggggcacaggtcactgatattgttgtacttgtggttgcagccgacgacggggtaatgaagcagactgtggaaagtattcagcacgccaaagatgcccaggtgcctatcattctcgccgtgaataagtgtgataaagcagaggctgaccctgaaaaggtcaaaaaggaactacttgcttatgatgttgtctgtgaggactatggtggcgatgtgcaggccgttcctgtgtccgctcttacaggcgataacctgatggctcttgctgaagcaacagtcgccctggccgaaatgttggaactgaaggcagaccccaacgggcccgtcgagggaactgttattgagagcttcaccgacaaggggagggggctggttacgacggccatcattcagagaggaacgctcagaaaggggagcgtccttgtcgcggggaagtgctgggcaaaggtgaggctgatgttcgacgagaacgggaagactattgatgaggcttaccccagcatgccggtgggtatcacgggctggagggacctgccctctgccggggaggagattctggaggtggaatccgaaccacgggcaagggaagtagtggattggaggaaatatgagcaagaacaagaaaaaggccaggaagacctcaaaattattgaagagaaacggaaggaacataaggaagcccatcaaaaagcccgggagaagtacggtcatcttctgtggaagaaacggagcatccttagatttctggaacggaaagagcagatcccgctaaagccaaaagaaaaacgggagagagactcaaacgtcttaagcgtgataataaagggtgatgttgacggatccgtcgaagccattctgaacatcatagatacatacgatgcatcccacgagtgtgagctcgagttggtccactttggagttggcgatgttagcgcgaatgacgtgaatctggcggagacattcgacggtgtgatttacggttttaatgtgaacgccggcaacgtgattcagcagtcagcagcgaagaagggcgtgaaaataaaactccataaaattatctacagactcgtcgaggatcttcaggaggaactgagtagccgcctaccttgcgcagtggaggagcatcctgtcggtgaggcctctatcctcgcgaccttttccgtgacggaagggaaaaagaaggtgcctgtcgccgggtgtcgcgttcaaaagggccagctagaaaaacaaaaaaagtttaagttgacaaggaatggtcacgtgatctggaaggggtccttgacctccctgaagcatcataaggacgacattagtattgttaaaaccgggatggactgcgggctgagcctggacgaggacaacatggagttccaggtgggcgatcgaattgtgtgttatgaggagaaacaaatccaggccaagacatcctgggatcccggcttctag

SEQ ID NO: 195491 - DNA, 219 bp, synthetic construct
  misc_feature 1..219: note = Description of Artificial Sequence: Synthetic coding sequence
  source 1..219: mol_type = other DNA
atgaaccagaagctgctgaagctggagaacctgctgcggttccacaccatctaccggcagttgcatagcctgtgccaaagacgggcactcaggcagtggcgacatggtttcagttcagcttaccccgtgtggaccgctcagctttgcgcatggccttggccaaccgatgttttgaccggcgctgctctaagccagtaccggttgcttgtcaccaaatag

SEQ ID NO: 195492 - DNA, 2184 bp, synthetic construct
  misc_feature 1..2184: note = Description of Artificial Sequence: Synthetic coding sequence
  source 1..2184: mol_type = other DNA
atgaaccagaagctgctgaagctggagaacctgctgcggttccacaccatctaccgccaactgcattccctgtgccagcgacgtgctctcaggcagtggcggcacggcttctctagcgcatatccagtttggaccgcgcagctgtgtgcatggccttggcctaccgatgttctgaccggcgccgctctgtcacaatacaggctgctggtcactaagaaagaagaagggccttggaagtcacagctgtctagtacaaaatctaagaaagtcgtcgaggtctggattggtatgacaattgaggaattggcccgagcaatggaaaagaacaccgattatgtgtatgaagcactgctaaataccgacatcgatatagactccttagaggccgattctcacctcgatgaagtatggattaaagaggttattacaaaggccggaatgaagctgaagtggtcgaagctcaaacaggataaggtccgaaagaataaggatgctgtccgcagacctcaagctgatcctgcccttctaaccccaaggtctcctgtggtcactatcatggggcatgtggaccatgggaaaactacactgctggataaatttcgcaagacacaggtagccgctgtcgagacaggtggcattacccagcacataggggctttccttgtttcccttcctagcggagaaaaaatcacattcctcgacacacctggccacgcagccttctcagctatgcgcgcccgcggcgctcaggtaaccgacatcgttgtcctcgtggtcgccgctgatgacggtgtgatgaaacaaacagtggaatcaattcagcacgctaaagacgcacaggtgcctattatcctggccgttaacaagtgtgacaaggccgaagcagacccggaaaaggtcaaaaaggaactgttggcctacgatgtggtctgtgaagactatggcggggatgtacaggcagtccctgtgtccgccctcacaggtgacaacctcatggccctcgccgaagcaactgtggctctagccgagatgttagagcttaaagctgaccctaatggccccgtagagggcacagtgattgagtcgttcactgataaggggcgaggtctggtgacaaccgctatcatccaaaggggaactctaaggaagggaagtgtcctggtcgcagggaagtgttgggccaaagtccgcctgatgttcgacgaaaatgggaaaactattgacgaggcttatccttccatgcctgtcggaattactggatggagagacctgccaagcgccggcgaagagatcctggaagtcgagtctgagcctagggcccgtgaggtagtggattggagaaagtatgagcaggaacaggagaagggccaagaagaccttaaaatcatcgaggagaagagaaaggaacataaagaggcccatcaaaaggccagagagaaatatggacacctgctgtggaagaagaggtcaattttgcggtttctggagaggaaggaacagatacctctcaagcctaaagaaaaaagagagcgcgatagtaacgtgctcagcgtgatcattaagggcgacgtggatggttccgtcgaagctattctgaatatcatcgatacctacgacgctagccatgaatgcgaattagaactggtgcacttcggggtaggagatgtatccgctaatgatgtcaatctcgctgagacattcgatggcgttatttacgggttcaacgtaaacgcgggcaacgtgatccagcagtcagccgcgaaaaagggagtaaaaatcaaactccacaaaattatctaccgactcgtagaggacctccaagaagagctctcttccagacttccatgtgcggtggaggagcaccccgtgggggaggcctcaatcctcgccacgtttagtgtcaccgaggggaagaagaaggttccggttgctggatgtcgggtgcaaaagggacaattggagaagcagaagaagttcaagttgaccagaaatggccatgtaatatggaaagggagcttgaccagcctcaagcatcacaaagacgatatctccatagttaagactggtatggactgtggcctgagcctggatgaggacaacatggagttccaggtgggtgacaggatcgtgtgttacgaggagaaacagattcaggctaaaactagctgggatcctggcttctag

SEQ ID NO: 195493 - DNA, 2184 bp, synthetic construct
  misc_feature 1..2184: note = Description of Artificial Sequence: Synthetic coding sequence
  source 1..2184: mol_type = other DNA
atgaaccagaagctgctgaagctggagaacctgctgcggttccacaccatctaccggcagctacacagcctctgtcagcgcagggcccttcgtcagtggcggcacggtttttcttcagcatatccagtgtggaccgcccaactctgcgcctggccgtggcccacagacgtgctgacaggggcagccctaagtcagtacaggttgcttgtaacaaaaaaggaagagggcccttggaagtcacagctgagttctactaagtctaaaaaggtggtggaggtgtggatcgggatgacaatcgaagagcttgcgagggccatggagaaaaacactgactacgtatacgaggccctgttgaacactgatatagacatcgactcacttgaagctgattcccacctggacgaagtttggattaaggaagtgattactaaagctggtatgaagctgaagtggagcaagctgaagcaagacaaagtgaggaagaataaggatgccgtgcggcgcccacaggcagatcccgccctgctgaccccccgatctccagtggtcactatcatgggtcacgtggatcacggcaaaactacactgttagataaattccgcaaaacacaggtggcggctgtggagacaggaggcattacgcagcacattggagccttcctggtcagtcttcctagtggggagaagataacttttctggacacccccggacacgccgctttcagtgcaatgagggctcgtggagctcaggtcaccgacatcgtggtgcttgtggtggctgccgatgatggggtgatgaagcagaccgtggagtccattcaacatgccaaagacgcccaggtgccaatcatcctggcggtgaataaatgtgataaagccgaagcagaccccgagaaagtaaaaaaagaactgcttgcctatgatgtggtttgcgaggattacggcggtgacgtacaggcagtgcctgtgtctgccctcacgggtgacaatctgatggctttggccgaggcaaccgtggccctagccgagatgctggagctgaaggccgatccaaacgggcctgtagagggcacagtcattgaatcattcaccgataaaggccggggcctcgtcacaacggctattatacagagagggacccttcgcaaggggagcgtgctggtggccggcaaatgttgggcgaaagtcagactgatgttcgacgaaaacggaaagacaatcgacgaagcttacccgagcatgcccgtggggatcaccggatggcgagacctgccttctgcaggagaggagattctcgaggtggaaagtgaaccaagggccagggaagtggttgattggcgaaaatacgagcaggagcaggagaagggtcaggaggacctgaagatcatcgaagaaaaaaggaaggaacataaagaagcacatcaaaaggcgcgggagaagtatggccacttgctctggaagaagcgctcaatcctgaggttcttagagaggaaagaacagatcccgctcaaacctaaggagaagcgggagcgagacagcaacgtgctgtcagtgattatcaagggtgacgtggacgggtctgtagaggcaatcctgaacattattgatacatacgacgcttcacacgagtgtgagctggagctagtccattttggggtcggggacgtgtcggcgaacgacgtcaatttggccgaaacctttgatggggttatttacggcttcaacgtgaacgctgggaatgttatacagcaaagcgcggcgaaaaagggagtgaagataaaactgcacaagatcatttaccgtctcgtcgaggacttgcaggaagagctttcttcccgcctgccctgcgcagtagaagagcacccggtgggtgaggcaagcattctggccacattttctgtcacagaaggaaagaagaaggtgccggtggctgggtgtcgagtgcagaaaggccagctcgaaaagcagaagaagttcaagttaacccgcaatgggcatgttatctggaaaggctccctgacctccttgaagcaccacaaggacgatatttctatagtcaaaaccggcatggactgcggcctttctttagacgaggacaatatggagttccaggtgggggaccgcatagtttgttatgaggaaaagcagattcaggccaagacgtcatgggatcctggtttttag

SEQ ID NO: 195494 - DNA, 213 bp, synthetic construct
  misc_feature 1..213: note = Description of Artificial Sequence: Synthetic coding sequence
  source 1..213: mol_type = other DNA
atgaaccagaagctgctgaagctggagaacctgctgcggttccacacaatttacaggcagctgcactccctatgccaaaggagggcgctcaggcagtggagacatggttttagttccgcctatcccgtgtggaccgcccagctgtgtgcttggccctggcccacagacgtgctcactggagcagcactgtcccagtatcgcctgctcgtttag

SEQ ID NO: 195495 - DNA, 24 bp, synthetic construct
  misc_feature 1..24: note = Description of Artificial Sequence: Synthetic coding sequence
  source 1..24: mol_type = other DNA
atgaaccagaagctgctgaagtag

SEQ ID NO: 195496 - DNA, 33 bp, synthetic construct; identical to SEQ ID NO: 89302
  misc_feature 1..33: note = Description of Artificial Sequence: Synthetic coding sequence
  source 1..33: mol_type = other DNA

SEQ ID NO: 195497 - DNA, 81 bp, synthetic construct
  misc_feature 1..81: note = Description of Artificial Sequence: Synthetic coding sequence
  source 1..81: mol_type = other DNA
atgaaccagaagctgctgaagctggagaacctgctgcggttccacactatctaccgacagttgcactccctttgccaatag

SEQ ID NO: 195498 - DNA, 216 bp, synthetic construct
  misc_feature 1..216: note = Description of Artificial Sequence: Synthetic coding sequence
  source 1..216: mol_type = other DNA
atgaaccagaagctgctgaagctggagaacctgctgcggttccacaccatatatagacagctgcactcgctctgtcagagaagggcactgaggcaatggcggcatggcttctcgtcggcctaccctgtctggacagcgcagctctgcgcctggccatggcccacagatgtgttgaccggtgccgccctgagccagtacagactattggtgacatag

SEQ ID NO: 195499 - DNA, 1398 bp, synthetic construct
  misc_feature 1..1398: note = Description of Artificial Sequence: Synthetic coding sequence
  source 1..1398: mol_type = other DNA
atgaaccagaagctgctgaagctggagaacctgctgcggttccacactatttaccggcagcttcattctttgtgccaacgcagagcgctcaggcagtggaggcatgggtttagtagtgcctaccctgtctggaccgcccagctatgcgcctggccttggccgacagacgtcttgactggggccgcactgtctcagtacaggctcctcgtaacaaagaaagaggagggaccttggaaatctcagttgtccagcaccaaatctaaaaaagtggtagaagtatggataggcatgacaatcgaggaactggcccgagcgatggagaaaaacactgattacgtttacgaggctctgctgaacaccgacatagatattgattcactagaggctgatagccatttagacgaggtgtggatcaaagaggtgatcaccaaagcaggtatgaaactcaagtggagcaagctgaaacaagacaaagtccgtaagaataaggacgcagtgcgtcggccacaagctgaccccgctctgctcacccccaggtccccagtcgtaaccattatggggcatgtggatcacggcaagacaacactgctcgacaagttccgtaaaacacaggtcgcggccgtcgagaccggagggattacacagcacatcggcgcctttctcgtgtccctcccctctggggaaaagatcacctttctggacacaccaggacacgccgcctttagcgctatgagagccaggggggcccaggtgacagatatcgtggtcctggtggtggccgctgacgatggtgtaatgaaacagaccgttgaatcaattcaacacgcaaaggacgcccaggtgccaataatccttgccgtgaataagtgcgataaagcggaggccgacccggagaaggtgaaaaaggagctacttgcctacgacgttgtctgcgaggactatggaggggacgtgcaggcagtccccgtgagcgccctgacgggagacaatcttatggccctcgccgaggcaacagtggcactcgccgagatgctggagcttaaagccgacccgaacggccctgtagaaggcacagtcatcgaaagttttaccgataaggggagagggttagtgactaccgcaataatccagaggggaacactgagaaagggcagcgttctggttgcaggaaagtgttgggccaaggtgcgactgatgttcgatgagaacggaaagacaattgacgaggcgtaccctagcatgcccgttggcattactggctggcgtgacctaccttctgccggcgaagaaatactggaggtcgaaagtgaaccaagggctcgcgaggtggtcgattggcgaaagtatgagcaggagcaggagaaagggcaggaagacctgaaaaaagaaaagaattag

SEQ ID NO: 195500 - DNA, 456 bp, synthetic construct
  misc_feature 1..456: note = Description of Artificial Sequence: Synthetic coding sequence
  source 1..456: mol_type = other DNA
atgaaccggcacctgtgcgtgtggctgttccggcaccccagcctgaacggctatcttcagtgtcacatccagttgcactcccatcaatttcggcagattcacttggatacaaggctgcaagtgtttaggcaaaaccggaattgcatcttgcacttattgtccaagaattggtcccgacgttattgtcatcaagacactaagatgctatggaaacacaaggctcttcagaaatacatggaaaatctcagtaaggagtaccagacactggagcagtgtctgcaacacatccccgtgaacgaggaaaatcgccggagtctgaatagaagacacgctgagctcgctccgctcgctgctatctaccaggagatacaagaaactgagcaggccatcgaagagctcgaatcaatgtgtaagaagacggagagctgttcagttgcccaggcaggaatgcaatag

SEQ ID NO: 195501 - DNA, 1338 bp, synthetic construct
  misc_feature 1..1338: note = Description of Artificial Sequence: Synthetic coding sequence
  source 1..1338: mol_type = other DNA
atgaaccggcacctgtgcgtgtggctgttccggcaccccagcctgaacggatatttgcagtgccatattcagctgcattcccatcagttccgtcagatccacctggacacaaggctgcaggtctttagacagaaccggaactgcattctgcatctccttagcaaaaattggtcccggaggtattgtcaccaggacaccaaaatgttatggaaacacaaggcactacagaaatacatggaaaacttgagcaaagaatatcagactctcgaacagtgtctgcagcacatccctgtgaatgaagaaaaccgccgaagcctaaaccgacgacatgctgagctggctccactcgccgcgatttatcaggagatccaggagacagagcaggccattgaggagctggaatcaatgtgcaagagcctaaacaaacaggatgaaaagcagctgcaggaactggcacttgaggagaggcagaccatcgatcagaaaattaacatgttatacaacgaactattccaatcactggtcccaaaggaaaaatacgataagaacgacgttatcctagaagtgactgccggacgcaccacaggtggggatatctgtcagcagtttactcgagagatcttcgacatgtaccaaaactattcttgctacaaacattggcagttcgagctgctgaattacacaccagccgattacggaggacttcaccatgctgcggctcgtatatctggagatggtgtttataaacatctgaagtacgagggcgggattcatagggtgcagcggattcccgaggtgggcctgagctctcgtatgcaaagaattcatactggaacgatgagcgtgattgtcctaccgcagcccgacgaagtggacgtcaaactcgatccaaaggatctgcggattgatacattccgcgctaaaggcgccggtgggcagcacgtcaacaagacagactctgccgttaggctggtgcatatcccaactggcctggtagtggaatgccagcaggagaggagccaaattaagaataaggagattgctttcagagttcttagagcccgtctctaccagcagatcattgaaaaggacaagcggcagcagcaatctgcccgaaaactgcaggtgggaacaagggcacagagtgaacggattcgaacttacaatttcacccaagatagggtgtctgatcacagaattgcatacgaagtcagagacatcaaggagtttctgtgtggcggcaaaggcttagaccagctcattcagcggctcctgcagtctgccgacgaggaagctattgctgaattactcgatgaacaccttaagagcgctaagtag

SEQ ID NO: 195502 - DNA, 1338 bp, synthetic construct
  misc_feature 1..1338: note = Description of Artificial Sequence: Synthetic coding sequence
  source 1..1338: mol_type = other DNA
atgaaccggcacctgtgcgtgtggctgttccggcaccccagcctgaacggttatctgcagtgccatatacagctccactcccatcagttcagacagattcatctggacacgaggcttcaggtcttcaggcagaatcgtaattgtatcttgcatcttctaagtaagaactggagtcggcggtactgccaccaggatactaaaatgctttggaagcataaggctttacagaagtatatggaaaatctgtctaaagagtaccaaaccctggaacagtgtttgcagcatatcccggtgaatgaagaaaatcggaggtctctgaacagacgccatgcagaattggcacccctggccgctatttaccaagagatacaggagacagagcaggctatcgaagaattagagagtatgtgcaagtcattaaataaacaggacgagaaacaattgcaggaactggcattagaggagaggcagaccatagaccagaagatcaatatgttgtacaatgagctcttccagtctttggtgcccaaggagaagtatgataagaatgacgtaatcctagaagttacagctggccgcacaactggtggggacatttgtcagcagttcacgcgagaaatctttgatatgtatcagaattattcatgttacaagcattggcagttcgagctgcttaattacacacccgcagattacgggggcctgcatcacgcggctgcacggattagcggcgatggtgtctataagcacctgaagtacgaggggggtattcaccgtgtgcagagaattcccgaagtgggtctcagcagcagaatgcagaggatccacacgggaactatgagtgttatcgtacttccccaaccggatgaggtcgatgtcaagctggacccgaaagatctgcgcatagatactttccgagcaaaaggagctggaggccaacacgtgaacaaaaccgattctgctgtcaggctggttcatattccgaccgggttagtagtggagtgtcagcaagaacgcagtcagatcaagaacaaggaaatcgcttttcgggtgctccgcgcaagactctatcaacaaatcatagagaaggacaaacgtcagcaacagtctgcacgcaagcttcaagtgggcacccgcgctcagtctgagagaattcgtacctacaactttacccaggacagggtgagcgatcaccggatagcctacgaagttcgcgacatcaaagaattcttatgcggaggcaaggggctcgaccaattgattcaaaggttattacaaagcgcggatgaggaggccattgccgaactgctcgatgaacacctcaagagcgccaagtag

SEQ ID NO: 195503 - DNA, 1407 bp, synthetic construct
  misc_feature 1..1407: note = Description of Artificial Sequence: Synthetic coding sequence
  source 1..1407: mol_type = other DNA
atgggcaacggcgaggtggtgctgttcagcgacgccgagatgaaccgacatctttgcgtgtggctttttcggcatccatcgctaaacggttatctgcaatgccacattcagctgcactctcaccaatttagacagatccacttagacaccagacttcaggtgttccgtcagaacaggaattgcattctccacctcttatcaaagaactggagcaggcggtactgccatcaggatacaaaaatgctttggaagcataaggcactacaaaaatacatggaaaatctctccaaagagtatcagacactggaacagtgtcttcagcatatccccgtcaacgaagaaaataggcgaagcctgaaccggaggcacgcagagctggcacctttggcagctatctaccaagagatccaggaaactgagcaggctatcgaagaactggagtctatgtgcaaaagcctcaacaagcaagatgaaaaacagttgcaggagctggctctggaggaacggcagacaatcgaccagaaaattaatatgctctacaacgagctgttccaaagcctggtccctaaggaaaagtacgataagaacgatgtgattctggaagtcacagcaggccggactactggaggggatatttgccaacagtttactcgggagatcttcgacatgtaccagaactattcctgttacaaacactggcagttcgaattgctgaactacactcccgctgactatggaggactccaccatgccgcagcccgcatcagcggggacggagtctataagcatttgaagtacgagggaggaatccacagagtgcagaggatccctgaagtgggcctttcatctagaatgcagcgaattcataccgggactatgtcggtgatcgtcctgccccaacctgacgaggtggatgtgaaacttgatccaaaggacctgagaattgatacattcagggcaaaaggggccgggggccagcatgttaacaagacagactcggccgtgagactggttcacattccaaccggactggtggtggaatgccagcaagaaaggagccaaatcaagaacaaggagatagcctttcgagtcctgagggcacgtctgtaccaacagattattgagaaggacaagaggcagcagcaatccgccagaaagttgcaggtgggcaccagggctcaaagcgagagaattagaacatacaacttcacacaggaccgcgtgtcagaccacaggattgcctatgaagtgcgggatattaaggctcagtcccattccacgggcggttctagggacccggcgcacagtacatttttgtccctggatagcgtgcgaagcccaggtattctgatcatgacaagttctgtccggaacttttatgtggtgggcagggcttggatttcttag

SEQ ID NO: 195504 - DNA, 2274 bp, synthetic construct
  misc_feature 1..2274: note = Description of Artificial Sequence: Synthetic coding sequence
  source 1..2274: mol_type = other DNA
atgagcctgctgttcagccggtgcaacagcatcgtgaccgtgaagaagaataaacgccacatggccgaagtaaacgcctcgccgctgaaacactttgttactgcaaaaaaaaagattaacggaatcttcgagcaactcggcgcctacattcaggaatctgccaccttcttggaagacacgtaccggaacgccgagctggatccagtgactactgaggagcaagtgctcgacgtgaaaggctatcttagtaaggtgagagggatatctgaagtcctggcccgaaggcacatgaaggtggctttcttcgggaggacatccaacgggaagagcacagtcatcaacgctatgctgtgggacaaggtgctgccgtctgggataggtcataccacaaactgcttcctgcgggtcgaaggaaccgacgggcacgaagcctttctgttaacggaaggctcagaagaaaaacgctctgctaaaactgtcaatcagcttgcacacgctctgcaccaggataagcagttacacgctgggtctctcgtctccgttatgtggccaaacagcaaatgccccttgctgaaggatgacctggtgctgatggacagcccagggatagacgttacgacagagctggacagctggattgataagttttgccttgacgccgacgtttttgttctagtcgctaattccgagagcaccctgatgcagacggagaagcatttttttcataaggtgagcgaaaggctatctcgtccaaatattttcattctcaacaacaggtgggatgctagtgctagcgagccagaatacatggaggaggtgagacgccagcatatggagaggtgtacaagtttccttgttgacgaattaggggttgtcgatcgctcacaggctggagaccgaatctttttcgttagcgccaaggaggtgcttaatgcacgaatacagaaagcacaggggatgcccgaaggtggtggcgcattggcagaaggcttccaagtgcgaatgttcgagttccaaaattttgagcgaaggttcgaggagtgtatatcacagagcgcagtgaaaacaaaattcgagcagcacaccgttcgggcaaagcagattgctgaagctgtgagactgattatggatagcctgcacatggctgcgagagaacagcaggtgtactgtgaagagatgagggaagaaaggcaggacaggctgaaattcattgataaacagctagagctcctggcacaggattataagttacggataaaacagatcacagaggaggtcgagcggcaggtatctaccgctatggctgaggaaatcaggcgactgtccgtgctggtggatgactatcaaatggacttccatccctcgcctgtggtgctgaaggtctataagaacgaactgcatcggcacatcgaggaaggcctgggtagaaatatgtcagacaggtgtagtaccgcgattacgaacagcctccagactatgcagcaggatatgattgatggcctgaaaccactgctccctgtttcagtcagatcgcagattgatatgctggtgcccaggcagtgtttctccctcaactacgatttaaactgcgacaagttgtgcgcagatttccaggaagacatagagttccacttttcactcgggtggaccatgctggtgaaccgctttctgggaccaaaaaattctcggcgggccctaatgggatacaacgatcaggtgcagcggccgatcccattaactccagccaatcctagcatgccccctctccctcaggggagccttacgcaggaagagttcatggtctctatggtcacaggcctggcttctctgacatcgagaacaagtatggggatactggtggtcggtggggtagtttggaaggccgtgggctggcgcttgatcgccctcagcttcggcctctacggacttttatacgtatacgaaaggttaacctggactacaaaggccaaagagcgggccttcaaacggcagttcgttgagcatgcgtctgaaaaactacagctggttatctcttacaccggatcgaactgctcccaccaggtgcagcaggagctgagtgggaccttcgctcatctgtgtcagcaggtcgatgtcactcgcgaaaatttagagcaagaaatagctgcaatgaacaagaagatcgaagttttagattcacttcagagcaaggctaaattgctcaggaacaaagctggttggcttgactcagaactgaatatgtttacccatcagtatctccagccatcgcggtag

SEQ ID NO: 195505 - DNA, 1311 bp, synthetic construct
  misc_feature 1..1311: note = Description of Artificial Sequence: Synthetic coding sequence
  source 1..1311: mol_type = other DNA
atgcacccccacctgagcaccctgagcctgccccggcggcggagcatggcattcctgtccagttggggcgccttggcggaaggttttcaggtgcgcatgtttgagtttcagaacttcgagcggagattcgaggaatgcatctctcaatccgcggtcaagacaaagttcgagcagcatacagtacgcgctaagcagatcgccgaggccgtacgacttattatggactctcttcacatggccgcccgtgagcaacaggtgtactgtgaagagatgagggaagagagacaggataggctgaagttcatcgacaaacaattggaactgctggcccaggattataaacttaggatcaaacaaatcaccgaggaagtggagcggcaggtgagtaccgcaatggcagaggaaattaggagactgagtgttttggtcgatgactaccagatggacttccaccctagccccgtggtccttaaagtgtacaaaaatgaacttcacaggcacatcgaggaggggctaggaaggaacatgtccgatcggtgttccaccgcaattactaatagccttcaaacgatgcaacaagatatgatagatgggttgaagcccctgcttcccgtatctgtgcggagccaaattgatatgctggtcccacgacagtgcttcagtctgaactacgatttgaactgcgacaagctgtgtgctgacttccaggaggatatcgagttccatttctccctgggctggactatgctcgtaaatcggtttctcggcccgaaaaactctaggcgggcccttatgggctataatgaccaggtgcagcgccccatccctctcactccagcgaaccccagcatgcctccactgcctcaaggatctttaactcaggaagagtttatggtatctatggtgacgggactcgccagcctgacttcgagaaccagtatgggcatcctcgtggttggaggcgtggtttggaaagccgtggggtggcgcctgatcgcactgtcgttcggtctgtacggtcttctgtatgtctacgaacgcctaacctggactactaaggctaaggagcgagcattcaagagacagttcgtggaacacgctagtgagaagttgcagcttgtgatcagttacaccggctccaactgtagccaccaggttcaacaggagctgagtgggactttcgctcatctgtgccagcaggtagacggcgagacactgtctgaacgctccatggcaaagagcacactgatgctcctgacgctgctcttcctgtgtagcttcgctggcgcgcaagatgttctaactcagtag

SEQ ID NO: 195506 - DNA, 297 bp, synthetic construct
  misc_feature 1..297: note = Description of Artificial Sequence: Synthetic coding sequence
  source 1..297: mol_type = other DNA
atgagcctgctgttcagccggtgcaacagcatcgtgaccgtgaagaaaaataaacgtcacatggctgaggtgaatgccagtcctctgaaacattttgttacggccaaaaagaaaatcaacgggatctttgaacagctcggtgcatacattcaagagagtgctacgttcctagaggacacgtaccggaatgctgagctggacccagtgacgactgaagagcaggtgctcgatgttaagggttacctttccaaggtgcgaggaatctctgaggtgcttgcgagaaggcatatgaagtag

SEQ ID NO: 195507 - DNA, 2274 bp, synthetic construct
  misc_feature 1..2274: note = Description of Artificial Sequence: Synthetic coding sequence
  source 1..2274: mol_type = other DNA
atgagcctgctgttcagccggtgcaacagcatcgtgaccgtgaagaaaaataagagacacatggccgaggtaaacgcatcccctcttaagcattttgtgacggcaaagaaaaagattaacgggatattcgaacagctaggtgcatacattcaagagtcggctactttcttagaggatacttaccgcaacgcagagcttgaccctgtgacgactgaggaacaggtcctcgacgtcaagggctacctcagcaaggttcgcggcatctcagaggtactcgctcgcagacacatgaaggtagctttcttcggacgaacatcaaatgggaagtctacagtcataaacgcaatgctgtgggataaggtgctccctagtggaataggccacaccactaactgttttctccgcgtcgaggggaccgatggccatgaagctttcctgttaaccgaaggttcagaggaaaagcgcagtgccaaaactgttaatcagctagcacatgccctccatcaggataaacagcttcatgctgggagtctcgtctctgtcatgtggcctaatagtaaatgccctctgctgaaggatgatttggtgctcatggactcaccaggaatcgacgttacgaccgaactggactcatggattgacaagttctgcttggacgcagacgtgtttgtgttagttgccaacagcgaaagtacactgatgcagactgagaagcacttcttccacaaagtgtccgagaggttatcccggcctaacattttcatcctgaataatcgatgggatgcaagtgcaagcgagccagaatatatggaagaagtaagacgtcagcacatggaaagatgtacaagtttcctggttgatgaactgggcgtagtggatcgcagtcaggctggcgatcgcattttctttgtttccgcaaaagaagtgctcaacgcacgcatacaaaaggcacagggaatgccagagggcgggggagctcttgctgagggttttcaggtgagaatgttcgagttccagaactttgagcgtagatttgaggagtgcattagccagtcagctgtgaagaccaaattcgagcagcacacagttcgtgccaagcagattgccgaggctgtccgtctcatcatggatagtctgcacatggcggctcgtgaacaacaggtatactgtgaagagatgcgggaggagagacaggataggctgaaatttatcgataagcaactagagttattggcccaggactacaaactaagaattaagcaaattactgaagaagtggagcgacaggtatccaccgctatggcagaggagatccgccgcctatcagtgttagtggatgactatcagatggactttcatccaagtccagtggtgctcaaagtctacaaaaatgaactgcataggcatattgaggagggtctggggaggaatatgagtgaccggtgtagcacggctataaccaactccctccagacgatgcagcaggatatgatagacggactcaaacccttgctgcctgtctctgttcgctcacagatcgatatgctggtgcctcgtcaatgcttctccttgaactacgatctcaactgtgataaactttgcgccgattttcaggaagacattgagttccacttctccctcggatggacaatgcttgtgaaccgattcctgggacccaaaaattccaggcgcgccctaatgggctataacgaccaggtgcagcgaccgatacccttaactccggccaacccctctatgcccccgctgccacagggaagtttgacacaggaagagtttatggtgtcgatggtgacagggctagctagcctaacgtctcgcacttcaatgggcattcttgtggttgggggagtcgtgtggaaggccgttggctggcgcctaattgcgttatcattcggcctgtatgggctgctttacgtttacgaaaggctcacttggacgactaaagctaaagagagggccttcaaacgccaattcgtggagcacgcatctgaaaagctgcagctcgtgatctcttacactggttccaactgctcgcaccaggtgcaacaggaactgtctggtacttttgcccacctgtgccagcaggtggatgtgactcgggagaatctcgaacaggaaatcgccgccatgaacaaaaagatcgaagtgctcgattcactgcagtcaaaagctaaactactccggaataaagccggatggctagactcggaattgaatatgtttacccatcagtatctgcagcctagccgatag

SEQ ID NO: 195508 - DNA, 1395 bp, synthetic construct
  misc_feature 1..1395: note = Description of Artificial Sequence: Synthetic coding sequence
  source 1..1395: mol_type = other DNA
atgagcctgcacttcctgtactactgcagcgagcccaccctggacgtgaaaatcgccttttgtcaaggttttgataaacaggtagatgtgtcttatattgccaaacattataatatgagcaagagtaaagtggacaaccaattctattctgttgaggtgggggactccaccttcactgtgcttaaacggtatcagaacctgaaacccattggatcaggagcccagggtatcgtttgtgcagcttacgatgccgtactcgataggaatgtggctatcaagaagttgtcaagaccattccaaaatcagactcatgcaaaaagagcttatcgcgagctggtcctcatgaagtgcgtcaaccacaagaacattattagcctgctgaatgtgttcacaccccagaagactctcgaagagtttcaggatgtatatctggtaatggagctgatggacgccaacctatgccaggtgatccaaatggaattagaccacgagagaatgagttatctgctgtaccagatgctctgcggtatcaagcacttacactctgccgggataatccaccgcgacctgaaaccatccaatattgtggtgaaatccgactgcaccctgaaaatcctggattttggcctggccaggacagccgggacatcttttatgatgacaccctacgtcgtaacacgatactatcgagcacctgaagttatcctcggaatggggtacaaagagaacgtggatatctggagtgtgggctgcatcatgggagaaatggtacgtcacaagatcctgtttccgggtcgcgattacattgatcaatggaacaaggtcatcgaacaactcggaacaccatgtccggagttcatgaaaaaactgcagcctacagttaggaattacgttgaaaaccggccaaagtatgccgggctgacttttcctaagctgtttccggattcactcttccccgctgacagcgagcacaataagctgaaggcctctcaggcccgcgatctgctcagtaaaatgttggttatcgatcccgctaaacgaatcagcgttgacgatgctctgcagcacccatacatcaacgtctggtacgacccagccgaagttgaggcccctccgcctcagatctacgacaaacagctggatgagagagagcatacgattgaggagtggaaggaactcatatataaggaggtaatgaactccgaagagaagactaaaaacggagtcgtgaagggccagcccagtccttccggcgccgctgtgaatagtagcgagagcctgccacccagctcttccgtcaacgatatctcatcgatgtcaacagaccagactttggcctccgacacagactcaagccttgaggctagcgctgggcccctgggttgttgccgctag

SEQ ID NO: 195509 - DNA, 1269 bp, synthetic construct
  misc_feature 1..1269: note = Description of Artificial Sequence: Synthetic coding sequence
  source 1..1269: mol_type = other DNA
atgagcctgcacttcctgtactactgcagcgagcccaccctggacgttaaaatagccttttgtcagggcttcgacaaacaggtagatgtcagctacatcgccaagcactataacatgagcaagtctaaggtggataaccaattttatagtgtggaagtgggagattccacctttacagttttgaaacgatatcaaaacttgaaacctataggttccggcgctcaaggaattgtgtgcgcagcatatgatgccgtcctggaccgcaacgtggccatcaagaaattgtctcgaccatttcagaaccaaacccatgccaagcgcgcctaccgggaacttgtacttatgaaatgtgtcaatcataaaaacataatctcgttactgaacgtctttacgccccaaaagacacttgaagagtttcaagacgtctacctggttatggaattgatggatgctaacttatgtcaagtcatccagatggagcttgatcacgaacgtatgtcatatctcctttatcagatgttatgcggaatcaaacatctccactccgcaggaattatccatagggacctgaagcccagcaacatcgtagttaagtctgactgtactctgaaaatactcgatttcggactggccaggactgccggcacttccttcatgatgaccccatatgtggtcacacggtactatagggccccagaagtcattctgggtatgggatataaagaaaatgtggatatctggagtgtaggatgtatcatgggggagatggtccgccataagatcctgttcccagggagggactacatcgatcagtggaacaaggtcatcgaacagttgggtaccccttgccccgaattcatgaaaaaactgcaacccaccgttaggaattacgtagaaaatcggccgaagtacgcagggctgacgttcccaaagctgtttcccgacagtctttttcctgcggattctgaacataacaagctcaaggcatctcaggctcgggacttactctcaaaaatgctcgtcatcgaccccgcgaagagaattagcgttgacgatgcacttcaacacccatacatcaacgtgtggtacgacccagctgaggttgaagcacccccgccccagatttacgacaaacagctcgatgagagggaacacacaatcgaagagtggaaggaattaatctacaaggaagtaatgaatagtgaagaaaagactaaaaacggggttgtgaagggtcagccctcacccagcgcacaggttcaacagtag

SEQ ID NO: 195510 - DNA, 960 bp, synthetic construct
  misc_feature 1..960: note = Description of Artificial Sequence: Synthetic coding sequence
  source 1..960: mol_type = other DNA
atggagctgatggacgccaacctgtgccaggtgatccagatggagctggatcatgaacgaatgtcctatctgctatatcagatgctgtgcggaataaaacacctgcactctgccggaatcatccaccgcgacctaaaaccatctaacatagtggtaaaatctgattgcaccctgaagattcttgattttgggctcgctcgcacggccggaacatcattcatgatgacaccctatgtggtgacccggtactaccgggcacccgaggtgattctgggaatggggtataaggaaaacgtcgatatatggagcgttggttgtatcatgggagagatggtgagacacaaaatactctttcccggcagagactatattgaccaatggaacaaggtgatcgagcaactaggaaccccgtgtcccgaattcatgaagaaactccaaccaaccgtcagaaattatgtggaaaatcgaccgaaatacgctggacttactttccccaaattattcccagattccctctttcctgccgatagcgaacacaataagcttaaggcatcgcaggcccgggatcttctttcaaaaatgctcgtcatcgatcccgccaagcggattagtgttgacgatgccctgcagcacccatacattaatgtttggtatgatccggcagaagtcgaggcacctcctcctcagatctacgataagcagttggatgagagggagcatacgattgaggagtggaaagaattgatatacaaggaggttatgaattcagaagagaagactaagaacggggtcgtgaagggccagccttcgccttccggcgctgctgtgaactccagtgagagcctgccccccagttcgagtgttaatgacatctcaagcatgtcgacagaccagaccctggccagcgacaccgattctagtctggaggccagcgccgggccccttgggtgttgcaggtag

SEQ ID NO: 195511 - DNA, 834 bp, synthetic construct
  misc_feature 1..834: note = Description of Artificial Sequence: Synthetic coding sequence
  source 1..834: mol_type = other DNA
atggagctgatggacgccaacctgtgccaggtgatccagatggagcttgaccacgaacgaatgtcctatcttctgtaccagatgctgtgtgggattaagcatttgcactctgcagggataatccaccgagacctgaagccaagcaatattgtggttaagagcgactgtacacttaagatcctggactttgggcttgcacgcacagcgggcacgtcatttatgatgaccccttacgtcgtgacccgttattatcgtgccccggaagtcatactgggcatgggttataaagaaaacgtggatatctggagtgtgggctgcatcatgggagaaatggtccgacacaagatcctcttcccgggtcgtgattacatcgaccaatggaacaaagtgattgaacagctgggcaccccatgtccagagttcatgaagaaactccagcccacagtacggaactatgtcgagaatagacccaagtacgccggcttgacgttcccaaagcttttccctgactccctttttccggcagattctgagcacaacaagttgaaggcatcacaggcccgagacttattatcgaagatgctggtaatcgaccccgccaagaggataagcgtggacgatgccctgcagcatccctatatcaatgtgtggtacgatccagcggaggtcgaggctccacccccccagatttacgacaagcagttggatgaacgcgagcacactattgaagagtggaaagagttgatctataaggaagtaatgaactcagaagagaagacaaagaatggggttgtcaaaggtcaaccctctccctccgctcaggtgcagcagtag

SEQ ID NO: 195512 - DNA, 1269 bp, synthetic construct
  misc_feature 1..1269: note = Description of Artificial Sequence: Synthetic coding sequence
  source 1..1269: mol_type = other DNA
atgagcctgcacttcctgtactactgcagcgagcccaccctggacgtcaagattgcgttctgccaggggttcgataagcaagtggatgtcagttatattgcaaagcactacaatatgagcaagagtaaagtggacaaccagttctactcagtagaagtcggagatagtaccttcacagtcttgaagagatatcagaatctgaagcctattggcagtggggctcaggggatcgtttgtgcggcatacgacgcggtccttgaccgaaacgtggctattaagaaactcagtcggccctttcagaatcaaacacacgccaaaagagcataccgcgaactcgtcctgatgaagtgtgttaatcacaagaacattatttccctgcttaacgttttcacccctcagaagactctggaggaattccaagatgtatatctcgtaatggaactcatggacgctaatctgtgccaggtcattcagatggagctagaccatgaacgcatgagctatttactgtatcaaatgttgtgcggcataaagcaccttcattctgcaggaatcattcaccgggatttgaaacccagtaacatcgtggtaaagtcggactgtaccctgaagatactggacttcggtctggccagaactgccggtacaagcttcatgatgacaccttacgtggtgactcgatattatcgcgccccggaagtcattctgggcatgggctataaagagaacgttgatatctggtcagtcggctgtattatgggggaaatggttaggcataagatcttgtttcctggtagggactatatcgatcagtggaataaggtcatcgagcagctgggtacgccctgcccagaatttatgaagaagcttcagcccacagtaagaaattatgtggaaaatcgaccgaaatacgccggcctgactttcccaaaactgtttccagactcactattccccgctgattcagaacataacaagctgaaagcatcacaagcccgggatctcctctccaagatgctggtgattgatccagcgaagaggatttccgtggacgacgccctgcagcatccctacattaacgtctggtacgatccggctgaagtggaggccccgccaccacagatttacgataagcagctagacgagagggagcacactatagaggaatggaaggaactcatctacaaggaagtgatgaacagtgaggagaaaaccaaaaacggagtggtaaagggccagccttctccatcagcccaggtgcagcaatag

SEQ ID NO: 195513 - DNA, 1281 bp, synthetic construct
  misc_feature 1..1281: note = Description of Artificial Sequence: Synthetic coding sequence
  source 1..1281: mol_type = other DNA
atgagcaagagcaaggtggacaaccagttctacagcgtggaggtgggagattctacgtttaccgtcctgaagcggtatcaaaacctgaaacctatcggttcaggagcacaggggattgtgtgcgcagcatatgatgccgtgttagaccgaaatgtcgccattaaaaaattaagtaggccattccaaaaccaaactcacgcaaagcgggcataccgtgagttggtcctcatgaagtgtgtgaatcacaagaatataataagcctcctgaacgtgtttactccccaaaaaaccttggaagaattccaagatgtctatctggtgatggagctcatggacgccaacctctgtcaggtaatccagatggagttggatcacgagcgcatgagctatctcctgtatcaaatgctgtgcggcattaagcatctgcactctgcggggatcatccatagggacctgaaaccatccaatattgtagtgaagtccgattgcaccctgaaaatactcgattttggcttagcacgaacagccggcacctcctttatgatgaccccatacgtggtaaccaggtactacagagcccccgaagtgatcttaggtatgggctataaggagaatgtagatatctggtccgtgggctgtattatgggggaaatggtgcggcacaagatcctttttccgggccgcgactatatcgaccaatggaacaaagtgattgagcaacttggtaccccatgtcccgagtttatgaagaagcttcaaccaacggtgcggaactacgtggaaaacaggcctaagtacgccgggttaacttttcccaaattgtttcccgactctttatttccggctgattctgagcacaataaactgaaggcgtcacaggcgcgcgacctgctgagcaagatgttggtgattgaccctgctaagagaatatcagtggacgacgccctgcaacacccttacattaacgtgtggtatgatccggcagaagtggaagccccccccccccagatatatgataaacagctagacgagagagagcacaccatcgaagaatggaaagaacttatctataaggaggtgatgaattcagaggagaagacaaagaacggggtcgtaaaaggccagccctctccaagtggagcggccgtgaactcatccgaatccttgccgccaagctcaagtgtcaatgatattagtagcatgtcaaccgaccagaccctggcgtctgacactgattcctcacttgaggcatctgcgggacctctgggatgttgtaggtag

SEQ ID NO: 195514 - DNA, 1281 bp, synthetic construct
  misc_feature 1..1281: note = Description of Artificial Sequence: Synthetic coding sequence
  source 1..1281: mol_type = other DNA
atgagcaagagcaaggtggacaaccagttctacagcgtggaggtgggggattccaccttcaccgtgctgaaaagataccaaaatctgaaacccatcggatctggcgctcaaggaatagtgtgcgcagcttacgatgccgttctggataggaacgtggctattaagaaattgagccgtccatttcagaaccaaacacacgcgaagagggcttacagagaacttgtgctgatgaagtgtgtaaaccacaagaatattatctctttgcttaatgtgtttacaccacaaaagaccctggaggaattccaagatgtgtatttagtgatggagctgatggatgctaacttatgtcaggtcatccagatggagctggatcatgagcgcatgtcctatctactgtaccagatgctttgcgggataaagcacctgcattctgctgggatcatccatcgagacttgaaaccttctaatattgtcgtcaaatcagactgtactctgaagatcttagattttggcctggctagaacagctgggacctctttcatgatgaccccttacgttgttacccggtattaccgagccccagaagtgatcctaggcatgggctataaggaaaatgtcgatatttggtcagtcggttgcattatgggagaaatggtgcggcacaagattctcttccccggacgggattacatcgatcagtggaataaagttatcgagcagctaggtaccccctgcccagaattcatgaaaaaattacagcctacagtgcggaactacgtcgagaacagacctaaatacgcaggattgactttccccaagctgttcccagattcactgtttccagctgacagtgagcacaacaagctgaaggcctcccaagctagggatcttctgagtaagatgcttgtcatagatccggcgaagcggatttcagtggacgatgcacttcaacacccctatataaacgtgtggtatgaccctgccgaagttgaggccccccctccccagatctatgacaaacaactggatgaacgagagcacacaatcgaggagtggaaggagttgatttataaggaagtcatgaactctgaggagaaaaccaaaaatggagtggttaaaggtcagccctcccctagcggcgcagcagtaaatagctcggagagcctgccaccaagttcctcagtgaacgatatttcatccatgtccactgaccagaccctcgccagtgacaccgactcatcccttgaggcatccgcaggccctctgggatgttgcagatag

SEQ ID NO: 195515 - DNA, 960 bp, synthetic construct
  misc_feature 1..960: note = Description of Artificial Sequence: Synthetic coding sequence
  source 1..960: mol_type = other DNA
atggagctgatggacgccaacctgtgccaggtgatccagatggagctggaccacgagagaatgtcctatctgttgtaccagatgctatgcgggattaagcacctccactcggccggaattatccaccgggatctgaaaccgagcaacatcgtcgtgaagtcagactgtaccctgaaaatcctcgacttcgggctcgctcggactgccgggacgtctttcatgatgacaccgtacgtcgtgacacgctactaccgggcacccgaggtgatccttggtatggggtacaaggagaatgtcgatatgtggtctgtggggtgtatcatgggagagatgatcaagggagccgtgctcttccccggaacagaccacatcgatcagtggaacaaagtgatagaacagctgggaaccccttgtcccgagttcatgaaaaagctgcagcccaccgtgaggaattatgtggagaacaggcccaaatacgccgggctgacattccctaagctgtttccagactccctttttcccgctgattcagaacacaataagctcaaagcatctcaggccagagacctactgtctaagatgctagtgattgaccctgcaaaacgcatctctgttgacgatgcactgcagcacccttacatcaatgtgtggtacgatccagcggaagtcgaagccccccctccacagatttatgataagcagctagacgagcgagagcacaccattgaagagtggaaagagctgatttacaaggaggtgatgaactcagaggaaaaaacaaaaaatggagtcgtgaagggccaacctagcccgtccggcgccgcggttaacagctcagaatctctaccaccaagttcatcagtaaatgacatctcttccatgagtacagatcagacgctagcctctgataccgattcatcgctggaagcaagcgcaggccctctgggctgctgccgatag

SEQ ID NO: 195516 - DNA, 102 bp, synthetic construct
  misc_feature 1..102: note = Description of Artificial Sequence: Synthetic coding sequence
  source 1..102: mol_type = other DNA
atgagcaagagcaaggtggacaaccagttctacagcgtggaggtgggcgattccacttttacggtcctgaaacggtaccagaatctcaagcctataggatag

SEQ ID NO: 195517 - DNA, 156 bp, synthetic construct
  misc_feature 1..156: note = Description of Artificial Sequence: Synthetic coding sequence
  source 1..156: mol_type = other DNA
atgagcctgcacttcctgtactactgcagcgagcccaccctggacgtcaaaattgctttctgccaaggctttgacaaacaggttgatgtgtcttatatcgcaaagcactacaacatgagcaagtcaaaggtggataatcagttctattctgtatag

SEQ ID NO: 195518 - DNA, 276 bp, synthetic construct
  misc_feature 1..276: note = Description of Artificial Sequence: Synthetic coding sequence
  source 1..276: mol_type = other DNA
atgagcctgcacttcctgtactactgcagcgagcccaccctggacgtaaagatcgccttctgccaagggttcgataaacaggtggatgtcagctatattgcaaaacattataatatgagcaaaagtaaggtggacaaccaattctactcagtggaagtgggggactcaactttcactgtcctgaaaagataccaaaatctgaagcccataggatcaggcgctcagggcatagtctgcgctgcatacgacgcagtgctggataggaatgtggcctag

SEQ ID NO: 195519 - DNA, 225 bp, synthetic construct
  misc_feature 1..225: note = Description of Artificial Sequence: Synthetic coding sequence
  source 1..225: mol_type = other DNA
atgagcaagagcaaggtggacaaccagttctacagcgtggaggtgggcgactctactttcaccgtcctaaagaggtatcagaatctgaaaccgattggcagtggcgctcagggcattgtttgtgccgcgtacgatgccgtcctggacaggaatgtagccattaagaagttgtcccggcccttccagaatcagactcacgccaagcgtgcgtaccgagagctttag

SEQ ID NO: 195520 - DNA, 366 bp, synthetic construct
  misc_feature 1..366: note = Description of Artificial Sequence: Synthetic coding sequence
  source 1..366: mol_type = other DNA
atgagcctgcacttcctgtactactgcagcgagcccaccctggacgtgaagattgccttttgtcagggcttcgacaaacaggttgacgtgtcgtatatcgcaaagcattacaatatgagtaaatccaaagtcgacaaccaattctattccgtcgaagtgggagatagcaccttcacggtactaaaaaggtaccagaatctgaaaccaattggcagcggcgcacagggcattgtgtgcgcagcatatgacgccgtactggaccgcaatgtggccattaagaaactgtccagacccttccaaaaccagactcatgccaaacgcgcttaccgtgaactagtgctaatgaaatgcgtgaatcataagtag

SEQ ID NO: 195521 - DNA, 354 bp, synthetic construct
  misc_feature 1..354: note = Description of Artificial Sequence: Synthetic coding sequence
  source 1..354: mol_type = other DNA
atgagcctgcacttcctgtactactgcagcgagcccaccctggacgtcaaaatcgccttctgtcagggatttgacaaacaggttgacgtgtcttatatcgcaaaacactacaatatgagcaaatctaaggtggataaccagttttattctgtagaagtgggcgactccacatttactgtactcaagcggtatcagaacctgaagcccatcggctcaggagcgcagggcattgtttgtgctgcttatgatgccgtcctcgatcggaacgtcgctatcaagaaattgagcaggccattccaaaaccagactcacgcaaaacgagcatatagggagctggtcttgatgaagtgttag

SEQ ID NO: 195522 - DNA, 426 bp, synthetic construct
  misc_feature 1..426: note = Description of Artificial Sequence: Synthetic coding sequence
  source 1..426: mol_type = other DNA
atgagcctgcacttcctgtactactgcagcgagcccaccctggacgtgaagatcgcattttgccagggatttgacaagcaggtggacgtttcctatattgccaaacactacaacatgagtaaatctaaggtggataatcagttttacagcgtcgaggttggggactctacgtttactgtactgaagaggtatcagaacctgaagcctattgggtctggcgctcaagggatcgtgtgtgctgcatatgatgcagtactcgaccgtaatgtggccattaagaagctgtcccgaccctttcaaaaccagacacatgctaagagggcttacagggaacttgtgctcatgaagtgcgtgaaccacaagaacatcattagcctccttaatgtatttacgcctcagaaaaccctagaagaattccaggactag

SEQ ID NO: 195523 - DNA, 255 bp, synthetic construct
  misc_feature 1..255: note = Description of Artificial Sequence: Synthetic coding sequence
  source 1..255: mol_type = other DNA
atgagcaagagcaaggtggacaaccagttctacagcgtggaggtgggtgattcaaccttcaccgtgttaaagcggtaccaaaatctgaagcccataggatccggcgctcagggaattgtctgcgccgcctatgacgctgttctggaccggaacgtggctatcaaaaagctgagcaggccatttcagaaccaaacccatgccaagagagcctacagagagctagtgctcatgaaatgtgtgaaccacaagaactag

SEQ ID NO: 195524 - DNA, 159 bp, synthetic construct
  misc_feature 1..159: note = Description of Artificial Sequence: Synthetic coding sequence
  source 1..159: mol_type = other DNA
atgagcaagagcaaggtggacaaccagttctacagcgtggaggtgggagacagcaccttcaccgtcctcaagagatatcagaatttaaagcccatcggttccggcgcacagggtattgtctgtgcagcatatgatgcggtcttggatcggaacgtgtag

SEQ ID NO: 195525 - DNA, 147 bp, synthetic construct
  misc_feature 1..147: note = Description of Artificial Sequence: Synthetic coding sequence
  source 1..147: mol_type = other DNA
atgagcctgcacttcctgtactactgcagcgagcccaccctggacgtgaaaatcgccttctgccagggctttgataaacaggtcgacgtaagttacatagctaaacactataatatgtctaaaagtaaagtcgataatcagttttag

SEQ ID NO: 195526 - DNA, 1008 bp, synthetic construct
  misc_feature 1..1008: note = Description of Artificial Sequence: Synthetic coding sequence
  source 1..1008: mol_type = other DNA
tgaaacgtggccatcaagaagctgagccggcccttccagaaccagacacacgctaaacgggcttaccgagagctggtcctcatgaagtgtgtgaaccacaagaacatcatctcactcctaaacgtgttcaccccacagaagactttggaagagtttcaggacgtatacctcgtcatggaactgatggacgctaacctttgccaagtaatccagatggaactcgatcacgagcgcatgtcctacctcctctatcagatgttatgcggaataaagcacctccactccgccggcataatccatagagacctgaaaccttcaaacatcgtcgtcaagagtgactgcacactgaagatactcgacttcgggctggccaggaccgccggcaccagctttatgatgacaccctatgtggttacccgctactatagggccccagaagtaattttgggcatgggctacaaggagaatgttgacatgtggtccgtgggatgtatcatgggcgagatgatcaagggcgccgtcctgtttcctgggacagaccacattgatcaatggaacaaggtgattgagcagctaggcaccccatgccccgagttcatgaagaaactccaacctactgtcagaaattatgtcgaaaatagacctaagtacgctggccttacattccctaaattgtttccagactctctgtttcctgctgacagcgaacacaacaagctgaaagcttcccaggcccgcgatctcctgtcgaagatgttggtgattgaccccgctaagaggataagcgttgacgatgctctgcagcacccctacattaacgtgtggtacgatcccgccgaagtggaggcccccccccctcagatctatgataagcaactcgacgagcgcgagcacacaatcgaagagtggaaggaactgatctacaaagaggtgatgaatagtgaggaaaaaacaaagaacggcgtcgtcaagggtcagccgtctcccagtgcccaggtgcaacagtag

SEQ ID NO: 195527 - DNA, 1764 bp, synthetic construct
  misc_feature 1..1764: note = Description of Artificial Sequence: Synthetic coding sequence
  source 1..1764: mol_type = other DNA
atggccgagaagggcgactgcatcgccagcgtgtacggctacgacctggggggccgcttcgtggactttcagccactagggtttggagttaatgggttggtactgtcagctgtagactccagggcctgcaggaaggttgctgtgaagaagattgccctttctgacgcccgcagtatgaaacatgcgttgcgggaaataaaaataattagacgattggatcacgataacatcgtcaaggtctacgaggtcttggggcctaaaggtaccgacctgcagggcgaattgtttaagtttagtgtcgcgtacatcgtgcaggagtacatggagacggaccttgcacgcctgcttgaacagggtactcttgctgaggagcacgctaagctgttcatgtaccagctgctaaggggactgaaatacatacactcggctaatgtattacacagagacctgaaacccgccaatattttcatatccaccgaagacctggtactgaagatcggcgactttggcctcgctcgaattgtcgaccagcactacagccacaaaggctatctatctgaaggcctcgtgactaaatggtataggagcccacgtctgctgctttccccaaataactacacgaaagccattgacatgtgggctgcaggctgcattctggcagagatgttaactggaagaatgctgttcgctggcgctcatgagctagagcagatgcagctgatcttagagacgattccggtcatcagggaggaggacaaggacgagcttttgagagtgatgcctagctttgtctcctcaacttgggaggtaaagcgacctctacggaaactccttcccgaggtgaactctgaggcaatcgatttcctggagaagattctgactttcaatccaatggacagactcaccgccgaaatgggccttcagcacccctacatgtccccatattcttgccccgaagacgagcccactagccaacaccccttcagaattgaagatgagattgacgatatcgtcctcatggccgccaaccaatcccagctctcaaactgggacacctgtagcagccggtaccctgtctccctgtcgagtgatctcgagtggagacccgatcggtgccaagacgcctctgaagtgcagcgggatccaagagccggctccgcgcctcttgcggaggatgtgcaggtcgatccccgcaaggacagtcacagctcgtccgaacgattcttggagcagtcccattctagtatggagagggcatttgaagccgactacggtcgcagctgcgactacaaagtcgggagtccatcttacttagacaaacttctgtggagagacaacaagccacaccactacagtgaacccaagctgattttggatctgagccattggaaacaggccgccggggccccaccaaccgctaccgggctggctgatactggagcacgggaggacgagccagcgtccctgttccttgaaatcgcacagtgggtgaagagtactcaggggggacctgagcatgcaagcccccccgcagacgacccagagcggaggctgtctgcttctcccccggggcgtcccgcaccagtcgacggtggcgccagtcctcaattcgatctcgatgtcttcatcagcagagcacttaaactgtgcactaagcccgaggacctgcccgataataagctgggcgacctgaatggggcgtgtattcccgagcaccctggtgacctcgtgcagactgaagcattctccaaggagagatggtag

SEQ ID NO: 195528 - DNA, 1131 bp, synthetic construct
  misc_feature 1..1131: note = Description of Artificial Sequence: Synthetic coding sequence
  source 1..1131: mol_type = other DNA
atgtgggccgccggctgcatcctggccgagatgctgaccggccggatgctattcgctggcgcacatgaactcgagcagatgcagctcattcttgagacaatacctgtgattcgcgaagaggataaggatgaactgttgagagtgatgcctagcttcgtgagttcgacctgggaggtgaagcgccctctacggaagctgctccccgaagtgaacagcgaagccattgactttctcgagaaaattctgaccttcaatccgatggataggctgaccgcagagatgggcttgcagcatccttacatgtccccctactcctgcccagaggacgagcccactagtcagcatcccttccgcatcgaagacgaaattgacgatatagtgctgatggccgcaaatcagtctcaactttctaactgggatacatgttccagcaggtaccctgttagcctttcatcagatctagagtggcgtccggataggtgtcaggatgcctcagaagtccagagggacccacgggctggcagcgctcctctggcagaggacgtgcaggtggaccctaggaaagactcccacagctctagtgagcgctttctggagcagtctcatagctccatggaacgagcctttgaggcagactacggaaggtcatgcgattataaggtcggcagccctagctatctggacaagctcctctggagagacaataaaccacaccattacagcgaacctaagcttatcttggacctgagtcactggaaacaagcagccggtgcccctccaaccgcaactggattggctgatacaggagcaagagaggacgagccagcctcactcttcctggaaatcgcacagtgggtgaagtcaacacagggggggcccgaacatgcttctcctcccgcagacgatccagaaagaaggctgagtgcatcccccccagggagacctgcccctgttgacggcggtgcatcacctcagttcgatctggacgtcttcataagtagagcccttaaactgtgtaccaaaccagaagatctgcctgacaataaattgggggatttaaacggcgcatgtattccagaacaccccggcgatctggtgcagaccgaagccttctccaaggagcggtggtag

SEQ ID NO: 195529 - DNA, 2034 bp, synthetic construct
  misc_feature 1..2034: note = Description of Artificial Sequence: Synthetic coding sequence
  source 1..2034: mol_type = other DNA
atggagagcgacctgcaccagatcatccacagcagccagcccctgaccctggaacacgtgcggtatttcctctatcagctccttcgcggtctcaagtatatgcatagtgcccaggttattcatagagaccttaagccgagcaatctcctggtgaatgagaattgcgagctgaaaatcggggacttcggcatggcacgtggactttgtacatccccagccgaacaccagtatttcatgacggagtatgtggccacacgatggtaccgggccccagagttgatgctctcattacatgagtacacacaggcaattgatctgtggtcagtgggctgtattttcggcgagatgctggcgagacgtcagctgtttcctggaaaaaactacgtgcaccagctccagttgataatgatggtgctggggactcccagtcctgcagtgatacaagcagtgggagcggagagggtccgtgcctacatccagtccttgcctcctcgccaacccgttccatgggaaacggtgtaccctggggccgatcgtcaggctctgagcttgcttggtcgcatgctcagatttgagcccagcgcgcgcatctcggcagccgctgcactccgacacccctttttggcaaagtaccacgacccagatgatgagccggactgtgccccaccattcgacttcgcatttgatcgggaagccttaaccagggagcgcataaaagaggcgatcgttgccgagatcgaagattttcatgccaggcgagagggcattcgccagcagatccggttccaaccctccttacagcctgtcgcatccgagccggggtgcccagatgtggaaatgccttcaccctgggcaccctcaggcgactgtgccatggaatcccctccacccgctccaccaccctgcccagggccggctcctgacacgatcgacctgacactccagcctcccccaccagtgtcggaacctgccccccccaagaaggatggcgccatctctgacaacactaaagcagcactgaaggcagcactcctcaaaagtctacgatcaaggttaagagacgggccatcggctccattggaggctcccgaaccgaggaaaccggtgacggcccaagaacgccagagagagcgggaggagaagcgcaggaggcggcaggagcgggctaaggaacgggagaagcgccgacaggaacgggaaagaaaagaacggggagcgggggcaagcggtggaccaagcacagatcctctggccgggttggttcttagcgacaacgaccgcagcctgctagagcgttggacacggatggcgagaccagctgcaccagcgctgacgagtgtgccggctcctgcacccgccccaacacccacccctacacctgttcagccgacgtcccctccacccggcccagtggctcagcctaccggaccccagccacagagcgccggtagtacctccgggccagttccccagcctgcctgtccaccccccggcccggcaccccacccaaccggtccgcctggaccaattccagtgccagcacccccacagattgcgacgtctacttcactcctggctgcccagtcactggttcccccgccaggcctgcctggtagctctaccccgggcgtgttgccttactttccacccggattgccaccgcctgatgccgggggggccccccaaagctccatgtcagagtcaccggacgtaaacctcgtgacacagcagctgtctaagtcccaggtcgaggatccactgccacccgtgttttccgggacccccaagggatccggggccggctacggtgtggggtttgacctggaggagtttctcaatcagtcctttgatatgggtgtggctgatggtccccaggacgggcaggctgactccgcgagcctgagcgccagtcttcttgccgactggctggaaggtcacggaatgaatcctgcagacatcgagtccttacaacgcgaaattcagatggactccccaatgctgctggccgatcttccagacctgcaggatccctag

SEQ ID NO: 195530 - DNA, 2451 bp, synthetic construct
  misc_feature 1..2451: note = Description of Artificial Sequence: Synthetic coding sequence
  source 1..2451: mol_type = other DNA
atggccgagcccctgaaggaggaggacggcgaggacggcagcgccgagccacctggccctgtcaaagccgaacctgcacacactgctgccagtgttgccgcaaaaaatcttgccctcctgaaagctcgaagcttcgacgtaaccttcgatgtgggagatgaatacgagatcatcgaaactattggaaatggcgcctacggggtggtcagcagcgcccgccgcaggctgactgggcaacaagtggctattaagaagattccgaatgctttcgatgtcgtaaccaatgctaagagaacgcttagagagctaaagatactcaagcactttaagcatgataacatcatcgcaattaaagatattctgaggcctaccgttccatacggggagttcaagagtgtttacgtggtactggatctcatggaaagtgacctccaccagattattcacagctcccagcctctgacactcgagcacgttaggtactttctctaccagctcttgcggggcctgaagtacatgcattcagcccaggtcatccatagggacttgaagccctccaacttattggtgaacgagaattgcgagctcaagatcggtgactttggaatggcccgtggactgtgcacgagtccagctgagcatcagtacttcatgaccgagtatgttgcaaccaggtggtacagggcgcctgaactcatgctgtcccttcacgaatacacccaggctattgacctgtggagcgtcggatgcattttcggtgaaatgctggcacgccgccaactattcccagggaagaactacgtgcatcagttacagctgattatgatggttctcggtaccccctcccccgcggtgatacaggccgtgggcgctgagcgggtacgggcatatatccagtctctgcctccaaggcaacctgtaccctgggagacagtctaccccggcgcagacaggcaggctctgtcactcttagggcgcatgctgaggtttgaacctagcgctaggatttctgcagctgctgctctcagacatccgtttttggccaagtatcacgacccagatgatgagcctgactgcgcccccccattcgactttgcatttgatcgggaggctctgacccgggagcgaataaaggaggccatcgttgccgagattgaagacttccatgccagaagggaagggatcaggcagcagatcagatttcagcctagcttgcagcccgtcgccagcgaaccggggtgccccgacgtggaaatgccgagtccttgggccccatctggagattgtgctatggagtcccccccccctgctccgcccccgtgtcccggaccagccccggacacaattgatctcactctgcagccgccgcctcccgtttcggaacctgcgccccctaagaaggatggagcaatctcagataacaccaaagccgcacttaaggccgctctgctgaaaagcttgaggagccggctgcgtgacggaccttctgcgccactggaggccccggagcctcgtaagcccgttaccgcccaggagcggcagcgagagagggaggagaaacgcagaagacgtcaggagagggcgaaagagcgggagaaaaggcgccaagagagagagaggaaagaaagaggagccggcgcgagcgggggacctagcaccgatccattagctggtctggtgctcagtgataacgataggtcacttctcgaacggtggacgcgcatggccaggcctgcagcccccgctctaactagtgtaccagcacctgccccggctccaactcctactcctacacccgtgcagcccacctcccctcctccagggcccgtggcacagcctacagggccgcagcctcagtcagccggctccaccagtgggccggttccacagcccgcctgtccaccgcctggcccggccccacaccccaccgggccgcccggacctatccctgtgccagctccaccacagatcgccacctcaacgtccctcctggccgcccagtcgctggtgcctcctcctgggcttcctggcagttcaacccccggtgtgctcccatattttcctccgggactgccgccccctgatgcaggaggagctccgcagtcaagcatgagtgagtctcctgacgttaacttggttacgcaacagctgagcaagagtcaggtcgaagatccacttccacctgttttttccggaacacctaagggcagcggcgctgggtacggcgtcggttttgatcttgaggagtttctcaatcaaagctttgacatgggtgtagcagatggacctcaggacggccaggccgatagtgcatccttaagtgccagtcttctcgctgattggcttgagggacatgggatgaaccctgccgatatagagagtctgcagagagagattcagatggactcccctatgctgctggccgacttacctgatctgcaggacccctag

SEQ ID NO: 195531 - DNA, 2451 bp, synthetic construct
  misc_feature 1..2451: note = Description of Artificial Sequence: Synthetic coding sequence
  source 1..2451: mol_type = other DNA
atggccgagcccctgaaggaggaggacggcgaggacggcagcgccgagccgcccgggccagttaaagctgaacccgcccataccgcagcctcggtcgcggcaaagaatctggccctcctgaaggctcggagcttcgacgtaacttttgacgtgggagatgagtacgaaatcatagagactattggaaacggagcttacggggtggtctcttcagccagacgtagactgaccgggcagcaggtcgcgatcaagaaaattccaaatgctttcgatgtggtaactaatgcgaagagaacccttagggagcttaagatcctaaaacactttaaacacgacaatataatcgctatcaaggatatcctgcgacccactgtaccctatggagaattcaagtcggtgtatgtggttcttgatctaatggagtccgatcttcaccaaatcatacattctagccaacctctgacactggagcatgttaggtattttctctaccagctgctgcggggtttgaagtatatgcactctgcacaggtcatacacagggacctgaagccatcaaatttactggtcaatgagaactgtgaacttaagatcggagacttcggaatggcccgaggtctgtgtactagccccgcagagcaccagtactttatgaccgagtatgtggccaccagatggtaccgcgccccggagctcatgttgagcctccacgaatacacccaggccatcgacctttggtccgtggggtgtatctttggcgaaatgctggcacggcggcagctgttccctggcaaaaattacgtgcatcagctacaactcatcatgatggtgctaggcaccccatccccagctgtgatccaggctgtcggagccgagcgcgttcgtgcatatatccagtcactgcctcctcgccagccagttccttgggagactgtgtaccctggagcagacagacaggcactgagtcttttaggcaggatgctgaggtttgaaccctctgcacgtatctccgcggccgccgctctccgccacccgttcttggccaaataccatgaccccgatgatgagcctgattgtgctcccccttttgattttgccttcgatcgcgaagctcttacacgcgagaggatcaaggaagctatcgtggcagaaatcgaggactttcacgcccgacgggaaggtattcggcagcaaattcgcttccaaccaagtcttcagcccgtagcctctgagccagggtgtccagatgtcgaaatgccgtctccatgggccccgagcggcgattgtgctatggaatctccacctcccgctcctcctccctgtcctggccccgctccggataccattgatctgacactgcagccaccaccaccagtgtctgagccggctcccccgaagaaggacggggccattagcgataacacaaaggccgcattgaaagccgcactgttaaagtcactgaggtcacggctgcgggatgggccgtccgcccctctcgaggcaccggagccccgaaaacccgtaaccgcacaggaaagacagagggaacgagaggaaaaacggaggaggagacaggagcgcgcaaaagagagggagaagagaagacaggagagagaaagaaaagagcgtggtgctggggcaagcggggggccttctacagacccactcgccggattggtactgtctgacaacgatcggtccttgttggagcggtggacccgcatggcaaggcctgctgcgccagctcttactagcgtgccagcccctgcgccagcccccactcccaccccaacccctgtccaacccacgtcccctcctcctggtccagtcgctcagcccactggaccacagcctcagagcgctggctctacttccggccccgtgccgcagcccgcatgcccccctccggggccagcccctcatccaaccgggccccccggacccattccggtgccagcccccccccagatcgcaactagcactagcctgcttgccgctcagtcactcgtgccaccacctggccttcccgggtcttccactccgggcgtcctgccatactttccccctggcctccctccgcccgacgccggaggggccccacagtcatctatgtcagagtcccccgatgtcaacctggtgacccagcaactcagcaagagtcaagtggaagatcccctgccccctgtcttcagtggtacccctaaaggaagtggagcaggctacggcgtagggttcgacctcgaggagttcttgaatcagtctttcgacatgggcgtagccgatggacctcaagatggccaagccgactctgcttcattgtctgcgagtctcctcgcagactggctcgagggccacggtatgaatcccgctgacattgagtcattacagcgggaaatccagatggacagcccaatgctcctcgccgaccttcctgacctgcaggatccttag

SEQ ID NO: 195532 - DNA, 2451 bp, synthetic construct
  misc_feature 1..2451: note = Description of Artificial Sequence: Synthetic coding sequence
  source 1..2451: mol_type = other DNA
atggccgagcccctgaaggaggaggacggcgaggacggcagcgccgagcccccaggccctgtgaaggccgaaccggctcacaccgctgcgtccgtcgccgctaagaatctggctctgcttaaagcgagatcatttgacgtgacttttgatgtgggtgatgaatacgagatcatcgaaacaattgggaacggagcctatggtgtggtgagcagtgccagacggcggctgaccggccagcaggtggcaataaaaaagatcccaaatgccttcgatgtggtaaccaatgccaaacgaactttgcgcgagctcaaaatcctgaaacacttcaagcatgataacattatcgcaattaaagatatccttaggccaaccgtgccctacggggagttcaagtcagtctacgtggtcctcgatctgatggagagtgatctgcaccagatcatccattcctcccagcctcttaccttggagcacgtgcgttactttctttatcagctgctgcgaggcctgaaatacatgcactctgctcaggtcattcatcgggatctgaagccgtctaatctgctcgtcaacgaaaactgcgagcttaaaattggggattttggcatggcacgcggactttgtaccagtcccgccgagcaccaatacttcatgaccgaatacgtggccacacggtggtatagagccccagagctgatgctgtctttacacgaatatacccaggcaattgatttgtggtccgtgggttgtatcttcggagaaatgctggcccggcggcaattgttccctgggaaaaattatgtccaccagctgcaattgattatgatggtgctggggacaccttctccggctgttattcaggccgtcggcgctgaaagagtccgcgcttacatacagtctcttccaccgagacaaccagtcccctgggagacggtgtatccgggcgccgaccggcaggcgctatccctcctgggacgcatgctgcgcttcgaacctagcgctagaatttcagcagcggccgccctgagacatccattcctggctaaataccacgatccggatgatgagccggactgtgctcctccttttgattttgcctttgaccgcgaagcactcaccagggaacggattaaggaggctattgtcgctgagattgaagattttcacgcccgcagggaggggattcgtcagcagatccggttccagccttcgttgcagcccgtggccagcgagccaggctgtcctgacgtagaaatgccttccccctgggcccctagtggtgactgtgctatggaaagtcctccgccggctccccccccatgccccggcccagctcctgataccatcgacttaaccctgcaacctcccccgcccgtgtccgaacctgcacctccgaagaaagatggcgccatctcggataacactaaggccgccttgaaggccgccttgcttaaaagcctgcgcagtcgacttcgagacggtccgtcagccccactagaggcacccgaaccaaggaagcctgtgaccgcccaagaacgacaacgtgagcgggaagagaagcggaggagaagacaggagcgggccaaagagcgggagaagaggcggcaggagagggaaaggaaggaacggggagctggcgcatcaggggggccctctaccgaccccttagctggcctagtgctgagcgacaacgacagaagcctgctagagcgatggacacggatggcacggcccgcggccccagcactaacctctgtgccagctccagccccggcccctactccaacccctactccagtgcagcccacctccccacctcctggtccagtggcccaacccacaggaccccaaccacagtcggcgggctctactagcggaccagtgccacagcctgcttgccccccccccggccccgctccacaccctactggcccacccggacctattcccgtgcccgcccctcctcagatcgctacaagcacctcactcttggccgcccagtccttagtgcctccccccggattgccaggatccagtactccaggcgtcctgccatacttccctcccgggctgcctccccccgatgccggaggtgccccacaaagcagtatgtccgagtcgccagacgtcaatctggtgacacagcagttatctaagagtcaggtagaagatcccctgccaccggtcttttctgggaccccaaaagggtcaggagcgggctatggtgtgggctttgatctggaggaatttttaaaccaatcctttgacatgggcgtggctgacggccctcaggacgggcaggccgactctgcctctctatccgcttcactgttagccgattggttggaaggtcatggaatgaatcctgcagatattgaatctcttcaaagggagattcaaatggactcccccatgctgctggctgatctccccgatcttcaggatccttag

SEQ ID NO: 195533 - DNA, 726 bp, synthetic construct
  misc_feature 1..726: note = Description of Artificial Sequence: Synthetic coding sequence
  source 1..726: mol_type = other DNA
atggccgagcccctgaaggaggaggacggcgaggacggcagcgccgaacctccagggcccgttaaggccgagcctgcgcacaccgctgcaagcgtcgccgccaagaacctggctctccttaaagctaggagcttcgacgtgacatttgatgtgggagatgagtatgagattatagaaaccattgggaatggggcctatggcgtcgtttcttcagcacgtcgaaggcttacaggtcagcaggttgcgattaaaaagatcccgaatgccttcgatgtggtaaccaatgcaaagcgaacactacgtgagctcaagatactcaaacactttaagcacgataacatcatcgccattaaggatatcctgcgccccactgttccttacggggagtttaagagcgtgtacgtggtgctggacctgatggaatcagatctccaccagatcatccatagctcccagcccctgacactagagcacgtacgctatttcttataccagctgttacgcgggttgaaatacatgcactccgctcaggtgattcaccgggacctgaagccgagcaatctgttagtgaacgaaaactgtgaattgaaaataggagacttcggcatggccaggggactgtgcacctctcccgccgaacatcagtattttatgactgaatatgttgcgacaagatggtatagggcccccgagctgatgttaagcctgcacgagtatactcaatag

SEQ ID NO: 195534 - DNA, 2136 bp, synthetic construct
  misc_feature 1..2136: note = Description of Artificial Sequence: Synthetic coding sequence
  source 1..2136: mol_type = other DNA
atggccgagcgggagagcggcggcctgggcggcggcgccgccagcccccctgccgcgtcccctttcctcggtttgcacatcgctagccccccaaactttcggcttacccatgatatcagccttgaagagtttgaagacgaagatctgtctgagatcaccgacgagtgtggaatttccctgcagtgcaaagacactctgtccctcaggccgcccagggctgggctgctgtcagctggcggaggaggtgcagggagccgcctccaggctgaaatgcttcagatggacttaattgatgcaacaggagatacacctggtgcagaagatgacgaggaagatgacgatgaggagcgcgcagcccgcaggccgggcgctggcccaccaaaagcagagagtgggcaggaacccgcttcaagaggtcaggggcagtcacaggggcagagccagggacctggcagtggcgacacatatcgacctaaaagaccaactacattaaacttgtttcctcaggtgcccagaagccaagacactctgaataacaattccctcggcaaaaagcactcctggcaggatagggtctcccgcagctcgagcccactgaaaacgggcgaacagacacctcctcacgaacacatttgcctaagtgatgagctgcctcctcagtcaggcccggcacctacaaccgatagaggtacttctacggactccccctgcaggaggagcactgccactcagatggccccaccaggcggacccccggccgctcctcctggcggtcgaggccactctcatagggatagaatccattatcaggccgatgtcaggttggaggccacagaagaaatctaccttacacccgtgcaacgacctcctgatgccgcggagccaactagcgcatttctgccccctacagaaagtaggatgtcagtgtccagcgatccagatcccgccgcttaccccagtacggcaggtaggccacacccctctataagtgaagaggaggaggggtttgactgcctgtcaagcccagaaagagccgaaccgccagggggtggatggcggggatccctaggggaacccccccccccgccccgcgcttcattatcttctgatacgtcagctctgagttacgatagtgtcaagtatacccttgtagttgacgaacatgctcagctggagctggtgtctctaagaccctgttttggcgattacagtgatgagtccgatagtgctaccgtttatgataactgcgcttccgttagcagcccctacgaaagcgctattggtgaagagtacgaagaagccccgaggccacagccccccgcatgtctgagcgaagacagtacgcccgacgagcccgacgtgcatttttctaagaaatttttgaatgtctttatgagcggccggagcaggtcgtcaagtgccgaatcttttggattattctcttgcataatcaatggggaagagcaggagcaaacccaccgcgccatttttcggtttgttccccgtcacgaggacgagctggaactcgaggtggatgatccacttctggtggagctacaggctgaggattactggtacgaagcctataacatgcggacaggggcccgtggcgtctttcccgcctattacgcaatcgaagttaccaaggaacccgaacacatggcagcacttgctaaaaacagcgactgggtggatcaattccgggtgaaattcctgggctcggtgcaggtcccataccataaaggaaacgacgtgctctgtgcggcaatgcagaagattgccacaacccggagacttaccgttcacttcaatcctccaagcagttgcgtcctagaaatctcggtccgtggagtaaagatcggtgtgaaggcggacgattctcaggaagccaaggggaataagtgcagccacttctttcaactcaaaaatataagcttctgcggctatcatcctaagaataataagtattttggttttattaccaaacatcctgccgatcataggtttgcctgccatgtctttgtgagtgaggatagcactaaggctttggccgaaagtgtgggcagagcatttcagcagttctacaagcagttcgtggagtacacctgtcctactgaggacatctacctggagtag

SEQ ID NO: 195535 - DNA, 1797 bp, synthetic construct
  misc_feature 1..1797: note = Description of Artificial Sequence: Synthetic coding sequence
  source 1..1797: mol_type = other DNA
atgctgcccgacttccccagccccagcacctgggcccccggcctgttgctacccagtggccccgcactgctgtccccgtccgtactgcaagatagtctttccctcggacgcagtgaacaaccacacccaatttgctctttccaggacgatttccaggagtttgagatgatcgatgataacgaggaggaggatgatgaagatgaggaggaggaagaggaggaagaggagggcgatggcgagggacaagagggcggggatccaggctctgaagcacccgcacctggacccttaatcccttccccgagtgtggaggaacctcacaaacacagaccaactacacttcggctcaccaccttgggcgcccaagacagtcaagaccccgaggccgcagctggcccaggcggagttgaacttgtggacatggagacactgaaccccaccagagatactatcaccccgctgtgggcagcccctggccgagcagcaaggccgggacgtgcctgttcagccgcgtgctccgaggaagaagatgaagaggatgacgaagaggaggaagatgctgaagactctgcaggctcgcctggagggcgcggaacaggaccctctgccccacgtgatgcatctctggtctatgatgcggttaagtacaccctcgtggtagacgagcatactcaactggagctggtatctttgagacggtgcgcagggctggggcatgactccgaggaggacagtggaggagaagcctcagaagaggaggctggggccgccctgctgggtggagggcaggtgtcaggcgacaccagtcccgacagtcctgatttaactttttcgaagaagttcctgaacgtcttcgtcaattccacttctagaagctccagcaccgaatcgtttggtctgttctcttgtctggtgaacggggaagagcgggaacagacacatcgtgccgtgttccgcttcatcccgcggcatcctgatgaactagagctggatgtggatgaccccgttttggtcgaggcggaggaggacgatttctggttcagaggcttcaacatgaggaccggcgagagaggagtatttcccgctttttatgcacacgcagtcccaggcccggcgaaggacctcctcggatcaaaacgctccccttgttgggtggagcgtttcgacgtccagttcctcgggtccgttgaggttccttgtcaccaggggaacgggatcctgtgcgcagctatgcagaagattgcaactgccaggaaactgaccgtgcatctccggcctcctgcttcatgtgacttggagattagcttgcgaggagtgaagctgtcattgtcaggggggggccctgaatttcagaggtgttcacacttcttccagatgaaaaacatttctttctgtggttgccacccacggaacagttgcgaggccccccaaggggctgcattccaatgggaacgcggggtggaccgcaagcgagttctgcagacaagaggaaatgttcagcctcaccttggggcaggacagggcgcggccttgaaccgcgccacggaagggagctctactggcagcgagaaaggcgaatggacgccactcgtgattatggagttaactcagtccgtaaatagttgctatttcggttttatcactaaacaccccctcctgtctcggttcgcatgtcacgtgttcgtctcccaggagagcatgcgacctgttgcccaatctgttggccgagcctttctggagtattatcaagaacacctggcatatgcttgccctactgaggatatctacctagaatag

SEQ ID NO: 195536 - DNA, 2472 bp, synthetic construct
  misc_feature 1..2472: note = Description of Artificial Sequence: Synthetic coding sequence
  source 1..2472: mol_type = other DNA
atggccgaccgggccgagatgttcagcctgagcaccttccacagcctctcccctccagggtgccgacctccacaagacatttcattggaggaattcgacgacgaagatctgtcagagattaccgatgactgcggcctggggctgtcttatgactcggaccattgcgagaaggattctctttccctcggaaggtctgaacagcctcaccctatttgttccttccaggacgacttccaggagtttgagatgatcgatgataatgaggaagaagacgatgaggatgaggaggaggaagaggaggaggaggaaggagacggcgaagggcaggaaggaggggatcctggctcagaggctcctgctcccggcccactgattccgtcacctagtgtggaagagccccacaagcacagacccactaccctaagattgacaacattgggagcccaggatagcctcaacaataacggcggcttcgaccttgtccgccccgcgtcctggcaagagactgcattatgctcacccgctccagaggctctgagagagctgcccggccctttgcccgcgacagataccgggccaggcggcgctcagtcacccgtgaggcctggttgcgattgcgaggggaatcgcccagccgaacctcccgctcctgggggtacctccccatccagcgacccgggcattgaggctgacctgaggtcacggtcaagcgggggcagagggggccggcgctcctcacaggagctctcaagtcccggtagcgattccgaagatgctggcgggcgcctcggaaggatgattagtagcatcagcgaaactgagctcgagctgagttccgacggcggaagtagctcctcaggccgaagctctcatctgaccaattccatcgaggaggcttcttcaccagcgtcagagccagagcctcctcgggaacctcccaggcggcccgcatttctgcctgtgggccccgatgacactaatagtgaatacgagtctggctcagagtcagaaccagacctgagtgaggacgcagatagtccttggttattgagcaatctggtgtcacgtatgatttccgaggggagttctccaatcagatgccccgggcagtgcctgtcccctgctccccggccaccaggcgagccagtgtcccccgccgggggggccgcgcaggatagccaggatccagaagccgccgctggtccaggaggggtagagctggttgatatggagaccttgtgcgctccaccccctcccgcccccgctgcaccccgacctggtccggctcaacccgggccctgcctgtttctgtctaaccccacccgagatacaattacccccctatgggctgccccaggtagggctgctcgccccggtcgcgcctgcagcgctgcttgctcagaggaggaggacgaggaagacgacgaggaagaagaagacgccgaagattcagcgggatcaccgggagggcggggaaccgggccctctgcccccagggacgcctcattggtttacgatgctgtgaagtatacgctggtggtggatgagcatactcagttggagctggtttccttgcgccgctgcgccggacttgggcatgactcagaagaggactcagggggtgaggcctcagaagaggaggcaggcgcggcattgctgggcggagggcaagtctcgggagataccagccctgatagtcccgatcttacattcagtaagaaattcctgaatgtgttcgtaaatagcacgtctagatcgtctagcacagagagctttggtctctttagctgcctggttaatggggaggagcgcgaacagacacatcgtgcagtattccggtttatcccaaggcaccccgatgaattagagctcgatgtggacgacccggtgctggtagaagcggaagaggacgacttctggttccggggctttaatatgcgcacgggcgagcgaggggtttttcccgcattttatgcacatgctgtgcccggcccagcaaaagatctcctcggttcaaagaggagcccgtgctgggtggaaaggttcgacgttcaattccttggcagcgttgaggtcccatgccaccagggcaatggtatcctctgcgccgccatgcagaaaatagcaaccgctcggaaactgaccgtgcacctgagaccacccgcatcctgtgacttggagatttccttaagaggggtgaagctcagcctgtcaggcggcggccccgagtttcagcggtgcagtcactttttccagatgaaaaatatcagcttttgcgggtgccaccctaggaacagttgctattttggatttatcactaaacatccgctccttagtagatttgcctgccatgtgttcgtctctcaggagtctatgcgccccgtggctcagtcagtcggtcgagcttttcttgagtattatcaggaacacctggcatacgcatgcccgaccgaagatatttacctggaatag

SEQ ID NO: 195537 - DNA, 1335 bp, synthetic construct
  misc_feature 1..1335: note = Description of Artificial Sequence: Synthetic coding sequence
  source 1..1335: mol_type = other DNA
atggccgaccgggccgagatgttcagcctgagcaccttccacagcctcagcccccccggttgccgccccccccaggacatttcacttgaggagtttgacgatgaggacttgtcagaaataacggatgactgcggattagggctatcctacgactctgaccactgtgagaaagattcactgtcacttgggcgaagtgaacagccgcaccctatttgttcctttcaagatgattttcaggagtttgaaatgatcgacgacaatgaggaggaggaagacgaggaggatgatgaagaggaagaggatgcagaggattcagcgggcagccccggaggaagggggaccggcccctctgccccaagagatgcttccctcgtttacgatgctgtgaagtacaccttggttgtcgatgagcacactcagttggaactcgtgtctctccggaggtgcgctgggctcggtcacgacagtgaggaagattccgggggggaggcttccgaggaagaggctggggcagcgttgttgggagggggccaggtatccggggacacctcaccagattcacctgatctgactttttcaaagaagttcctaaatgtttttgtgaactcaacatcaagatctagttctacagagtcctttggcctgttctcctgcctcgtgaacggagaggagcgagaacagacacatcgagcagtctttaggtttatccccagacatcctgacgaactcgagctggatgtggatgaccctgtcctggtcgaagccgaagaggacgatttttggtttcggggcttcaacatgaggacaggagagagaggggtcttcccagctttctatgcccacgccgttccgggaccggctaaggatctgctcggaagcaaaaggagtccctgttgggtcgaacgcttcgatgtgcaattcttgggaagcgttgaggtaccttgtcaccagggcaatggtatcctttgtgcagctatgcaaaagatcgcaacggctcgcaagcttactgttcatctgcgccctcctgcaagttgcgacctggagatttccttacgcggcgtcaagctctccctgtctggcggtggtcctgaattccagcggtgttctcacttttttcagatgaagaacatttcattctgtggctgccacccccgaaactcgtgttactttggtttcatcaccaaacaccctctgttgtctagatttgcctgtcatgtgtttgtcagtcaggaatccatgagaccggtggcacaaagcgttggccgtgcgttcttggagtactaccaggagcacctggcctatgcctgcccgactgaggacatctacctggagtag

SEQ ID NO: 195538 - DNA, 1677 bp, synthetic construct
  misc_feature 1..1677: note = Description of Artificial Sequence: Synthetic coding sequence
  source 1..1677: mol_type = other DNA
atgatcagcagcatcagcgagaccgagctggagctgagcagcgacggcgggagctcctcgtctggcagatcaagtcatcttactaattctatcgaggaggcgtcaagtcctgctagtgagccagagcctccacgtgaaccccctcgtcgccctgccttccttcctgtgggtccagatgatacaaattcggaatacgagagtggatctgagtctgagcctgatctgagcgaggacgctgactcgccatggcttctgtcaaatttagtgagcagaatgattagtgagggcagcagtccaattaggtgcccgggccagtgtctcagccctgctcctaggcccccaggggagcccgtttcgcctgcaggaggcgctgcccaagattcccaggatcccgaagccgctgctggccctgggggggtggagctggtggatatggagactctgtgcgccccaccaccacctgccccggctgctccaagacctgggccagctcagcccggcccctgcctattcttgtctaatcctaccagggatacgattacacccctatgggctgcaccgggtcgtgccgccagacctggcagagcttgtagcgcggcttgctcagaagaggaagatgaagaagatgatgaagaagaagaggacgctgaggattcggctggctctcctggaggacgcggaaccggcccttctgcacccagggacgcctctctcgtctatgacgccgtcaaatatacattggtggttgacgagcacacccagttggaactcgtcagtctcaggcgctgtgctgggctcggacacgacagcgaggaggactctggtggggaggcatccgaagaagaagctggcgccgcgctgttaggtggcggacaggtttctggagatacatcaccggacagtccagacttgactttttcaaagaagttcctgaacgtttttgtgaattccacttctcggtcatcatccacagagtctttcggattgttctcttgcctcgtcaatggagaggaacgcgagcagacacacagggctgtgttccggtttatcccgagacatccagatgaactggagttagatgtcgatgatcctgtgctggtcgaagccgaagaagatgacttttggtttcgaggattcaacatgaggactggcgaaagaggagtcttcccggcattttacgcacacgccgttccaggccccgccaaggacctgctcgggtcaaaacggtctccctgttgggtggagaggttcgacgtccagtttctggggagcgtggaggtgccctgccatcagggtaatggtattctgtgcgctgccatgcaaaaaattgcaacagcccgaaagctcaccgttcatctgcgccccccggcatcctgtgacctggaaatatccctccgcggagtgaaactatccctgtcaggtggtggccctgaatttcaaaggtgcagccatttttttcaaatgaagaatatcagtttttgtggctgccacccacgaaactcctgttactttggttttatcactaagcaccccctgctgagccggttcgcctgccacgtgttcgtgtcacaggaatccatgcggcccgtagctcaatccgttggaagggccttcttggaatattaccaggaacatctggcttatgcctgcccaacagaagacatttacctcgagtag

SEQ ID NO: 195539 - DNA, 1677 bp, synthetic construct
  misc_feature 1..1677: note = Description of Artificial Sequence: Synthetic coding sequence
  source 1..1677: mol_type = other DNA
atgatcagcagcatcagcgagaccgagctggagctgagcagcgacggcggttcttcaagcagcggacgcagttctcatctgaccaatagtattgaggaggctagctcaccggcctccgagcctgaaccgccaagggagccacccagacgcccagcttttctccccgtgggccctgatgacaccaatagtgagtacgagtcagggagcgaatctgagcctgacctgagtgaagatgccgactcaccatggttattaagcaaccttgtaagcaggatgatcagcgaaggctcttcaccaatcagatgcccaggacagtgtttgagtcccgcccctcggccgcctggagagcctgtgagccctgcggggggtgcggcacaggatagtcaggatcccgaggccgccgctggccctggcggagtggagctagtggatatggagaccctttgcgctcctccgccccccgcgccagctgccccccgaccaggcccagctcaaccgggaccctgtctcttccttagcaatccgacaagggacacgatcaccccgctttgggccgccccgggcagggcagctaggcccggacgcgcttgctctgctgcttgctcagaagaggaggatgaagaagacgatgaggaggaagaagatgcagaggattcagcgggctcacctgggggaaggggaactggaccaagcgccccgagagatgcaagtctggtctacgacgcggttaagtacacacttgtggtcgacgagcatactcagttagagttagtgtctttacggcggtgtgccgggctgggacacgatagcgaggaagatagcggtggggaagcatccgaggaagaagcaggggccgccttactcggcggcggccaggtcagcggggatacatcacctgactctcctgaccttactttcagcaaaaagttcctgaacgtgttcgtgaactcgacatcgcggtcttctagtaccgagagttttggtttgttctcatgcctggtcaacggcgaggagcgtgaacaaacccaccgagctgtgttcaggttcatcccaagacatcccgatgagcttgaactagacgttgacgaccctgttctggttgaggcggaggaagacgatttctggttccgaggtttcaacatgagaacaggcgagagaggcgttttcccagctttctatgcacacgcagtccccgggccagccaaagatctccttgggtctaaacggagcccctgttgggtagaaagattcgatgttcaattcctcgggagcgtagaggtcccgtgccaccagggaaacgggatcctgtgcgctgccatgcagaaaattgcaactgcccgcaagcttacggtacatttgagaccacccgcaagctgtgacctggagatttccttacggggggtcaaactgtccctttctggcggcggacccgagtttcaaaggtgttcccactttttccagatgaaaaacatctccttttgcggatgccacccccggaattcttgctacttcggttttattactaagcaccccctcctaagccggttcgcttgccacgtctttgtcagccaggaaagtatgagacctgtggcacagtcggtcggacgcgctttcctcgaatactaccaggagcacctagcttatgcatgccccaccgaggacatctatctggagtag

SEQ ID NO: 195540 - DNA, 1641 bp, synthetic construct
  misc_feature 1..1641: note = Description of Artificial Sequence: Synthetic coding sequence
  source 1..1641: mol_type = other DNA
atggccgaccgggccgagatgttcagcctgagcaccttccacagcctctccccacctggatgccgaccccctcaagacattagcttggaggagtttgatgacgaggacctctcagagattaccgatgactgcggactaggactgagttacgactctgatcattgcgagaaggactcgttgagcctcggtcgcagcgaacagccacaccctatctgttcattccaggatgacttccaggagttcgagatgatcgatgataatgaagaggaagatgacgaagacgaggaggaagaagaggaggaggaggaaggcgacggtgaaggccaggagggtggagatccaggaagtgaggctccagctcctggacctctgatccctagtcctagtgtagaggagccccacaaacaccgccctaccaccctgcgtctcactaccttgggggcccaggactccctaaacaacaatgggggatttgacttggtgagaccagcgtcttggcaagaaaccgctctctgttcgcctgcccccgaggctctgcgcgagctgcccggtcccctgcccgctactgatactggaccgggcggcgctcaatcacccgtgcggcccggctgtgactgcgaaggaaatagacccgcagagccccctgctccgggaggcacaagtccgtctagcgacccgggtattgaagctgatttacgaagtcgaagcagcgggggtagggggggtaggcgctctagccaggaactaagctcaccaggttcagatagcgaggatgcaggaggtcgcctcgggagaatgatctcttcaatctccgaaacagagctcgaattgtccagtgatgggggctcttcatcctcaggcagatcctcccacttgacttttagcaaaaagttcctcaatgtgttcgttaatagcacgtctagatcctcctccactgaatcttttgggttattctcctgtctggttaatggagaagagagggaacagacccatagggccgtctttcgatttatcccccggcatcctgacgagctcgagttagacgtcgacgatcccgtcctggtggaggcagaggaggatgacttttggttccgtggctttaacatgcgaacgggcgagcgcggggtctttcccgctttctacgctcacgccgtgcctggcccagccaaggacttgctcggctccaaaaggtcaccatgctgggtcgaaaggttcgatgtccagtttttggggtccgtggaagtcccatgtcaccagggcaatgggattctgtgcgcagctatgcagaagattgccactgctagaaaactgaccgtgcatctgcgtccaccagcctcttgcgacctggagatctcactgaggggcgtgaagctttccctcagcggaggaggtccggaatttcagagatgctcccacttttttcagatgaagaacatttccttctgtggttgtcacccacgcaactcctgctattttggcttcattactaaacacccactgctgagccgctttgcatgtcatgtcttcgtatcacaagagtcgatgcggccggttgctcagtccgtaggccgggcttttctcgaatattaccaggagcacctagcttacgcttgtccaacggaagatatctatctggagtag

SEQ ID NO: 195541 - DNA, 1149 bp, synthetic construct
  misc_feature 1..1149: note = Description of Artificial Sequence: Synthetic coding sequence
  source 1..1149: mol_type = other DNA
atgagcgacagcaagtgcgacagccagttctacagcgtgcaggtggccgactcaacctttaccgtgctaaagcgttaccagcagctcaagccgatcggatccggggctcagggtatagtttgtgccgcattcgacacagtgctaggtattaacgtcgccgtgaagaaactctcacgcccattccagaatcagacacatgcaaaacgtgcatatcgtgagctggtactcctgaagtgcgtcaatcataagaatatcatcagcctgcttaatgtgttcactccccagaagaccctagaagagtttcaggacgtataccttgtgatggagctgatggatgccaacctgtgtcaagtcatacatatggaattggatcacgaacgcatgtcctacctactgtaccaaatgttatgcggcattaaacatctgcatagtgcaggaatcattcaccgggatctgaaaccttccaatattgtggttaaatccgactgcacccttaagattttggattttggactggcacggactgcgtgtacgaacttcatgatgactccctacgtggtcacgcgatactatagagctcctgaggtgatactgggaatgggttacaaggaaaacgtcgatatctggtcggtgggctgcattatggccgaaatggtgctacacaaagttttgtttcctggccgggattacattgatcagtggaacaaggtaatcgaacagctgggaactccgagcgccgagtttatgaagaaattacagcctactgttagaaactatgtggagaaccggccaaaatatccaggcatcaagttcgaggaactcttcccagattggattttcccatcagaatccgaaagagataaaattaaaacttctcaggcacgggacctgcttagcaaaatgctcgttatcgaccctgataagaggatttccgtggatgaagccctgcggcatccctatatcacagtgtggtatgatcctgccgaagctgaagcccctccgccgcagatctacgacgcccagcttgaggaaagagaacatgcgattgaggaatggaaggagctgatctacaaggaggtcatggactgggaagagagaagcaagaacggcgtcgttaaggaccagccatctgcgcagatgcaacagtag

SEQ ID NO: 195542 - DNA, 1149 bp, synthetic construct
  misc_feature 1..1149: note = Description of Artificial Sequence: Synthetic coding sequence
  source 1..1149: mol_type = other DNA
atgagcgacagcaagtgcgacagccagttctacagcgtgcaggtggccgacagcacattcactgttctgaagaggtaccagcaactgaagcctattggcagtggcgcacagggcatcgtctgtgctgcgtttgacactgtgctgggcataaatgtggcggttaaaaagctgtctcgccccttccagaaccagacccatgcgaaacgggcttaccgcgaattggtcctccttaaatgcgtaaaccataagaatataatatcactgctgaatgtgtttaccccccaaaaaactctcgaagaatttcaagacgtatatcttgtcatggagttgatggatgcaaacctctgccaggtgatccatatggagttagatcatgagcgcatgagctatttactgtaccagatgctctgcgggataaagcacctgcattcagccggtattatccacagagacctgaagccctcaaacatcgtggttaaatctgactgcacactgaaaatcctggacttcgggctggctagaaccgcttgcactaatttcatgatgaccccgtatgtggtgacacgctattacagggctcccgaagtgattcttggcatgggctacaaagaaaacgtagacatctggagtgtggggtgtataatgggggagctggtcaagggctgcgtaatattccagggaacagaccacattgaccagtggaacaaggtaatcgagcaattagggacccccagcgccgagttcatgaagaagctgcagcccaccgtccggaattacgtcgaaaataggcccaagtacccagggataaagttcgaagagctgtttcctgactggattttccctagtgaatccgagagggataaaatcaaaactagtcaggctcgcgacctgctcagtaagatgctcgtgatagaccccgataaaagaattagtgtggatgaagcactgcgccacccatacataaccgtctggtatgatcccgccgaagctgaagcccctcccccacaaatttatgatgcacaactggaagagagagaacacgccattgaggagtggaaagaactcatctacaaagaggtgatggactgggaggagagatccaagaacggagtggttaaggaccagcctagcgctcagatgcagcagtag

SEQ ID NO: 195543 - DNA, 375 bp, synthetic construct
  misc_feature 1..375: note = Description of Artificial Sequence: Synthetic coding sequence
  source 1..375: mol_type = other DNA
atgagcgacagcaagtgcgacagccagttctacagcgtgcaggtggccgactccacttttacagtcttgaagcgctaccaacagctgaaaccgatcggtagcggcgctcagggaatagtatggaggcaccactgctctgccttgcccttcatcggacgtatgcgcccggtgtctgtcatcgtgaccccatggatcaatcaagaagggatgttgtgtgaaggactgggctggccgagtctgccatggtgtttgacatccaccgtgtgccccgcccagaacgtgcggatcgtcagcttgactctgaatgtctcgcttctgcacggtaaaacagtctctagacgttctattacaggacagctaaaatgctgtatatag

SEQ ID NO: 195544 - DNA, 729 bp, synthetic construct
  misc_feature 1..729: note = Description of Artificial Sequence: Synthetic coding sequence
  source 1..729: mol_type = other DNA
atgagcgacagcaagtgcgacagccagttctacagcgtgcaggtggcagactccactttcaccgtcctgaaacggtatcagcagctcaagcctatcgggagtggggcacaggggatcgtgtgcgcagcctttgacactgtgcttggcattaacgtggctgttaagaaattgagtagaccattccaaaaccagacacacgctaagcgtgcttatcgtgagctggtactgctcaaatgtgtaaaccacaagaacatcataagcctgttgaacgttttcactccccagaaaactcttgaagaattccaagacgtttatctggtcatggagctcatggacgctaacctatgccaagtgatccatatggaactagaccacgaacgcatgtcttatctgctgtaccaaatgctctgcggaatcaagcacctccatagtgcaggaattatccacagagacttgaagcctagcaacatcgtggttaaaagcgactgcacacttaaaatattggacttcggcctggcgaggaccgcttgtacgaactttatgatgactccttacgtggtaacccggtactatcgcgctcctgaagtcatccttgggatggggtacaaggaaaatgtggatatttggtccgttggctgtattatgggtgagctggttaaagggtgcgtaatctttcaggggacggacaggattcttccgagagatctcggtccagctatgttgtcttag

SEQ ID NO: 195545 - DNA, 1275 bp, synthetic construct
  misc_feature 1..1275: note = Description of Artificial Sequence: Synthetic coding sequence
  source 1..1275: mol_type = other DNA
atgagcgacagcaagtgcgacagccagttctacagcgtgcaggtggccgacagtacctttacagtgttgaaaagataccagcagctgaaacccatcggcagcggcgcacaggggatcgtatgtgcagcgttcgatactgttctaggtatcaacgtggctgtgaagaaattgagccgcccctttcagaaccagacacatgctaaacgagcgtaccgggagctcgttctgctgaagtgcgtcaatcacaagaacatcatttcacttctaaacgtgtttaccccacagaaaaccctcgaggagtttcaggacgtgtatttagtgatggagctaatggatgcgaatctgtgccaagtgatccatatggaactcgaccacgagaggatgagttacctcctgtaccagatgttatgcggcatcaagcatctgcattctgctggaatcatacatcgagatctaaaaccttctaatatcgtagtcaagagtgactgtactctgaaaattctcgattttggcttagcaagaaccgcttgtactaatttcatgatgacgccctatgtagtgactcggtattatagagctccagaggtgattcttggtatgggctataaagaaaatgttgacatctggagcgtgggatgcatcatgggggagttggtaaagggatgcgtgatcttccagggcactgaccacatcgatcaatggaataaagttatagaacagctgggaaccccttctgcagagttcatgaaaaaactgcaacctacagtcagaaattacgttgagaaccggcctaagtacccaggcataaagttcgaggagctctttcccgactggatctttccttccgagagcgaaagagacaaaatcaaaacatcccaagcacgcgacctgctgtcaaaaatgttggtcatagatcctgataaaagaatcagcgtcgacgaagcccttcgccacccctatataacagtatggtatgaccccgccgaggcagaagctcctcctcctcagatatatgatgcccaactggaggaaagggagcacgccatcgaagaatggaaggagctgatttataaggaagtaatggactgggaagagagatccaagaatggcgtggtgaaagaccagccctccgacgccgcagtaagtagtaatgcaaccccaagccagtcttcatcgatcaatgatatctcctctatgagcaccgagcaaaccctggcaagtgatacggactcctccctggatgctagtacgggaccgctcgaagggtgtcgttag

SEQ ID NO: 195546 - DNA, 1275 bp, synthetic construct
  misc_feature 1..1275: note = Description of Artificial Sequence: Synthetic coding sequence
  source 1..1275: mol_type = other DNA
atgagcgacagcaagtgcgacagccagttctacagcgtgcaggtggcagatagcaccttcacggtccttaaacggtatcagcagctgaagccaattgggtctggcgcacagggaatcgtatgtgctgcttttgatacagtgttggggatcaatgttgcagtgaaaaagctatcaagacccttccagaaccagacccacgctaaacgagcatacagagagttggtgctgctgaagtgtgtgaatcacaaaaatattatctcacttttgaacgtgtttaccccacaaaagacactcgaggagttccaagacgtctacctcgtcatggaactaatggacgcaaacctgtgccaggtgatccatatggagctggaccacgaaagaatgagctatctgctctaccagatgctttgtggaattaagcatctgcacagtgcaggcattatacatcgcgatctcaagccatcgaatattgtggtgaagagtgactgcacactgaagattcttgattttggacttgctcggaccgcctgtacaaacttcatgatgacgccttacgttgtgacccgttattatagagctcccgaggttattttaggaatgggctacaaggagaacgtggatatctggtcagtggggtgcattatggccgaaatggtcctgcataaggtgctgttccctggtcgggactacatcgatcagtggaacaaagttatcgagcagctgggaactccctcagccgagtttatgaaaaagctgcagcctactgttcgaaattatgtggaaaataggccgaagtatccaggcattaaatttgaagaactatttccagattggatatttccgtccgagtcggaacgcgataagattaagacatcccaggctagagatcttctgagcaagatgctagtgatagatcctgataaaaggatcagcgtggatgaagccttacgccatccctacattaccgtgtggtatgacccagctgaagccgaagccccccccccccagatttacgatgcacaactggaagagagagaacatgcaattgaggaatggaaggagctcatttataaagaggtgatggattgggaagagagatctaagaatggtgtggtgaaggatcaaccatccgatgctgcagtctccagtaacgccaccccatctcagtcaagcagtattaacgatatttcttccatgtccactgagcaaacgcttgcatccgacactgacagctctttggacgccagcacgggccctctcgagggatgtcgatag

SEQ ID NO: 195547 - DNA, 315 bp, synthetic construct
  misc_feature 1..315: note = Description of Artificial Sequence: Synthetic coding sequence
  source 1..315: mol_type = other DNA
atgagcgacagcaagtgcgacagccagttctacagcgtgcaggtggccgactctacctttacagtgctcaagaggtatcaacagctgaagccaatcggctctggggctcaggggattgtatgcgctgccttcgacactgttctgggcattaatgtggctgtaaagaaactgtcgcgtccgttccaaaaccagacacatgccaagagagcatacagagagctcgttttgctgaaatgtgttaaccacaaaaatatcatatcactactgaacgtgtttactccccaaaagaccctagaagaatttcaagacgtgtag

SEQ ID NO: 195548 - DNA, 645 bp, synthetic construct
  misc_feature 1..645: note = Description of Artificial Sequence: Synthetic coding sequence
  source 1..645: mol_type = other DNA
atgagcgacagcaagtgcgacagccagttctacagcgtgcaggtggcagatagtacatttactgtgctgaagaggtatcagcaactaaagccaatagggtcaggggctcagggcattgtttgtgcagccttcgacactgtgttagggatcaatgtggcagtaaaaaagctctcgaggccgtttcaaaatcagacccacgccaagagggcataccgagaactggtcctgttgaaatgcgtgaatcacaagaacattatttctctgctcaacgtttttaccccccagaagacactggaggagtttcaggacgtatatctggtgatggagctcatggacgctaacctctgccaggtgatccacatggagctggaccacgaaagaatgtcgtacttgctctaccagatgctctgcggtattaaacatctgcacagcgccgggattattcatcgagacttaaagcctagtaatattgtggttaagtccgattgtaccctcaagattcttgatttcggactcgcgcggactgcatgcactaactttatgatgactccgtacgtagttaccagatactacagagcccctgaggtaatattaggcatgggctacaaagaaaatgctatcaaatactggacactgtggcactag

SEQ ID NO: 195549 - DNA, 1347 bp, synthetic construct
  misc_feature 1..1347: note = Description of Artificial Sequence: Synthetic coding sequence
  source 1..1347: mol_type = other DNA
atgctgtggctggccctgggccccttccccgccatggagaaccaggtcctcgtcatccgtattaagattcccaacagtggggccgtagattggacagtacactccgggccccagctgttattcagagatgtcctggacgttattggccaggtgttgcccgaggcaaccaccaccgcatttgaatatgaggatgaagacggagacaggatcaccgtacgctcagacgaagaaatgaaggcaatgctaagttactattactcaactgttatggaacagcaggtgaatggtcagcttattgagccactccagatttttccccgggcttgtaagcctcctggtgaacggaacatacacggcctgaaggtgaatactcgcgcaggcccttcacagcatagctcccccgcagtttccgatagtctaccttctaacagcctgaaaaagtctagtgccgaactgaagaagattctagccaatggacagatgaacgaacaggatattcgctatagggatacattagggcacggtaatggcggcaccgtctacaaggcatatcacgtgcctagcgggaagatcctcgccgtgaaagtaattctgctcgacataactctggaactgcaaaagcagatcatgtccgagctggaaattctgtacaaatgcgacagctcttacattatcgggttttacggagccttttttgtcgaaaaccggatatcgatctgcacagagttcatggatgggggcagcctcgacgtttacaggaagatgcccgaacatgtgcttgggaggatcgctgtagctgtggtcaagggcctaacatatctctggtctcttaaaatcctgcaccgcgacgtgaagccttctaatatgctagtcaacacgcgaggacaggttaagctgtgcgatttcggcgtgtcaactcagctggttaattccattgctaaaacctacgtaggcacaaacgcttatatggcacccgaaaggataagtggtgagcagtacggcatccacagcgatgtatggagcctgggaattagttttatggagctggccttagggcgctttccataccctcagatacaaaaaaatcagggaagtttaatgccgttgcagctcttgcagtgtatcgtggacgaagacagtcccgtcttacctgtgggagaattctcggagccttttgtgcactttatcactcagtgcatgcgcaaacagcccaaagagcgcccagcccctgaagagcttatgggccatcccttcatcgtgcaatttaacgacggtaatgccgccgtcgtcagcatgtgggtctgtcgcgccctggaggaaaggcgttcccagcaaggacctccctag

SEQ ID NO: 195550 - DNA, 1317 bp, synthetic construct
  misc_feature 1..1317: note = Description of Artificial Sequence: Synthetic coding sequence
  source 1..1317: mol_type = other DNA
atgctgtggctggccctgggccccttccccgccatggagaaccaggtcttagttatccgtatcaagatcccaaacagtggcgctgttgactggaccgtgcattccggcccacagctactcttccgcgatgtgctggacgtgatcgggcaggtactgcctgaggctaccacgactgcctttgaatacgaggatgaggatggtgataggatcaccgtgcggtcggatgaagaaatgaaggctatgctgtcatactactacagtacagtcatggaacaacaggtcaatggccaactcatcgaaccccttcagatctttccccgggcttgtaagccccccggagagcggaacatccacggccttaaagtcaataccagagccggaccgtcgcagcattcatcccccgccgtctccgacagtctccccagcaattccctgaagaaatcttctgctgagctgaagaaaatcctggccaacgggcagatgaatgaacaagacattcggtacagagacactctaggccacgggaatgggggcacagtgtataaagcttatcacgtcccaagcgggaagatcctggccgtgaaagttatcctgctcgacataaccttggagctgcaaaagcaaatcatgagtgaactggaaattctatataagtgtgattcttcttacatcattggattctatggagccttctttgtcgaaaataggatatctatttgtacggagttcatggacggaggcagtctcgacgtatatcgtaagatgcccgaacatgtgttgggaagaatcgccgtggccgtagtcaaaggcttgacctatttgtggagcctcaaaatcctgcatcgtgacgtgaagccatccaacatgctggtgaatacccgcgggcaggtgaaactctgtgatttcggggtctccacacaactcgtgaattctatcgctaagacttacgtgggcacaaatgcatacatggcccccgagcgcatctccggtgagcaatacggaatccacagtgatgtgtggagtctcggcatcagcttcatggagatccagaagaatcaaggcagtctcatgccgctgcaattgttgcagtgcattgttgacgaggattcacctgttctgccagtaggcgagttttctgaaccctttgtgcattttatcacccagtgtatgagaaagcagcccaaagagagaccagctcccgaagaactgatgggccatcccttcattgtgcagttcaacgatggcaatgctgccgtggttagcatgtgggtgtgccgcgcactggaagagcgaagatctcagcagggtccaccatag

SEQ ID NO: 195551 - DNA, 1335 bp, synthetic construct
  misc_feature 1..1335: note = Description of Artificial Sequence: Synthetic coding sequence
  source 1..1335: mol_type = other DNA
atgctgtggctggccctgggccccttccccgccatggagaaccaggtcctggtcatccggatcaagataccaaattcaggtgctgtagattggacagtccacagcggaccccagctactcttccgcgacgtgcttgatgtgatcggccaggttcttccagaagctacgacaaccgcctttgagtatgaggatgaggatggtgacaggataaccgtgcggagcgacgaggaaatgaaggctatgctgtcctattattacagcactgtaatggagcagcaggtgaacggacagctcattgaacccctgcagatcttcccaagggcgtgcaagccccctggggagcgtaatatccacggacttaaggttaacaccagggctggcccctctcagcactcatctccagccgtctccgactctctgccctccaactccctcaagaaaagttccgccgaactgaagaaaatcctcgcgaatgggcaaatgaacgagcaggatatcaggtatcgggacacactgggccatggaaatggtggaactgtgtataaggcttatcatgtgccttccggtaagatcctggccgtcaaggtgattctgctggacattaccctcgaactccagaaacagatcatgagtgaactggaaatcctgtacaagtgcgacagttcctacataattggcttctatggcgcattttttgtagagaaccggatcagcatctgcaccgaattcatggatggcggcagtctcgacgtgtaccggaagatgccggaacacgtgttgggcaggatcgcagtggccgttgtgaagggcctgacatacctgtggagtctcaagatcctgcatcgcgatgtaaaaccgagtaatatgctggtaaataccagaggccaagtcaagctctgcgacttcggagtgagcacacaactggttaatagcatcgcaaagacgtacgtcggtacaaatgcgtacatggcgcctgagagaatctccggcgaacagtatggcatccacagcgatgtctggtcattgggcatctcctttatggagattcagaaaaaccaaggatccctgatgccgttgcaacttctgcagtgtattgtggatgaagactcgcctgtgctgcctgtcggagagtttagcgagcctttcgtccatttcatcacgcaatgtatgaggaagcagccaaaggaaaggcccgcccccgaggaattgatgggccatccttttattgtgcaatttaacgatggcaacgcagccgtggtcagcatgtgggtctgcagagcactggaagagaggaggtcccccgcctcactgccttcaccaagttcgagcatctag

SEQ ID NO: 195552 - DNA, 1239 bp, synthetic construct
  misc_feature 1..1239: note = Description of Artificial Sequence: Synthetic coding sequence
  source 1..1239: mol_type = other DNA
atgatggagggccacttcccccagagcgacgtgatcggccaggtgttgccagaggccactactaccgcgtttgagtatgaggacgaggacggcgacaggatcaccgtaagatctgacgaagagatgaaggccatgctgtcctactattatagtaccgtgatggaacagcaagtcaacggccagctgatcgaaccccttcaaatattcccgcgggcttgtaagcctccgggagagcggaacattcatggccttaaggtaaatacacgggccggaccaagccaacacagctcaccagccgtatccgactcattgccaagcaatagtttgaagaagtcgtccgccgaacttaagaagatcctggctaatggacaaatgaatgagcaggacatccgatatagagatacactgggccacggcaacgggggaaccgtgtataaagcttaccatgtgccttccggcaaaatactggcggtcaaggtcatactcctcgatattaccctggaactccaaaagcagataatgagcgaactggaaatcttatataagtgcgactcatcatatatcattgggttttacggtgcttttttcgtggaaaaccggataagcatttgtacagaattcatggatggcggctcacttgacgtttacaggaaaatgcctgaacacgtcctcggacgtatcgcagtggcagtggtcaaaggtctaacctatttgtggtccctcaagatcctgcaccgggacgtgaaaccatctaacatgcttgttaacacacggggccaagttaagctgtgtgacttcggagtctcaacccagctggttaattccattgccaagacttacgtaggaactaacgcatatatggccccagaacggatttccggcgagcagtacggaattcattccgacgtatggtccctgggtattagcttcatggagctcgccctcggacgttttccttaccctcaaattcagaagaatcaagggagcctgatgcctctgcaactgcttcagtgcatcgtggatgaggattctccagtgctgccagtcggagaattttccgagccattcgtacactttatcacccagtgcatgcgcaaacaacccaaggaacggccagcacctgaagaactgatgggccacccgttcatagtccagtttaacgatggaaatgctgcggtggtgtcaatgtgggtttgccgcgcgcttgaggagcgccggagccagcaaggccctccttag

SEQ ID NO: 195553 - DNA, 1005 bp, synthetic construct
  misc_feature 1..1005: note = Description of Artificial Sequence: Synthetic coding sequence
  source 1..1005: mol_type = other DNA
atgagccagagcaagggcaagaagcggaaccccggcctgaagatccccaaagaggccttcgaacagcctcagacttcaagcaccccgccacgagatctcgacagcaaggcctgtatctcaattggtaatcagaatttcgaggtaaaagccgacgatctggagccgattatggaactggggcgaggtgcctacggcgtggttgagaaaatgagacacgttcctagcggacagatcatggctgttaagcgtattcgagccaccgttaatagccaagaacaaaaacgcttgctgatggacctggatattagcatgcgcacagtggactgcccctttacagtaactttttatggcgcgctattcagagagggggacgtctggatttgtatggagttaatggacacatcccttgacaaattttacaagcaggtgatcgacaaaggccagactattcctgaagacattctcgggaaaattgctgtgtccattgtgaaggccctggagcatctgcattcaaagctttctgtgatccatagagacgtgaagccctctaacgttcttatcaacgccctcggacaggtgaagatgtgtgattttggcataagcggctacctggtggactctgtggccaagactattgacgcgggatgcaaaccgtacatggctcccgaaagaatcaacccagagcttaaccagaagggatacagcgtcaaatcagatatatggtcactagggattacaatgatcgagctcgccatattgcgatttccatacgattcttgggggacgccttttcagcagctgaagcaggtggttgaggagccatcgccccaacttcccgccgacaagttttcagctgagtttgtggatttcacatctcagtgtttgaaaaagaacagtaaggagcggcctacatacccggagctaatgcagcacccattttttaccctccacgaaagcaaaggtaccgacgtcgcctcctttgtaaagctgattttgggagattag

SEQ ID NO: 195554 - DNA, 1005 bp, synthetic construct
  misc_feature 1..1005: note = Description of Artificial Sequence: Synthetic coding sequence
  source 1..1005: mol_type = other DNA
atgagccagagcaagggcaagaagcggaaccccggcctgaagatccctaaagaggcctttgaacagccgcagacttcttcaacacctccgagagacttggactcaaaagcctgtatctcaattggcaatcaaaattttgaagttaaggctgacgacttagagcccatcatggagctgggacgaggcgcctacggagtagtggagaaaatgaggcatgtaccgtccggtcagattatggccgtaaaaagaattcgggcaaccgtaaactcccaggagcagaagcggcttctcatggacctggatatttccatgcgcactgtggactgtccgttcacagtgacgttctacggtgccctgtttagggaaggcgatgtttggatctgtatggagttgatggacacatcactggacaagttttacaaacaggtgattgacaaggggcaaactattccggaggatatcctgggcaagattgccgtttccatcgtgaaggctctggaacaccttcactccaaactctccgtgatccatagggacgtaaagccttccaacgttctgatcaacgccctcgggcaagtgaaaatgtgtgactttgggatttctggataccttgttgattcagttgccaaaacgatcgacgccgggtgcaagccctatatggctcccgagcggatcaatcccgaactcaaccagaagggatactcggtaaagagcgacatctggagcctgggaatcacaatgattgagcttgccatcctccgattcccctatgatagctggggaactccattccaacaactaaagcaggtagttgaggagccctcccctcaactccccgctgataagtttagcgccgagttcgtggacttcacatcccagtgcttgaagaagaactctaaagagagaccaacttaccccgagttgatgcagcatcccttctttacccttcatgaatctaagggaacagacgtcgcctcctttgttaaactgatcttaggcgactag

SEQ ID NO: 195555 - DNA, 2865 bp, synthetic construct
  misc_feature 1..2865: note = Description of Artificial Sequence: Synthetic coding sequence
  source 1..2865: mol_type = other DNA
atggaggaggaggagggcgccgtggccaaggagtggggcaccacccccgctggtccagtttggacagccgttttcgattatgaggctgccggggatgaggagctcactttgaggcgcggagatcgcgttcaggtgctgtcccaggattgcgccgtctccggcgatgaagggtggtggaccggacagctcccatccggtcgggtgggagtgtttccctctaactatgtggcaccgggagctcctgccgcacctgctggcttgcagctgccccaggagataccatttcacgagctacagctcgaagaaatcattggcgtggggggctttggtaaggtgtacagggctctctggagaggggaagaagttgccgtaaaggctgcaagactcgaccctgagaaggaccccgcagttacggccgaacaagtctgtcaggaagcgcgcttatttggcgctcttcagcatccaaatatcatcgccctacggggggcatgcctgaatcctccgcatctgtgtttggttatggagtacgcccgaggaggggccctgtctcgggtccttgcgggaagaagggtgcctccgcacgttcttgtgaattgggcggtgcaagtcgctcgaggcatgaattatctccacaatgatgctcccgtacctattattcaccgagatctcaagtccatcaacatacttattcttgaagcgatcgaaaaccataatctcgccgacacagtgttgaagatcacggatttcgggctggcccgagagtggcataaaacaaccaagatgagcgcggctgggacatatgcctggatggctccagaggtcatcagactgtcgctgtttagtaagagtagtgatgtgtggagtttcggagtactgctctgggaattgctgacaggagaagtgccatatagagagatcgacgcacttgcagtggcttacggagtggctatgaataagctcacgttgccgatccctagtacttgtccggagcctttcgccaggttattggaggagtgttgggacccggacccacacggcaggccagattttggctctatcttgaaaaggctcgaagttattgagcagtcagccctctttcagatgcccctggagtcttttcatagtctccaggaggactggaaactggaaatccaacatatgttcgacgatctaaggactaaagagaaggagctgagatcacgcgaagaagaactcctgagggcggcgcaggagcaaagatttcaagaggagcagcttcgtcgacgtgaacaagagctggctgagcgggaaatggacattgtggagcgggagttacacctgctgatgtgtcagcttagtcaggaaaagccaagagttcggaagcgtaaaggtaacttcaaaaggagccggttacttaagcttagggagggtggaagtcatatttccctgccttctggcttcgagcacaagatcacagttcaggcgtcccctacgttggacaaacgaaaggggtctgatggtgccagtcctcccgcatctccgtcaattatcccgcggctgagagccatacggctcacccccgttgactgcggagggtcgagctctggctcaagcagtggcgggtcaggtacttggagtagagggggcccccctaagaaggaagaactggtgggtggaaagaagaaggggcggacctggggccccagtagtaccttacaaaaagaaagggtcgggggggaagagcggctgaaaggcctgggggagggttccaagcaatggtcttcctctgcccctaatctcggtaaaagtcctaaacatacccccatagcccccgggtttgcaagcttaaatgagatggaggagttcgctgaagccgaggatgggggttcatccgtgccgcccagcccatactcgacaccaagctacctaagtgtgcctttgccagcagagcctagtcctggagctagggcgccatgggaaccaactccctccgcgccccccgcccggtggggccatggggcacggaggaggtgtgaccttgctctgctgggctgtgcaacattactaggcgctgtgggtctgggtgcagacgtggcagaggctcgcgccgctgatggggaggagcaacgtaggtggttagacgggctgttttttccccgggcgggacggttcccccgtggactgagtcccccagctagaccccacgggcgccgggaggacgtcggcccaggtctgggcctggcccccagtgcaaccttggtgagcttgagcagcgtgtccgattgcaattcaaccaggtcattgcttcgcagcgacagcgacgaagcagccccagccgccccctcaccaccgccatctccgcctgctccaacaccaactccatctccatcaactaatccactggtcgacctggagctcgaatcgtttaaaaaagaccccaggcagtcgctgacccccactcatgtgactgctgcgtgcgctgtcagcagaggccatcgaaggacccctagtgatggagccctggggcagcgcggtccccctgaaccggccggacatggcccagggcctcgcgatcttctagattttcctcgcctgcccgacccacaggctctcttcccagcccggcggagaccacctgagttccccggcagaccaacaaccctgactttcgcgccccgtcccaggcccgcggcttcccgtcccagacttgacccttggaaattagttagttttggtcgcactttgacgatcagccctcccagtaggccagacacaccggagtcccccggtccaccttccgtgcagccgaccctcctggacatggacatggaaggccagaatcaggattcaactgtgcctttatgtggcgcgcacggcagccactag

SEQ ID NO: 195556 - DNA, 2544 bp, synthetic construct
  misc_feature 1..2544: note = Description of Artificial Sequence: Synthetic coding sequence
  source 1..2544: mol_type = other DNA
atggagcccctgaagagcctgttcctgaagagccccctgggcagctggaacggatctggaagcggcgggggaggtggagggggaggcggccgccctgagggctctcctaaagcagccggctatgccaacccagtgtggacagcgctctttgattatgaacccagtggccaggatgagctagctttgcggaagggcgatagagttgaagttctatctcgtgacgccgccattagcggagacgaggggtggtgggccggtcaggtcggcggccaggtcggcatatttccgagcaattacgtgtccagaggcggaggacctcccccatgtgaggtcgcttcctttcaggaactgcgcctcgaagaagtgattgggatcgggggcttcgggaaggtgtatcggggatcctggaggggcgagttagtcgctgtcaaagctgctcgccaggacccagacgaggacatttcagtcaccgcagagtccgtgaggcaggaggcccgtctctttgccatgctcgcacatccaaacatcatcgccttaaaggccgtgtgcctcgaggagcctaacctctgcctagttatggagtatgctgccggcggcccgctgagccgtgcactagccggccggagggtcccgccacacgtgctagtcaattgggcagtacaaattgcacggggtatgcattaccttcactgtgaagcattggttcccgtcattcatagagatctcaagtccaacaatattttactgctgcagcccatcgagtctgacgacatggagcacaaaacattgaagattacagatttcggcctggcccgagagtggcacaaaaccactcaaatgtctgctgctggtacttacgcgtggatggcccccgaggtgattaaagcaagtacctttagcaagggctcagatgtttggagcttcggcgtgctgttgtgggagctgttgactggggaggtgccctacaggggcatcgactgtctggccgtcgcttatggcgtggctgtgaacaagctaactttaccgatcccctccacttgccccgagcccttcgctcaacttatggctgattgctgggcgcaggacccccatcgtcgacccgatttcgcttctatactgcagcagctggaggccctcgaagcccaggtccttagggagatgcccagggattcctttcacagcatgcaggaaggctggaaacgtgaaatccagggtctgttcgatgagcttagagccaaagaaaaagaattgctctcccgggaagaggaattgactcgcgctgctcgcgagcagcgcagtcaggctgagcagctgcgacggcgcgagcacctcctcgcccaatgggagcttgaggtgtttgagcgggaactcaccctgctgctccaacaagtggacagagagaggccacacgtacgccggcggaggggtacttttaagcgaagtaagctacgtgcccgcgatggaggcgagcggatctccatgcctctggatttcaagcacaggatcaccgtgcaggctagcccgggcctcgaccgtcgtcggaatgtgttcgaggtggggcccggggattccccaaccttccctaggttccgcgcaattcagctcgaaccggccgaaccgggacaggcatggggtcggcagtcacccaggcggcttgaagattcatctaacggcgaaagacgggcatgctgggcatgggggcctagctctccaaagccgggcgaggcccagaacggccggaggaggagcagaatggatgaagccacgtggtatctggactcggatgactcctccccactcggctctccgtcaacccctcctgctctaaacgggaatccccctaggccgtccttggaacccgaagagccaaagaggcccgttccagcagagcggggcagctcatccggcactcctaaacttattcagagggctctactgagagggaccgcacttctcgccagcctaggacttggccgtgacttgcagcctcccggaggtcccggcagagaacgtggtgaaagtccaactaccccaccaacaccgacccctgcgccatgcccaacggagccacccccgtcaccgctgatctgcttcagcctcaaaacacctgactcacccccaactcccgctccactcctcctggacctgggcattcccgtgggccagcgatccgctaagtctcccaggagagaggaggaaccccggggaggcacagtttcacctcccccaggcactagtcggagcgcccctggaacaccaggcaccccccggtcaccacccttaggattgatctctagacccagacccagtccactccgatctcggatcgacccgtggtcttttgtgagcgctggccctcgtccctcccctctgcctagcccacaacccgctccgcgccgggctccctggactctgtttcccgacagcgacccgttctgggactccccccctgccaatcctttccagggtggaccacaggactgtcgtgcccagactaaagacatgggggcacaggccccgtgggtcccggaagccggcccttag

SEQ ID NO: 195557 - DNA, 1773 bp, synthetic construct
  misc_feature 1..1773: note = Description of Artificial Sequence: Synthetic coding sequence
  source 1..1773: mol_type = other DNA
atggagcacaagaccctgaagatcaccgacttcggcctggcccgggagtggcacaagacaacacagatgtccgctgcggggacatatgcctggatggctccggaggtgatcaaagcctccacattttcaaaaggcagtgacgtgtggagttttggcgtgctgctgtgggaattgctgaccggggaggtaccttatagggggatcgactgcctggctgtggcctatggcgtggctgtgaataagctgaccttacccatcccttcgacctgtcctgagccattcgcccaacttatggccgactgctgggctcaggacccccacaggagaccggactttgcaagtatcttgcagcagttagaggccctagaggcgcaagtactgagggagatgcccagagattcctttcacagtatgcaggagggctggaaaagagaaatccagggactgttcgatgagctgagggctaaggaaaaggagctcttgtctagggaagaagagttgactagagctgcaagggagcagaggtctcaagcagaacagctcaggcgaagggagcacctgcttgctcagtgggagctcgaggtctttgagagggaactcacactgctactacagcaggttgacagggaaaggccacacgtcaggcggcggagaggcacctttaagaggtcaaaactccgtgctagggacggcggtgagagaatcagcatgccacttgatttcaagcaccggattaccgttcaagcttccccaggattggaccgcagacggaacgtattcgaagtgggtccaggtgacagccccaccttcccacgcttccgggctattcagctggaacctgccgagccaggccaggcttgggggcgccagtctcccagacgtttggaggacagcagcaatggggagcggcgggcctgttgggcctgggggccttcatctccaaagccaggcgaggcccagaatggccgcagacggtctaggatggatgaggccacttggtacttggactctgacgattcttcaccattgggttccccctctacccctcctgcgctgaacggaaatcctccaaggccgagcctggagccagaagagccaaaacgtcccgtgccagctgaaaggggcagtagcagcggtacccccaagctgatccagcgagccctgctccgaggcaccgcactgctggcaagcctgggtcttggaagggatttacaacccccaggaggcccaggccgagagcggggggagtctccaaccacaccccccacacccaccccagctccctgtcccaccgagcctccgccctcccccctgatctgttttagtttgaagactcctgactctccccctactccagcccctttacttctggatctggggatccctgtgggccagagatcagcaaaatctcctagacgagaagaggaacctcgtggtgggacagtctcccctcctcctggcaccagcagatcagctcctggtacacccgggacgcctcgttcaccgcccctgggattaatatcccgacctcggccctcccccctcagatcacgaatcgatccatggtcttttgtgtctgccgggcctcgcccctcacctcttccttctccacagccggcacctagacgggccccatggaccttgttccccgacagcgaccctttttgggactcccccccagctaatccttttcaggggggcccccaagactgcagagcacagacaaaggacatgggggctcaggcaccttgggtcccagaagcgggtccatag

SEQ ID NO: 195558 - DNA, 2580 bp, synthetic construct
  misc_feature 1..2580: note = Description of Artificial Sequence: Synthetic coding sequence
  source 1..2580: mol_type = other DNA
atggcctgcctgcacgagacccggacccccagccccagcttcggcggcttcgtgtctaccctgagcgaggccagcatgaggaagctcgacccagacacctcagactgtactcccgaaaaggatcttacaccaacccatgtgctgcagctgcatgagcaggacgccggcggccccggcggcgctgctgggagccccgagtcgcgcgcttctagggtccgggctgatgaggtccgtctccagtgccaaagtggtagtggatttctagaggggctgttcggctgcctgagacccgtgtggaccatgataggaaaagcctatagcacagagcacaagcagcaacaagaggatctgtgggaagtacctttcgaggagattctcgacctgcagtgggtgggctcaggagcccagggagctgtctttcttgggaggttccatggggaggaggtggccgtaaagaaggttcgcgatttgaaggaaacagatatcaaacacctgaggaaactcaagcatccaaatatcataacttttaagggggtgtgtacccaagccccttgctactgtattctgatggagttttgcgctcagggacagctatatgaagtcctgagagcgggaaggcccgtgacgccctcacttcttgtagactggagtatgggcattgctggggggatgaattacctacacctccacaaaatcatccaccgggacttgaagtctccaaacatgcttatcacctacgatgatgttgtgaaaatctcggactttggcacttccaaagagctgagtgataaatcaacaaaaatgagcttcgcggggaccgtggcgtggatggctccggaggttattcgtaacgagccagtcagtgagaaggtcgacatatggagtttcggtgtcgttctctgggagctgcttactggagagatcccgtacaaggacgtggattcttctgctattatttggggcgtgggctctaattcactgcacctgccagtgccctcatcctgtccggacggcttcaagattttactgcggcagtgctggaatagtaagcccaggaatcggccaagctttcggcaaatcttactacatctcgacatcgccagcgcggacgttctgtccacaccccaggaaacgtattttaagtcccaggcagagtggagggaggaggttaaattgcatttcgagaagatcaagtccgaaggcacctgccttcatcggctggaggaggaactggtgatgcgccggagggaagaactgaggcatgccctcgacattagggagcactatgaacggaagttggaaagggcaaacaatctgtacatggagttaaatgccctgatgctgcagttggagctaaaggaaagggaattgctgcgaagggaacaggctctcgaaaggagatgcccaggcctcttaaagccccatccatcaagaggactgttacacgggaatacaatggagaaactcattaagaagcgaaatgtgccgcaaaagctttcacctcactcgaagagaccagatatcttgaaaactgagagcctgttgcccaagctcgacgctgcccttagcggagtgggcttacccggttgtcccaagggtcctccatcgcctgggaggagtcggcgcgggaagacgcggcatcggaaagcttcagctaaagggtcgtgtggtgacctccccggtctgcgaactgcagttccccctcacgagcccggcggtccagggtccccaggcggtctgggcggcgggccatcagcttgggaggcctgccccccagcgctgcggggtctccaccatgacctgctcctcagaaagatgagttccagcagcccggacctgctctctgcggctcttggctcgcgtggtagaggtgctacagggggcgctggggaccctggctccccccctcccgctaggggagatacccctccatccgagggttctgcaccagggtcaacttcccccgactcccctggaggcgctaagggggaacctccgcctcctgtgggcccgggggagggagttggcctgttgggaactgggcgggagggcaccagcggccggggagggtcaagagctgggtcacagcacctgactccagccgcccttttatatcgagcggccgtaactagatcccagaagcgtggcatcagctctgaggaggaagaaggtgaagtggactctgaggtggagcttacatcctctcagagatggccccagtctcttaacatgagacagtccttgtctacatttagctccgaaaacccctcagacggagaagaagggacagcaagcgaacccagcccctcaggtacacctgaggtgggatcaactaacactgatgaaaggccagatgaacgcagtgatgacatgtgctctcaggggtctgagattccgctagatccaccccccagcgaagtcattccaggaccagagcccagcagcctaccgattcctcaccaggaactcctgcgcgagaggggcccacctaactccgaggattctgactgcgactcgaccgaactggataactcaaatagtgtcgatgcactcaggccaccagccagtctgccaccttag

SEQ ID NO: 195559 - DNA, 2901 bp, synthetic construct
  misc_feature 1..2901: note = Description of Artificial Sequence: Synthetic coding sequence
  source 1..2901: mol_type = other DNA
atggccaacttccaggagcacctgagctgcagcagcagcccccacctgcctttcagtgaatctaaaaccttcaacggcttacaagatgagctcacagcaatggggaaccaccccagtcccaagttactggaggaccagcaggaaaaagggatggtccgaaccgagctaattgagtcagtgcactctcccgtcactaccacagtactgacttcagtatccgaagatagtagagaccagttcgaaaattctgtgttgcaactaagggaacacgacgaatcagaaactgccgtgagtcaggggaatagtaatactgtcgatggagagtcgacaagtggtaccgaggatatcaaaatacagttctccaggtctggcagcggaagcggagggtttctggaggggttgttcggttgtctgagaccagtctggaatattattgggaaagcttacagcaccgattataaactccaacagcaagacacgtgggaagtgccatttgaggaaatcagtgagctgcagtggctgggcagtggggcacagggtgctgtgttcttagggaagttccgcgccgaagaagtggcgatcaaaaaggtcagagagcagaatgaaaccgacatcaagcatctgcgaaaactgaagcaccccaacatcatcgccttcaaaggcgtgtgcactcaagccccatgctactgtatcatcatggagtattgcgcgcacgggcagctatatgaagtacttagagccggcaggaagattacacccaggctgctagtggactggtctaccggaatcgcatcaggcatgaactatcttcacttgcacaagattatacaccgcgacttgaagagccctaacgttctggttacacatactgatgccgtcaagatctcagatttcggtacttctaaggaattatctgacaaaagtaccaaaatgtcatttgccgggactgttgcttggatggcccctgaggtcattaggaacgagcctgtttccgaaaaagtcgacatctggtccttcggcgtagtgctttgggaacttcttaccggcgaaatcccttataaggatgtcgattcatcagcgataatttggggggtcggctctaacagtttacacctgcctgtccccagcacatgccccgatggctttaagatcctaatgaaacagacttggcagtccaagccacggaaccgcccttcctttcgccagactctgatgcacttagacatagcctcagctgatgtcctcgccaccccacaagagacttatttcaagagtcaggccgagtggagggaggaagtaaaaaagcatttcgagaagattaagtccgaaggcacgtgcatccacagattggacgaggagctgatcaggaggaggagggaggaattgcgacatgctcttgacatcagggagcactatgagagaaaactcgagcgtgcaaataacctctacatggaactgtctgcgatcatgctacagctcgagatgagagagaaggaattgattaaaagggagcaggccgtggaaaaaaagtatccaggcacatacaaacgtcacccagtgcggccaataattcatccaaatgccatggagaagttaatgaagaggaagggagtgccccacaagtcaggcatgcagaccaaaagaccggatctcctccgctctgaagggatccccacaactgaagtggcccccactgcttcgcctctgtctggaagcccaaagatgtcaacttctagttccaaatcccgctaccgatctaagcctaggcataggagaggaaactccagagggtcccatagcgattttgccgctattctgaaaaaccagcctgcgcaggagaacagtcctcatccaacgtaccttcatcaggcacagtctcagtaccccagtctgcatcatcataactctcttcagcagcagtaccagcagcctcctccggccatgagccagtctcaccacccacgactgaacatgcacggccaagacattgccacgtgtgcaaacaaccttagatattttgggcctgcagccgcacttcggtccccattgtccaaccatgctcaacgtcagctgcctggtagcagcccagacttgatatccactgcaatggccgcagactgctggagatccagcgaacccgacaagggacaggccggcccatggggctgctgtcaggccgacgcttacgacccctgtcttcaatgcagaccggagcaatacgggtccctggacatcccctctgctgagcctgtgggacgctcccccgacctgagcaaaagcccggctcacaaccccttgttggagaatgcgcagagctctgagaagacagaagaaaatgagtttagcggttgtcgcagcgaaagttccctaggtacttcccatcttgggacaccgcctgctcttcctagaaaaactcgacccctccagaagtcaggggatgacagctctgaggaagaagagggagaggttgattcggaggtggagttccctagacggcagcggcctcatcggtgtatttcctcttgccagtcatactcaaccttttcttctgagaacttctcggtctctgacggagaagagggtaacacctccgaccacagtaattcccccgacgagctggccgacaagcttgaagaccgactggctgagaagttggacgatctgctgtcccagactcccgagattcctattgatataagcagccactcagacggtctgtctgataaggaatgtgcagttcgaagggttaagacacagatgtcattaggcaagctctgtgtggaggagcgggggtatgagaaccccatgcagtttgaggaatccgattgcgatagttccgacggtgagtgttccgatgcgaccgtacggactaacaaacattactcctccgctacttggtag

SEQ ID NO: 195560 - DNA, 2901 bp, synthetic construct
  misc_feature 1..2901: note = Description of Artificial Sequence: Synthetic coding sequence
  source 1..2901: mol_type = other DNA
atggccaacttccaggagcacctgagctgcagcagcagcccccacctgccctttagcgaatccaagacttttaacggcctgcaggatgagctaactgccatgggtaatcatccaagcccaaaactgctcgaggaccagcaggagaaaggaatggttcgtacagaactgatcgaatccgtgcattccccagtgaccactaccgtcctgacaagcgtctccgaggatagccgcgatcagttcgagaattcagtgctccaactcagggagcatgacgagtcagagacagccgtcagccagggcaattcgaacactgtggacggcgagtctacgtctggcactgaggatattaaaatccagttcagccggagtggtagcggatcgggcgggtttcttgaggggctctttgggtgcctgaggcccgtgtggaacatcattggcaaggcctacagcacggactacaagctgcagcagcaagacacgtgggaggtacctttcgaggagatttcagagctgcagtggctgggctctggcgcccagggagcggtgtttttggggaaattccgcgccgaagaagtcgccatcaagaaagtccgcgaacagaacgagacggatatcaaacatttaaggaagcttaaacatcctaacattatcgcattcaaaggggtgtgtacccaagccccctgctattgcatcataatggaatattgtgcacacggccagctgtacgaagtgttacgcgccggacgcaagatcacaccacggctgctggtggattggtccacgggcattgcttccggaatgaactacttgcacctacataagatcatccaccgggatttgaaaagccccaatgtacttgttacacacaccgacgcagtgaagatcagtgacttcggcacgtccaaggagctatccgacaagtctacaaaaatgagtttcgctggtactgttgcgtggatggcccccgaggtgatccgcaacgaacctgtcagcgaaaaagttgatatatggtcatttggggtggtgctctgggaacttttaacaggcgagatcccttacaaagatgtggacagtagtgcaatcatatggggagttggatccaacagcttgcatctgcctgtgcccagtacctgccctgatggctttaaaatactgatgaaacaaacatggcagtcaaagccacgcaatcgacccagttttcgccagaccctgatgcacctagatatcgcctcagcggacgttcttgccaccccgcaagaaacttactttaaatcacaggctgagtggagagaggaggtaaagaagcactttgagaaaatcaaatctgaaggcacctgcatccaccgtcttgatgaagagctcatcaggcgccgtagagaggagctgagacacgcactggacatccgagagcattacgagcgcaaactggaaagggctaataacctctatatggaactgagtgccatcatgctccagttggagatgagagaaaaggagcttattaaacgagagcaggctgttgagaagaagtaccccggcacatataagagacacccagtgcggcccatcattcatcccaacgctatggagaaactcatgaagcgtaaaggtgtcccgcataaaagcggtatgcagaccaagcgccccgacctgctccgatccgagggaattcctacaacagaggtagcacccaccgctagccccctgagcggttcgcccaaaatgagtacgagcagttcaaaaagtcgctatcgctcaaaaccccgacaccgaagaggaaattctcgcggatctcactctgactttgcggcaatcctaaagaatcaaccagcccaagagaatagcccacaccctacctatctgcaccaggcccaaagtcaatacccctctctgcatcatcacaacagccttcagcaacagtaccagcagcctcctcctgcaatgtcacagagccaccacccccgcctgaatatgcacggccaggacatcgcaacatgtgcaaacaatttacggtacttcggtcctgccgccgcgctccggtctcccctgtccaatcatgctcagcgccagttgcccggtagttcacctgacctgataagtaccgccatggccgccgactgttggaggtcatccgagccggataagggccaggctggtccatgggggtgttgccaggccgacgcctacgacccttgccttcaatgtcgccccgaacagtatggaagcttggacatccccagcgccgaaccggtgggccgctcgcccgacttatccaaaagccccgcgcacaaccctctgctagagaatgcccagtcaagtgagaagacagaagagaatgagtttagtggttgccggtcagaatcttccttgggcacctcgcatctgggtacccctccagcactcccccgaaaaacacgtccgttgcaaaagtcaggggacgattccagtgaggaggaggagggagaggtcgattccgaagtcgagtttccgcgacggcagcggcctcacagatgcatatcgtcttgccaatcctattccaccttcagtagtgaaaattttagcgttagtgatggagaggaaggaaacacaagcgatcatagtaactcacccgatgagttggcagataaacttgaggacagactcgccgagaaactggatgacttgctgtcccaaaccccagagatccccatagatatctccagccactccgatgggctaagtgacaaggaatgcgctgtacggcgagtcaagacccagatgtctttaggaaaactctgtgtcgaagaacgcggatacgagaacccaatgcaatttgaggagagcgactgtgactcttcagacggcgaatgctccgacgccaccgttcgcaccaataagcattattcaagcgcaacttggtag

SEQ ID NO: 195561 - DNA, 414 bp, synthetic construct
  misc_feature 1..414: note = Description of Artificial Sequence: Synthetic coding sequence
  source 1..414: mol_type = other DNA
atggccaacttccaggagcacctgagctgcagcagcagcccccacctgccattctctgaatctaaaaccttcaacgggcttcaggatgagctaactgctatggggaatcacccatccccaaagctgcttgaggatcagcaggaaaagggtatggttcgaactgagctgattgagagcgtgcactccccggtgactactactgtgcttactagcgtatcagaggattccagggaccagtttgaaaattccgtcctgcaactacgtgagcacgacgagagcgaaaccgctgtgagtcaggggaactctaacaccgtcgacggtgaatctacctctggcacggaggatatcaaaatccaatttagccggagtgggtctggcagcggaggcttcctcgagggactatttggatgttag

SEQ ID NO: 195562 - DNA, 342 bp, synthetic construct
  misc_feature 1..342: note = Description of Artificial Sequence: Synthetic coding sequence
  source 1..342: mol_type = other DNA
atggccaacttccaggagcacctgagctgcagcagcagcccccacttgcccttttccgaaagcaaaactttcaatggtctgcaggatgagctgactgcaatgggaaatcatccaagccctaagctgctggaagaccaacaagagaagggaatggtccggacagaactgatagagtcagtgcactctccagtgactactacggtgctgacctctgtgtctgaggactcacgagatcagttcgagaactcagttcttcaactgagggagcacgacgagagcgagacagccgtcagtcaggggaacagtaatactgtggacggagaaagtacttccgggacatag

SEQ ID NO: 195563 - DNA, 2469 bp, synthetic construct
  misc_feature 1..2469: note = Description of Artificial Sequence: Synthetic coding sequence
  source 1..2469: mol_type = other DNA
atgagctacgtggagtgcaagtgcctgcagctggagaacaagaacacctgggaggtgcccttcgaagagattagtgagttgcagtggcttggatccggcgctcaaggtgcagtctttcttggaaaatttcgggctgaggaggtggcaattaagaaggtgagagagcagaatgaaaccgatatcaagcatctccggaagctgaaacacccaaacatcatcgcgtttaagggggtgtgtacgcaggcaccttgttactgtatcattatggaatattgcgcgcacgggcagctctacgaagtcctgcgcgctgggcgtaaaatcaccccacgtctgttggtcgactggagtaccggcatcgcctctgggatgaactacttgcatttgcacaagatcatccatcgggacctgaaaagccctaatgtactggtgacgcataccgacgcggtgaagatcagcgactttgggacatctaaggaattatcagataaaagcacaaaaatgagcttcgcaggaacagtggcctggatggctccagaggtgatccgcaatgaacctgtgtctgagaaggtggatatttggtcttttggagtcgtcctttgggagctgctgactggagagattccgtacaaagatgttgattcaagcgctataatatggggtgtcggctcaaatagtctgcacctgcctgttcccagcacatgcccagacgggtttaaaatcctgatgaaacagacatggcagtccaagcccaggaaccgaccctcctttaggcagaccctcatgcacctggacatagcgtctgccgacgtcctggcaactcctcaagagacgtatttcaagagtcaggccgagtggagagaggaggtgaagaaacattttgagaaaatcaagtcagaggggacatgtattcacagactggatgaagagctcatcagaaggagaagggaagagctgcggcatgcgctagacatacgggagcactatgagcggaagctggagcgcgcaaacaatctctatatggaactgtctgccataatgctacagctagaaatgagggaaaaggaattgataaaacgcgaacaagcggttgagaagaaatatcctggaacttataagcggcatccagtgcggccaatcatacatcccaacgccatggaaaaattaatgaagcgcaaaggcgtccctcacaaaagcgggatgcaaaccaagcggccggatttgctgaggagtgaaggcattccaaccaccgaagtggcacccactgcgagccctctgtccggcagcccgaaaatgtccacctctagtagtaagtcacggtataggtctaagcccaggcaccgccgcggcaacagtagaggatcacatagcgattttgccgcgatcttaaaaaatcagccagcacaagaaaattctccccaccctacctaccttcaccaagcacagtcgcagtacccttccttacaccaccataattctcttcagcagcaataccagcagcctcccccggccatgagccaatctcaccacccacggctgaacatgcatggtcaggacattgccacttgtgccaacaatctacgttactttggccccgctgctgcactccggagtcctctctctaatcatgcacaaaggcagctgccagggtcttcgcctgatttgataagtaccgccatggccgctgattgctggaggtccagtgaaccagacaagggtcaggccggtccttggggctgttgccaggccgatgcatatgacccctgccttcagtgtcgcccggagcaatacggatctcttgacataccttcagctgaacccgtgggacgctcaccagacctcagcaagtccccggcacataacccactgctggagaacgcacagagctccgaaaaaaccgaagagaatgaattctccggatgccggtccgagagttctctgggaactagtcacctgggaacaccacccgctcttcctagaaagacccggcccctccagaagtcaggggacgactcaagcgaagaagaggaaggggaagtggactccgaggttgagttcccccgccgccagcgtccccacagatgcatttcatcctgccagtcctacagcacattttccagtgagaacttcagcgtgtctgacggtgaagaaggaaacacatcggatcatagcaactctcccgacgagctggccgacaaactggaagatcggctggctgaaaaactggatgacctcctaagccagacacctgaaattccaatcgacatcagctcccattctgacgggcttagcgacaaggaatgcgcagttcgcagggttaagactcagatgtctctggggaagctgtgtgtggaggagcggggatatgaaaacccaatgcagttcgaagagagcgattgtgatagttctgatggcgagtgcagcgacgccaccgttcggacaaacaagcactattcctctgcaacatggtag

SEQ ID NO: 195564 - DNA, 2280 bp, synthetic construct
  misc_feature 1..2280: note = Description of Artificial Sequence: Synthetic coding sequence
  source 1..2280: mol_type = other DNA
atgtactgcggcatccagatcctggccctgtgggagcggggcgtgtgcacacaggctccatgctactgcataatcatggagtactgtgcgcacggccagctgtatgaagtactacgggccggccgcaaaataacacctcggctcctcgttgattggagcaccgggatcgcctcaggaatgaactatctccatttacacaaaatcatacaccgagaccttaaaagccccaatgtactggtgacgcataccgacgcagtaaagatcagcgactttgggaccagcaaggagctttcggacaaaagcactaaaatgagttttgcaggcacagtggcctggatggctcctgaagtgatcaggaacgaaccagtctctgagaaagtggatatctggagctttggcgtggtattgtgggaactgctgactggagagatcccatataaagatgtagattcatccgccatcatctggggggtcggctccaactctcttcacctcccggtgcccagcacctgccctgatggattcaaaatcctcatgaagcagacctggcaatccaagccgagaaaccgcccctcctttcggcagaccctcatgcaccttgacatcgcctctgcagatgtgctcgccacaccacaagaaacatacttcaagtcccaggcagagtggcgcgaggaagtgaagaagcacttcgagaagatcaagtcagagggcacttgtatccaccggctcgatgaggaattaatacggagacggagggaagaacttaggcatgcattagacataagagaacattatgaacgcaagttagagcgcgctaataatctctatatggagctgtccgctattatgctccagctggagatgcgagaaaaggaattaatcaagcgagagcaggccgtcgagaagaagtaccccggaacttacaaacgtcacccagtcagacctataatccacccaaatgccatggaaaagctgatgaaacgaaaaggagttccgcataagagcggtatgcagacaaagaggcctgacctactccggagtgagggtattccaaccacggaagttgcccctactgcatcacccctttccggctcccctaagatgtccaccagcagctctaaatctcgctataggtcaaaaccgcggcatagaaggggcaattcacggggaagtcactcagacttcgctgccatcctgaaaaatcagccagctcaggagaactcaccacatcctacttacctacaccaggctcagtctcagtaccccagcctccaccaccacaacagcctgcaacagcagtatcagcaaccgccccccgccatgagccagtcacaccatccgagacttaacatgcacgggcaggacatagcaacatgtgcgaataatctccgctactttggtccggcggctgctttgcgctcccctctctccaatcacgcccagagacaacttccaggctcgtcccctgatctcatttccacagcaatggcggccgattgttggaggtcttcagaacctgacaaaggccaggctggaccatggggctgttgccaggcggatgcctacgatccatgtttgcagtgccgtccggagcagtatggttcactggatataccgagcgcagagccagtgggcaggtcccctgatttgtctaagtcccctgcacacaatccgctcctggaaaacgcccagtcctcagagaaaactgaggagaacgagttttctggttgccggtcagaaagctcactgggaacatcacacctggggaccccaccagctttaccaagaaaaaccagaccgttgcagaagtctggagacgattccagcgaagaggaggagggtgaggtagatagtgaagtcgaattcccaagaaggcaacgcccccataggtgtatatcctcgtgtcagagctatagtactttttcatctgagaacttttcagtcagcgatggggaagaaggtaacacctccgaccactccaattcccccgatgaactcgctgacaagttggaagatcggctcgcagagaagcttgacgacctgctctcccagacaccagaaataccgatcgacatcagctcccactcggacggtctgagtgataaggagtgtgcggtgcggcgcgtgaagacccaaatgtcacttgggaaactttgtgtcgaggagcgtggttatgaaaatccgatgcagttcgaggagtctgactgtgactcctcagacggtgaatgcagcgacgccaccgtgagaacaaataaacattatagctccgctacgtggtag

SEQ ID NO: 195565 - DNA, 2841 bp, synthetic construct
  misc_feature 1..2841: note = Description of Artificial Sequence: Synthetic coding sequence
  source 1..2841: mol_type = other DNA
atggccgtgatggagatggcctgccccggcgcccccggcagcgccgtaggacagcaaaaggaactgccaaaagccaaggagaagactccccctctgggaaagaaacaatcatctgtgtacaagctggaggcggtggagaaaagtccggtgttttgtggcaaatgggaaatcctgaacgatgtgatcacaaaggggaccgctaaggagggcagcgaagccggccctgccgccataagtatcatcgcccaggctgagtgcgaaaactcccaagaattttctcccacattttctgaaagaattttcatcgcaggttccaagcagtactctcaatcagagtcactcgaccagatcccaaacaacgtcgcccatgctacagagggaaagatggcccgggtttgttggaagggtaaacggaggtccaaagctcgcaagaagcgcaaaaagaagagctccaaaagtctggcccatgcaggtgtggctcttgcaaagccactgccaaggacgcccgagcaagaatcctgcaccattcctgtgcaggaagatgaatcacctctgggggctccatacgtgcggaatacaccccaatttacaaaacccctcaaagaacctggactcggtcagctgtgttttaaacaactgggggagggactccgcgccctacccaggtccgaactgcacaagctgatttctcccctgcagtgcttgaatcatgtgtggaaattgcatcatccgcaggacggaggtcctttacccctgcccacacatcccttcccctacagtcggctcccccatccatttccttttcaccctttacaaccttggaaaccccatccattagaatccttcctgggtaaacttgcctgcgtagatagccagaagccgctcccggaccctcacctcagtaaactggcttgcgtggactcaccaaagcccctgcccggaccccacctggaaccctcatgccttagtcggggagctcatgagaagttctcagttgaggagtacttggtgcatgcacttcagggatcagtctcatcaggacaggctcactccttaacctcgttggcaaagacttgggcggcacgaggttcaaggtcacgcgaaccttccccaaagacagaagataatgaaggtgtactgctcaccgagaagctgaaaccagtggattatgaataccgagaagaggtgcattgggctacacatcagctgcgccttggccgcggtagcttcggtgaggttcatcggatggaagacaaacaaacgggctttcagtgtgccgtcaagaaagtacgtctggaggtgtttcgggcagaagaactgatggcatgcgctggactcacttctcccaggatcgtccctctgtacggagcagtaagggagggaccatgggtgaatatcttcatggagctacttgagggcggatccttgggtcagctggtgaaagagcagggttgcctccccgaggaccgagccttgtattaccttggacaggctctcgaaggactggagtacctgcattctcgcagaatcctgcacggagacgtgaaggctgacaatgtgttattgagttctgacgggtcccacgcagccctatgtgactttggccacgcggtctgcctgcagcctgatggccttggcaagtctctcctcaccggtgattatattcccggaaccgagacccatatggctccagaagtcgtgcttggccgcagttgcgacgcaaaggtggatgtatggtcttcctgctgcatgatgctgcatatgttgaatgggtgtcacccctggacccagttcttcaggggacccctctgtttgaagattgcctcagagccacccccagttcgggaaatacctccttcctgtgcaccactcaccgctcaggctatccaggagggcctacggaaggaaccaatccatcgcgtgtctgccgcggaattagggggaaaagtgaaccgtgcccttcagcaagtgggtgggctgaagtccccatggaggggcgaatacaaagagccacgacaccctccccccaaccaagcgaactaccaccaaacacttcacgctcagccacgcgagttgtctcctcgcgcaccggggccacggccggctgaggaaaccaccggaagagctcctaagctgcagcctcctctcccacccgaacctcccgaacccaacaagagcccaccacttactttgtccaaggaagagagtggtatgtgggaaccattaccgctcagctccctagagcccgcgcccgccaggaatccgtccagtcccgaaagaaaagccacagtgccagagcaggagctgcagcagctagaaattgagctgttcctcaacagcttgtctcaacctttcagcctggaggagcaggaacaaattctgtcatgtttgtctattgattctctttccctgtccgacgacagcgaaaagaatccgtccaaagcctcacagagttctcgggacactctttcctctggagtgcactcgtggtccagtcaggcggaggctcggtctagctcctggaatatggttctggcccgcggaagaccaactgataccccttcttacttcaacggcgtcaaagttcagattcagtctcttaacggggagcatctgcacatccgtgaatttcatagggtgaaagtaggagatattgccaccggaatcagctctcaaatccctgcagctgctttttccctggtaaccaaggacgggcagcctgtccggtatgacatggaagttcccgattccggcatcgacttgcagtgcacattagcgcctgatggcagtttcgcgtggtcttggagagtcaaacacggccagttagagaaccgcccctag

SEQ ID NO: 195566 - DNA, 1302 bp, synthetic construct
  misc_feature 1..1302: note = Description of Artificial Sequence: Synthetic coding sequence
  source 1..1302: mol_type = other DNA
tgcttcaagcagctgggcgagggcctgcgggccctgccccggagcgaactacataagctgatcagtcctttacagtgtctgaaccatgtttggaagctccaccacccccaggacgggggtccgctgcccttgccaacgcaccaccccttcccatttcacccactccagccatggaaaccgcaccccctcgaaagcttcctgggtaagctggcttgcgttgacagccaaaagcctttgcccgaccctcacctgtctaaactggcatgtgtggactccccaaagcctttgcctgggcctcacctagagccctcctgtttaagccgcggcgctcacgagaagttttcggtggaagaatacctagtgcacgctcttcagggctctgtatcttccgggcaggcgcacagcctaacttccttagcaaaaacgtgggcagctaggggctcacgatcgagggagccctctcccaagaccgaagacaatgaaggcgttctactcacagagaagcttaagcctgtggattatgagtatcgcgaggaggttcattgggccactcatcaactcagactgggtcgcgggagcttcggggaagtccacagaatggaggataaacaaactgggtttcagtgcgccgtgaagaaagtgaggctcgaagtgttccgggccgaggaactcatggcatgtgccggactcacttcgccccggatcgtccctctctacggggcagtgagggaggggccttgggtcaatatttttatggaactgttagaaggaggatcattggggcaattagtgaaggaacaaggatgcttgccagaagaccgtgctttatattacctggggcaagctttggagggactggagtacctgcatagccggagaatactgcacggagacgtaaaggccgacaacgtgctgctgtctagcgacggtagtcatgctgccctatgtgacttcggacatgccgtgtgtttacaacccgatgggctgggaaagagtctgctaaccggcgattacatccctggaacagaaactcatatggccccagaggtggttctggggcggagctgtgacgctaaggtggacgtttggtccagctgctgcatgatgcttcacatgctgaacggttgtcatccttggacgcagttcttcagaggaccactgtgcctcaaggtcggtgacggaactcagcacggccagcagggagagcttcaaggccccggagcacaggcagcaggatggcgggggtgttctgcagtggctgatggagctagaggaggactagtgattcatgtcgggtcctag

SEQ ID NO: 195567 - DNA, 3942 bp, synthetic construct
  misc_feature 1..3942: note = Description of Artificial Sequence: Synthetic coding sequence
  source 1..3942: mol_type = other DNA
atggagagcggcggcggcaacgcccccgccggcgccctgggcgccgcttccgaatctccacaatgtcctcccccacctggggttgaaggggccgccgggccagccgaacccgacggagccgctgaaggagctgcaggaggttccggcgagggcgagtcggggggcgggccgcggcgcgcacttagagccgtgtacgtcaggtccgagtcttcacagggcggcgcagcaggcggacctgaagccggggcgcgacagtgtcttctgcgcgcctgtgaagcggagggagcccacttaacatctgttccctttggcgagctcgattttggggaaaccgctgtcctcgatgccttctacgatgctgatgtagctgtggtcgacatgtctgatgtgagccgccagccctcactgttttaccacctaggcgttcgggaatcctttgacatggccaacaacgtcattctttaccacgacacggacgctgatacggctctgagcctaaaagatatggtaactcagaaaaacacagcaagttcaggcaactattattttatcccttacatagtcaccccgtgtgccgattatttctgctgcgaatctgacgcacagcgcagagcctcggaatatatgcagccaaactgggacaatattcttggacctctgtgcatgcctctagtggatcgcttcattagcctgctcaaggatatacacgtgacttcgtgcgtatactataaggagacgctgctgaatgatattaggaaggcacgggaaaaataccagggggaggaattagcaaaggagctagcgcgtataaagctgcggatggacaataccgaggtgctgacgtccgatataatcattaatctactgctaagttacagggatattcaagactatgacgccatggttaaactggtggagactctcgaaatgcttcccacctgtgatttggcggaccagcacaatattaaattccattacgcgttcgcattgaacagaaggaatagcaccggcgatagagagaaagcactgcagatcatgctgcaggtgttgcagagctgcgatcaccccggacctgacatgttctgcctgtgtggaaggatatacaaggacatctttcttgactcggattgcaaggacgacactagtcgcgactcagcaatcgaatggtaccgtaaaggctttgagctccagagctccctctacagcggtataaaccttgcggtcctcctcatagtcgccgggcagcaatttgagacatccctagaactacgtaagataggagtgagattaaactcactgctagggcggaaaggatctctggaaaaaatgaataactactgggatgttggccagtttttttctgtttctatgctcgcccatgacgtgggcaaagccgtccaggccgccgaacggctgtttaagctgaaacccccagtgtggtacctgaggagcctggtgcagaacttgttgctcatacgtcgattcaagaagaccattatcgaacacagtccccgccaagagaggctgaacttttggcttgacatcatattcgaggccaccaacgaagtcacaaacgggctgcgctttccagttctcgtgatcgaaccaactaaagtgtaccaaccatcttatgtatctataaacaacgaggccgaggagaggaccgtgagtctgtggcacgttagtccaacggaaatgaaacagatgcatgaatggaatttcacagcgtctagtatcaaaggtatctctctttcaaagtttgatgagcgctgctgctttctctatgtgcacgacaatagcgacgattttcagatctacttttctacagaggaacagtgttcgcgcttttttagcttggtgaaagagatgataaccaatacagcaggtagcacggtcgagttggagggcgaaacggatggggacacgcttgagtacgaatatgatcatgatgccaacggtgagagggtggtgctaggaaagggcacctatggtatagtctatgcgggccgagacctgtctaaccaggtccggattgccatcaaggaaattcctgagagagactcgcggtattcccagccacttcatgaagagattgctctccacaagtatctcaagcaccgaaacatcgtgcagtatctgggttccgtgagtgaaaatggttacatcaagatcttcatggaacaggtccccggcggatcactgtctgccctcctgcgttctaaatggggccctatgaaagaacctaccatcaaattttacactaagcagatcctggagggcctgaagtatcttcacgaaaatcagatcgtccaccgcgatataaaaggcgacaacgtgctggtgaatacgtatagtggggtggtgaagattagtgactttgggacatccaaaaggttagccggcgtgaacccctgtaccgagacattcactggaacgcttcagtacatggccccagaaattattgatcagggacccagaggatacggcgcccccgccgacatatggtcactcggatgtaccataatcgaaatggccaccagtaagcctccctttcacgaattaggtgagccccaagctgccatgtttaaagtggggatgtttaagattcatcccgagatacctgaggccttgagcgccgaggcccgtgcgtttattctgtcctgtttcgagccagatccacacaagagggcaacaaccgccgagctgctgcgggaaggcttcctgcgacaggtcaacaagggcaagaagaaccggattgcgtttaaacccagtgagggaccgagaggggtggtcctcgccctacccacacagggagagccaatggctacctccagttcggagcacggatccgtgtcgccagattcagacgcccagccagacgctctcttcgagcggacgagagcaccacgtcaccacctggggcatttactgtcggtgcccgacgaatcgagcgctttggaggaccgcggcttagcctcaagccccgaagaccgggaccagggcctctttctgctccgcaaggactcagaacggcgggctatcctatacaagatactgtgggaggaacagaatcaagttgcttctaatctgcaagagtgcgtggctcagtctagtgaagagcttcacctgtccgtcggccatataaaacagataattggcattctgagggactttattcgatctccagaacacagagtaatggcaactaccatcagcaagcttaaggttgacctagatttcgactcatcatcaatcagtcagattcacctggtactgtttggctttcaggacgcagttaacaaaattctccggaaccatctcataaggcctcattggatgttcgcaatggacaatataatccgaagggctgtgcaggcagcagttacaatcctgatccccgaactgcgagcacacttcgaacccacctgcgagaccgagggagttgacaaagacatggacgaagctgaggaaggttacccccccgccaccgggcctggtcaagaggcacagccccaccaacagcatctctctctccagcttggtgagctgcgccaagaaacgaatcgcctactagagcacctcgtggagaaagagagggagtaccagaacctgctcaggcagacactcgagcagaagacgcaggagctctaccatctacagttgaagctcaagagcaactgtattactgaaaatcccgccgggccatacggccagagaactgataaggagctgatagactggttgagactgcagggagcagacgcgaagaccatagaaaagatagtggaggaaggatatacactgtctgacattctgaacgaaatcacaaaagaggatctccggtacctgcggctcaggggaggcttactctgccgcctgtggagtgcagtttctcagtatagacgcgctcaggaagcttcggaaacgaaggacaaggcctag

SEQ ID NO: 195568 - DNA, 4677 bp, synthetic construct
  misc_feature 1..4677: note = Description of Artificial Sequence: Synthetic coding sequence
  source 1..4677: mol_type = other DNA
atgcgggaggccgccgccgccctggtgcccccccccgccttcgccgtaacaccagccgccgccatggaggagcctccacccccccctccccctccaccccctccgcctgaaccagagaccgaatcagagcccgagtgctgcttagctgccagacaggaggggaccctgggcgacagcgcatgcaaatcacccgagtctgacctggaagattttagtgacgaaactaatactgaaaatctgtatggtacatctcccccatccactccccgccagatgaagaggatgagtaccaagcaccaaaggaataatgtgggcaggcctgcttcacgttccaatctgaaagagaagatgaacgccccaaaccagccaccccacaaagataccggaaagaccgtggagaacgtggaagagtacagttacaagcaagaaaaaaaaatccgggctgccctccgcaccacagagcgcgatcgcaagaagaacgtccagtgcagctttatgctcgactcagtgggcggaagcctgccaaaaaaatcaataccagatgtggatttgaataagccctacctgagccttggatgctctaatgctaagttgcctgtaagtgtgcccatgccaattgcgagacccgcaagacaaacaagtagaacagactgtcccgctgaccgcttgaaattcttcgagacgctgagattgttgctgaaattgacgtctgtgtccaaaaaaaaggatagagaacaaagggggcaggaaaatactagcggtttttggctgaatagatctaacgagttgatctggctggaactccaggcttggcatgccgggcgtaccatcaacgaccaggacttctttctctataccgcaagacaagccatccctgatattatcaacgagatcctgacatttaaggtcgattacggtagctttgccttcgttagggacagggctggcttcaacggcacctccgttgagggccagtgcaaagctacccctggtaccaagatagtgggatactctacccaccatgaacacctccagcggcagcgtgtgtcctttgagcaggtgaaacggatcatggaactactcgaatatattgaagcactctacccgagtcttcaagccctgcagaaggactacgagaagtatgcagcaaaagattttcaggaccgggtgcaggccctctgcctttggctcaatatcacaaaggacctgaatcaaaagctgcgcatcatgggtactgtgcttggcattaagaacttatcagatattggctggccagtgtttgaaatcccatccccaaggccaagtaaggggaacgaacccgagtatgagggggatgacactgagggtgagcttaaggaactcgaatccagcaccgacgagtcagaggaggagcagatcagtgatcctcgagtgcccgagattcggcagccaattgacaacagttttgatatacagagccgggactgtattagtaaaaagcttgaaaggctggagagcgaggacgatagtctggggtggggcgctcctgactggagtacagaagcaggattcagtcgccattgcttaacatctatatatagaccattcgtggacaaggccttgaagcaaatggggctgcggaaactcatacttaggctacataagttgatggacggaagtctccagagagctcggatcgccttggttaagaacgatcgccccgtggaatttagtgagtttccggaccctatgtgggggagcgattacgtgcagctgtcccgtaccccaccatcatctgaagaaaagtgctcggccgtgtcttgggaggagttgaaagccatggatctcccaagttttgaacccgctttcctggtgctctgcagagtattgctgaacgtgatacacgagtgtctcaaactcagactcgaacaaagacccgccggagagccctcactcctgagcataaaacagctggtgagggaatgcaaggaggtgttgaagggtgggctcctaatgaaacagtattaccagttcatgttgcaagaggtactagaggacctggagaaacccgattgtaacattgacgccttcgaagaagatctacataagatgttgatggtgtattttgactacatgaggtcctggatccagatgctccaacagctccctcaagcctcacacagcctaaaaaatttgctcgaggaggagtggaactttaccaaagagatcactcactacattagaggaggagaggcgcaggccggaaaactgttctgcgatattgcgggcatgcttctgaaatctaccggctctttcctcgaatttggactgcaggaatcttgcgccgagttttggacatccgccgatgactcatctgcctccgatgaaatcagaagaagcgtaattgaaatctccagggcacttaaagagctttttcatgaagctcgcgagcgggcaagcaaagctctcgggtttgctaaaatgctgcggaaggatctcgaaatcgctgccgaatttagactttcagcccctgtgagggaccttctggacgtcctgaaatctaagcagtacgtgaaggtccagattcccggtcttgagaacctgcagatgtttgtacccgacacactcgccgaggaaaaaagtatcatcctccagttgctgaatgcggccgctggtaaggattgctccaaagattccgatgatgtattgattgacgcctacctcctgctgacaaagcacggagatagggcacgcgatagcgaggactcctgggggacctgggaggctcagcctgtaaaagtggtcccacaagtggaaacagttgacactttgagatcaatgcaggtggacaaccttctccttgtggttatgcagtcggcccatctgaccattcagagaaaggcattccagcagtcaatcgaaggtctgatgaccctgtgccaggaacagactagttcgcaacccgtgattgccaaggcccttcaacagctgaagaatgatgccctggagctctgtaacaggatctctaacgccattgatcgggtggaccatatgttcacgagcgaattcgacgccgaagtggacgaatcagaatcggttaccttgcagcaatattacagggaggcgatgatccagggctacaatttcggatttgagtatcataaagaagtggtacgtctgatgtctggtgagtttaggcagaagatcggtgacaagtacatctcctttgcacgcaagtggatgaactatgtgctgactaaatgtgagtctgggagaggaactaggccacggtgggccacacagggtttcgattttctccaagccatcgaacctgcattcatcagcgcactcccagaagatgatttcctatcactgcaggcccttatgaacgaatgcataggccacgttattgggaagcctcattcccccgtgacaggcttgtatctagccattcacagaaattcaccaaggcccatgaaagtgccccggtgtcactctgatcctccaaatcctcatcttatcattccgacgccagagggcttcagggggagttccgtgccagagaacgaccgcttggcatccatcgccgccgagctgcagtttcgctctctgtctaggcattcttctcccacagaagaacgggatgagccagcttaccctcgcggagattctagcggtagcacacggagatcctgggagctgcgcacacttataagtcagtccaaagacaccgcttccaagctgggccctatagaagctatacagaagtctgtccggctgttcgaagagaaacgctatcgggagatgaggcggaaaaacattattggacaagtgtgtgatacgcctaagagttacgataatgtcatgcacgtcggccttcgcaaggtaacatttaaatggcagcgggggaataagatcggggagggtcaatacggaaaggtgtatacctgcatcagtgtggacacaggcgagctgatggccatgaaagagattcgattccagccaaatgaccacaagactatcaaggagactgcggatgagctcaaaatcttcgagggcatcaaacaccctaaccttgtgcgctacttcggcgtagaactgcacagagaggagatgtacatctttatggagtactgcgatgagggtacactggaggaagtgagtcgcctggggctccaggaacatgtgataagactctattcgaagcaaattacgatcgcaattaacgtcctccacgaacatgggatcgtgcacagagacatcaaaggagctaacatctttctcacctctagtggactgataaaactaggcgacttcgggtgctcagtcaagctgaagaacaacgctcaaacaatgcctggggaggtgaacagtacgctcggcaccgccgcttatatggcaccagaagtcatcacccgggcaaaaggagagggccatggtcgcgcagctgacatctggagtctgggatgtgtggtcatcgaaatggtcacggggaaacggccttggcacgaatacgagcacaattttcaaattatgtataaagttggtatgggccacaaaccaccaatccccgaaagattaagtcccgaggggaaggattttcttagccattgtttagaatcagatcctaagatgcgctggaccgctagtcagcttctggatcactcctttgtcaaagtgtgcacagacgaggaatag

SEQ ID NO: 195569 - DNA, 4827 bp, synthetic construct
  misc_feature 1..4827: note = Description of Artificial Sequence: Synthetic coding sequence
  source 1..4827: mol_type = other DNA
atgcgggaggccgccgccgccctggtgcccccccccgccttcgccgtgacccctgctgctgcgatggaagagcccccccccccaccccctcctccgcccccacctccagagccggagactgagagtgagcctgagtgttgtctcgctgcacggcaggaaggtacacttggggacagcgcatgcaaaagtcccgaatctgatctagaggatttttccgacgaaactaatactgaaaacctgtacggcacctcccccccgtcaaccccccgccagatgaagcgtatgtctaccaagcaccaaagaaataacgtcggccgccccgcaagtaggagcaacctgaaagagaagatgaacgccccaaaccagcccccacacaaagataccgggaaaacagtggaaaacgtggaagaatacagttataaacaagagaagaagatacgagcagctctaagaacgactgaaagggatagaaaaaagaatgtacagtgctcttttatgctcgactcagtaggcggctctctaccaaaaaaaagtatacccgacgttgatttgaacaagccctatctctccctgggatgttcaaacgctaagctgccagtctcagtgccaatgcccattgccagacccgccaggcagaccagtcgaacagactgtccggccgacagacttaagttttttgagactctgaggctcctgcttaaactgacaagcgtgtccaaaaaaaaggaccgtgaacagagaggccaagaaaatactagcggcttctggcttaatagatcaaatgaactcatttggcttgagcttcaggcttggcacgcaggcagaactataaatgatcaggacttcttcttgtacactgccagacaagccatccccgatatcatcaacgagatactcaccttcaaggtggattacggatcttttgcctttgtaagagaccgcgcggggtttaacggcacctccgtagaggggcagtgtaaagctactccaggcacgaaaatagtaggttactctacccatcacgagcatttgcaaaggcagagagtgtcattcgagcaggtcaaaaggataatggagttactggagtacattgaggcgctttatcctagcctacaagccctgcagaaggactacgagaaatatgctgccaaagactttcaggatcgagtccaagcactgtgcttgtggcttaatattaccaaagacttaaaccagaagcttagaattatgggcactgtgctggggatcaaaaatctgtccgacatagggtggcctgtttttgaaatcccatctcctcgcccatctaaaggtaatgagccagaatatgaaggtgatgacaccgagggcgagttgaaggaattggagagctctaccgatgaatctgaggaagagcaaattagtgatcctagagtgcccgaaattagacagcccattgacaattctttcgatattcaatcccgcgattgcatctccaagaagctggagaggctggagtccgaagacgattccctgggctggggtgcccctgactggagcaccgaagctggcttctcccgacactgcctgaccagcatctatcgacccttcgtggataaagccctgaagcaaatgggtttgcggaagctcatcctccgactccacaaacttatggacgggtcactgcagcgagccaggattgctcttgtcaaaaacgatcgcccagtggaatttagcgaatttcctgacccgatgtgggggagcgactacgtgcagctatcccgaacaccccctagttcggaggagaagtgttcggcagtgagctgggaagagcttaaagctatggacttgccctccttcgaaccagcttttttggtgctgtgtcgtgtactgctcaacgtgattcacgagtgtctgaagttgcgccttgagcagcggcctgctggcgagccctcacttctgagtattaagcagctggtacgggaatgcaaggaggtgctgaagggaggtctgttgatgaagcaatattatcagtttatgctacaggaggtgctggaagatctggagaaaccggactgcaacatagacgcttttgaagaagacttacataagatgctgatggtgtattttgattacatgcggtcctggattcagatgctgcagcaactgcctcaagctagccattcactgaaaaacctcttggaggaggagtggaacttcacaaaggagattactcattatattagaggaggtgaagcccaggccggaaagctgttttgcgacattgctggcatgctactcaaaagcacaggaagctttctcgagtttggattacaagagtcctgtgccgagttttggacatcagccgatgactcgagcgcttctgacgagatcaggaggagtgttatcgaaatcagccgcgcactcaaagaacttttccatgaggcacgggagagggcgtccaaggcgttaggctttgctaaaatgttgagaaaagatctagagatcgccgcagagttcagattgagcgcacccgtgcgagatttactggacgtgcttaaaagtaaacagtacgtgaaggtgcagataccagggctggaaaatctgcaaatgtttgttcccgatactctggctgaagagaagagcattatcctccaactgctcaatgcggcagccggtaaggattgttccaaggacagcgatgacgtgctgatcgacgcctatctgctgctgacgaaacatggagacagagctagggactcggaggacagttggggcacatgggaagcgcaacctgtgaaggtggttccacaggtggagacagtcgataccctgcgcagcatgcaggtggacaacctgctgctggttgtgatgcagtcagctcacctgaccatccagcgtaaagcctttcagcaaagcatcgagggcctaatgaccctttgccaggagcaaacatctagccaacccgtgatcgccaaggcactgcagcaactgaagaacgatgcattagaactctgcaatcgcatctccaatgcaattgatcgcgtggatcatatgtttacgagtgagttcgacgctgaggtcgacgaaagcgaaagcgtcaccttacaacagtattaccgggaggccatgattcaaggatacaatttcggtttcgaataccacaaagaggtggtcaggcttatgagcggcgagttccggcagaagattggtgataagtacattagtttcgccaggaaatggatgaattatgtcctcaccaagtgtgagtccggccgagggacccggccccgctgggctacacagggatttgactttctacaagcaatcgaacccgcttttattagtgccttgcccgaggacgactttctgagtctccaggccttgatgaatgaatgcatagggcacgttattgggaagccgcactcccctgtgacaggtctgtaccttgccattcaccgaaactccccccgaccaatgaaggtaccgagatgccactcagatcccccaaatccgcacctgataattccgacccccgaaggattttccacgcggtcaatgccaagcgacgcccgctcacacgggagccctgcagctgcagccgcagccgctgccgcagccgtggcagcaagtcggccttcgccttccggaggagacagtgtgctgccaaagtccataagctccgcccacgatactcgcggatcctctgtcccggagaatgaccgcctagctagcatagccgcagaattgcagtttaggtcactttcaaggcacagctcaccaaccgaggaacgagacgaaccggcgtatcctcggggcgattcttctgggtcgacaagacggtcttgggagctgcgaacactgataagccagtctaaagacactgcctctaagctgggcccaatagaagccattcagaaaagtgtgcgcctcttcgaggagaagcgctatcgcgaaatgcgacgcaaaaatatcatagggcaggtctgcgacacacctaagtcgtacgataatgttatgcacgtgggccttagaaaagtgacctttaagtggcaaaggggtaacaaaattggtgaaggacaatacgggaaggtatacacatgcatctctgtggacacaggggagttaatggcgatgaaagaaattcgattccaaccaaacgatcataaaacaatcaaagagacagcggatgaattgaagatttttgaaggtatcaagcaccctaatctggtgagatactttggagtggagctgcaccgggaggagatgtacatcttcatggaatactgtgacgaaggcacactcgaggaggtgtcacgcctgggactccaggaacatgtgatacggttgtattccaagcagattacaatcgccataaatgtcctgcacgagcatggaattgtccaccgagatattaagggggccaacatttttttaacctcctccgggctgattaagttgggcgacttcggctgctccgtgaagttaaaaaacaacgcccagactatgccgggcgaggtgaactctacccttggaactgccgcttacatggctccagaggtgatcacccgggccaagggagagggtcatgggcgagcagctgatatttggtcattagggtgtgttgtcatcgaaatggtaaccgggaagaggccttggcatgaatacgagcacaactttcagatcatgtataaagttggaatggggcataaaccacctatacccgagagactttcaccagagggtaaggactttttaagccactgcctcgagtctgatccaaagatgcgttggacggctagccagcttctcgatcactcattcgttaaagtctgtactgacgaagagtag

SEQ ID NO: 195570 - DNA, 4497 bp, synthetic construct
  misc_feature 1..4497: note = Description of Artificial Sequence: Synthetic coding sequence
  source 1..4497: mol_type = other DNA
atgcgggaggccgccgccgccctggtgcccccccccgccttcgccgtgacgcccgccgcggctatggaggagccccccccgcctcctccaccgcctcctcctccccctgagccagagacagagtctgaacctgaatgttgcctggcagcacgacaggaaggaaccttaggagactctgcttgcaaatctccagaaagcgacctggaggatttttcagacgagacaaacacagagaatctgtacggcaccagccctccatcaactccacgacagatgaaacgaatgtcaacgaaacatcagagaaacaacgtgggccgccccgctagtcggagcaatctcaaggaaaaaatgaacgccccaaatcagccaccgcacaaggacactggaaaaactgtagaaaacgtagaagaatattcctacaagcaggaaaagaagatcagagctgcgctcagaacgaccgagagggataggaaaaaaaatgtccaatgctcctttatgttagactcagtgggaggcagtctcccaaaaaaaagcattcccgacgtggatctcaataagccttatttgtcccttggatgcagcaatgccaagctccccgtgtccgtccccatgccgatcgctaggccagcccggcagacttctcgcaccgactgtccggcagacaggcttaagtttttcgaaaccctgcgcttgctgttgaaactcaccagcgtgtcgaagaaaaaggatcgggagcaaagagggcaggaaaacactagcggcttctggcttaacagatctaatgaattgatttggttagaactgcaggcctggcacgccggccgtactattaatgaccaagacttctttttatataccgcacggcaggcaattcctgacattattaacgaaatcctcacctttaaggtcgactacggcagcttcgcattcgtgcgggaccgcgcgggattcaacggcacctccgttgaaggtcagtgtaaggccactcctgggacaaagattgtgggctacagcactcatcacgagcacctgcagcgccaacgggtctccttcgagcaagttaagcgcatcatggaattattggagtatattgaggctttgtaccccagcttgcaggccctacagaaagactatgaaaagtatgctgccaaggattttcaagatcgtgtgcaggccttgtgcctgtggttaaacatcacaaaggatctaaatcagaagttacgcatcatggggacggtgctaggcatcaaaaacctttcggacattgggtggcctgtgttcgaaataccaagcccaagaccatcaaaaggcaacgaacctgagtatgaaggcgacgacaccgagggcgagctgaaagagctggagagctcaactgacgagagcgaggaggaacaaataagcgacccaagagtgcccgagatccggcagccaatcgataattcgttcgatatccagtctagggactgcatttcaaaaaagctggagcgactggaatccgaggatgattctttgggatggggcgcgcctgactggtccaccgaagcaggattctctagacactgtctgacgagcatctatcgccccttcgtggacaaggcactcaagcagatgggactgaggaagcttattctcagactgcataagctgatggacggatctctccaacgggctaggatcgcactcgtgaagaatgaccgccccgtggagttctctgaattccccgatcccatgtgggggtcagactatgtgcagcttagcagaaccccccccagcagtgaggaaaagtgctcagcagttagttgggaagagttgaaggctatggatctgccaagcttcgagccagcatttctcgtcctctgccgagttctcctgaacgtgattcacgaatgtttaaaacttcgtctggagcagagaccagccggagaacctagtctgctgtctattaaacagctggtgagagagtgcaaggaagtgctcaagggtggcctgctcatgaaacagtattatcagttcatgctccaggaggttctggaggacctcgagaagccggattgtaacatcgatgccttcgaggaagatctgcacaaaatgctcatggtgtatttcgactatatgcggagttggatccaaatgcttcagcaattgcctcaggcaagtcactctctgaagaatctgctcgaggaggagtggaactttaccaaggagataacgcactacatcagaggtggcgaggcccaggccggcaagctgttctgtgacatcgctgggatgctcctgaaaagcacaggatcctttctggaattcggattgcaggaatcttgcgctgagttctggacaagcgcagatgactcatccgcatctgatgagatccgccgttcagtcatcgagatatccagggcgttaaaggagttgttccacgaggcacgcgagagagcttccaaagcactgggcttcgcaaaaatgttgcgcaaagacctggagatagcagcagagtttcgactctcggccccagtaagggatttgctcgacgtgctcaaatcgaaacagtacgtgaaagtccagatacctggcttagagaatcttcagatgttcgttcctgacacattagcagaagagaaatccatcattttgcagctgttaaatgccgccgccggcaaggactgttccaaagatagcgatgacgtcctgattgatgcctatctgctcctgaccaaacacggtgaccgggcgcgcgactccgaagatagttggggaacgtgggaagcccagcctgtgaaggttgtgccacaggtagagaccgttgacactctgcgaagtatgcaggtggataacctcctgctggtggtgatgcagagcgctcatcttacgatacaaagaaaggctttccagcagagtattgaagggctaatgacgctgtgccaggaacagacttcctctcaacctgtgatagcaaaggctttgcagcaattgaaaaacgacgcattagagctctgcaaccgcatctccaacgccattgatagagtagatcatatgtttacctcagagtttgatgcagaggtcgacgagtcagagagcgtcaccctccagcagtattatagggaggctatgatccaaggatacaatttcggcttcgagtatcacaaagaggtggtccggcttatgagcggcgagtttcgtcagaagatcggggataagtatatttcctttgcaagaaagtggatgaactatgtgctgaccaagtgtgagtcgggaaggggaacgcgcccaaggtgggctactcagggcttcgatttcctccaagcaattgaacccgctttcatttccgccctccccgaggatgatttcctgagtttacaggccctgatgaacgaatgcatcggccacgttattggaaagccccatagtccggtcacaggcctctatctggcgatccatagaaactctccccgccccatgaaagtacctcgctgccactcagatccacccaaccctcatttaatcatcccaactcctgagggttttagaggaagttctgtgcctgaaaacgatcgactggctagcatcgccgccgagctccagtttaggagtctgtcccggcacagcagccctaccgaggagcgggacgagcccgcttatcccagaggagatagctccggcagcacccgacgttcctgggaactgagaaccctaatcagccagtccaaggacacagcctctaaactgggtcctatcgaggcaattcagaaatcagtacggctgttcgaagagaagaggtaccgcgagatgcgcaggaaaaatattatcggacaagtatgcgatactccaaagtcatatgacaacgttatgcacgtcggactgaggaaagttacctttaagtggcaacgaggcaacaaaattggggagggacagtatggcaaggtgtatacatgcattagtgtcgataccggggagctgatggctatgaaagagatccggtttcagcccaacgaccacaagactattaaagagacggccgatgaacttaaaatattcgagggaataaaacaccccaacctggtgcgatacttcggagtcgagctgcatagggaagagatgtatatattcatggagtactgcgatgaaggaacgctggaggaagtgtcacggcttggtttacaggagcatgtaatccggttgtattctaaacagataaccatcgcgatcaacgtgctccatgaacacgggattgtgcatagagatatcaaaggtgcaaacatctttttaacctccagcggactgattaagctcggcgactttgggtgctcagtgaaattgaagaataacgcacagaccatgcccggtgaagtgaactctacgctgggtactgccgcttacatggccccggaggtcatcacaagggctaagggcgagggacacggaagggcagcagatatttggtctcttggctgtgtggtaattgagatggttacggggaaaatctgcaaggacactgaatag

SEQ ID NO: 195571 - DNA, 324 bp, synthetic construct
  misc_feature 1..324: note = Description of Artificial Sequence: Synthetic coding sequence
  source 1..324: mol_type = other DNA
atggaggagccccccccccccccccccccccccccccccccccccgaacccgaaaccgagagcgaaccagaatgttgtctagcggcaagacaagaagggacgctgggcgactcagcctgcaaaagccccgaatctgacctagaggacttttcagatgagactaacacggaaaacctatacggtaccagccccccaagcacccccagacaaatgaaaagaatgtccaccaaacaccagcgcaacaacgtgggtcggcctgcctccaggagtaatttgaagggagtgcgacagatttcccacgctgtgagcagctctctcaactag

SEQ ID NO: 195572 - DNA, 1866 bp, synthetic construct
  misc_feature 1..1866: note = Description of Artificial Sequence: Synthetic coding sequence
  source 1..1866: mol_type = other DNA
atggagcaggtgcccggcggcagcctgagcgccctgctgcggagcaagtggggcccccttaaagataatgagcaaaccatcgggttttataccaagcagatcctggagggcctgaaatacctgcatgataatcaaatcgtgcatagagacatcaaaggagacaatgtgcttatcaatacctatagcggggtgctgaagatctccgattttggcacttccaagaggctggctgggatcaacccctgcacggaaacctttaccggtacactgcaatacatggctccagagattatagacaaagggccaaggggctatgggaaggcggccgacatttggagtctgggctgcacaatcatcgagatggctactgggaagccgcccttctacgagctgggagaaccgcaggcagctatgttcaaggtgggaatgttcaaagtgcaccccgaaattccagaatcaatgtccgctgaagcgaaagcctttatactgaagtgcttcgagccagaccccgataaacgcgcttgtgctaacgatttgctcgtggacgaattcctcaaagtgtcgtctaagaaaaagaaaactcagccgaagttgagcgccctgagtgctggcagcaacgaatatttaagaagcatatcactgcccgtccctgttctggtggaagacacgagcagttcttccgagtatggatctgtgtctcccgacactgagcttaaagtggatccattctcttttaagacaagggctaagtcctgcggggaaagagacgttaagggcatccgtacgctgtttctcggcatccccgatgagaactttgaggaccattccgcgccgccttccccagaggagaaagattcaggattcttcatgctgaggaaagatagcgagaggcgtgcgaccctccatcgcattcttaccgaggaccaggataagatcgttaggaacctcatggaatcccttgcccaaggcgcagaagagcctaaacttaagtgggagcacatcaccacactgatcgcctccctaagagagttcgtgcgctctactgatcgtaaaatcattgccactacactttcaaagctaaagctggagttagacttcgattctcatggaatttctcaggtgcaagtagttcttttcggattccaggacgcagtaaataaagtgctacggaatcacaatattaagccgcactggatgtttgccctggattccattatccgtaaagccgtgcagacggcaataactatactggtgcccgagctccgacctcacttctcgttggcttctgaatccgacaccgccgatcaggaggacctcgatgtggaagacgatcacgaggaacaaccatccaaccaaaccgtgaggagaccccaggctgtcatagaggacgcagtcgccacaagcggagtctcaaccttgtccagcaccgtttcccacgacagccagtccgcgcaccgaagccttaatgtccagctgggtaggatgaagattgagactaacaggctgttggaggagttggtgcgtaaagagaaagagctacaggctctcctgcatcgcgctatcgaggaaaaagatcaagaaatcaagcacctcaaactgaagtcccagcccatcgagatcccagagctccccgtgtttcacctcaacagctctgggaccaatacggaggacagcgagttgaccgattggctgcgcgtaaatggtgccgacgaggacacaatttctaggttcctcgccgaggactatacgctgctggatgttctctattatgtcactagggatgacctgaagtgcctgaggctcagagggggaatgctctgtaccctgtggaaggcaataattgactttcgaaataagcagacttag

SEQ ID NO: 195573 - DNA, 4125 bp, synthetic construct
  misc_feature 1..4125: note = Description of Artificial Sequence: Synthetic coding sequence
  source 1..4125: mol_type = other DNA
atgagcaccgaggccgacgagggcatcaccttcagcgtgcccccctttgcccccagcggcttctgtactatccccgaggggggcatctgtagacgcgggggtgctgccgcagttggtgagggtgaggaacaccagcttcccccaccacccccaggaagcttctggaacgtcgagagtgccgcggcaccaggcattgggtgtcccgctgcgacctcttcctctagcgcaacgcgtggacggggatctagcgtggggggggggtcccggaggaccaccgttgcttacgtgatcaacgaagcttctcaggggcagttggtggtggccgagagtgaggctctccaatcactgagagaggcttgcgagacagtaggagcgacattagaaactctgcacttcggcaaactggacttcggggagaccaccgtgctcgataggttttataatgcggacattgctgtggtggagatgtcagatgcgtttagacagccatcattattctaccatctgggcgttcgggaatctttcagcatggccaacaatatcatcctgtactgcgatactaactccgattcgctgcagtccttaaaggaaatcatctgccaaaagaacactatgtgtactggtaattatacattcgtaccgtacatgataacaccacacaacaaggtttactgctgtgatagtagcttcatgaaaggattgaccgagttgatgcagcctaattttgagttgctcctgggtcctatctgcctgccccttgttgacagattcattcagctgttgaaggtcgcccaagcgtcctcctcccagtatttccgagagtctatcctcaatgatatacgcaaagcacgcaacctctatactggaaaggagctggccgctgagctggcacgtattcggcagcgtgttgacaatattgaggttctcacagccgatattgttattaacctgcttctgagctatagggatattcaagactacgactcgattgtgaaactggttgagacactagagaaactgcccactttcgacctggcgagccatcaccacgtcaagtttcattatgcctttgccctgaacagacggaatttgcccggggaccgtgcaaaagccttggatattatgattcccatggttcagagtgagggtcaggtagccagcgacatgtactgtcttgtggggagaatctacaaggacatgttccttgattctaactttaccgacaccgagagcagggaccacggtgcttcctggttcaaaaaagccttcgaatctgagccaaccctgcagagtggcattaactatgccgtgctactcctagccgctggccaccagttcgaatcctcgttcgagctgaggaaagtgggtgtgaagcttagctctttgttgggtaaaaaaggaaatcttgaaaaattgcagagctactgggaggtaggattttttctgggagcctctgttctggcaaatgaccacatgagagtgattcaggcaagtgagaagttgtttaaactcaagacccctgcctggtatcttaaatccatagtagagaccattctgatttataagcacttcgtgaagctcactacagagcagccagtagccaagcaagagttagtggatttctggatggattttctcgtggaagccactaagaccgatgtaacagtggtccgctttcctgtactaatccttgagcccactaaaatttaccagcccagctacttatctattaataacgaggtggaggaaaagaccatctctatctggcacgtgcttccagatgacaagaaagggatacatgagtggaatttctcagcctctagcgttcgcggcgtgtccatcagtaagtttgaagaacggtgttgctttctgtatgtactacacaacagtgacgattttcagatttatttctgcacagagttgcattgcaaaaaattcttcgagatggtgaacaccattaccgaggaaaaggggcgctctaccgaagaaggcgactgtgaatcagatttgctggagtatgactacgagtacgacgagaatggcgaccgagttgtcttaggaaagggcacgtacggcatcgtctacgcaggccgcgatctgagcaaccaggttaggatcgctataaaagaaatcccagagagagacagtagatacagccagccgctgcacgaggagatcgcactccacaaacacctgaaacacaagaatattgtccagtatttaggcagcttttccgagaatggctttatcaaaatcttcatggaacaagtcccagggggcagtttgagtgcactcctccggagcaagtggggccctcttaaagacaacgagcagacaataggattctacacaaaacaaatccttgagggcttgaaatacttgcatgataatcagattgtccaccgtgacattaaaggcgataacgtgcttattaacacatattctggggttctgaaaatcagtgatttcggaaccagcaaacgcctggccggtatcaacccctgcaccgagacgttcacaggcacacttcagtacatggcaccggaaattatcgataagggtccacgagggtatggcaaggcggcggatatttggtcattggggtgtaccatcattgagatggcgacagggaaaccgcctttttacgagctgggagagccacaagcggctatgttcaaggtgggaatgttcaaggtccatcccgagatccctgaaagcatgagcgctgaggccaaagcctttatcctgaaatgctttgagcccgacccagacaagcgggcttgcgccaacgacctccttgttgatgagtttcttaaggtatcctctaaaaaaaagaagacgcagcccaaactcagcgcgttatcagctggatccaacgagtacctgcgctctattagtttacccgtgccggtcctggtggaagatacgtcatcgagcagcgaatacggatccgtttcccctgacactgaactgaaggtggaccccttttcattcaagacccgcgctaagagctgcggcgaacgggacgtcaagggcatacggaccctgttcctgggtatacctgacgagaattttgaagatcactctgcccctccgtcacccgaagagaaggatagcgggttctttatgttgcggaaagattcagagagacgtgcaaccctgcatcgcattctcacagaggaccaggataagatcgtgaggaaccttatggagagtctggcccagggagctgaagaacccaaacttaaatgggaacacattactacacttatcgcaagccttagggagttcgtgcgctccacagaccggaagattatagctaccactctctccaaattgaagctggagcttgattttgatagccacggcatctctcaggttcaggttgttctattcggattccaggacgccgtcaacaaggtgttgcggaatcacaacataaaacctcactggatgtttgccctcgatagcattattagaaaggcagtgcagaccgctatcacaattctggtgccggaattgagaccacattttagcctggcatctgaatctgataccgcagatcaggaggacctggatgtggaggacgatcacgaagaacaaccatctaaccagaccgtccggcgtccgcaggccgtgattgaggatgctgtggccaccagtggtgtgtcaactctgagttccacggtctcccacgattctcagtccgcccatcggagcctcaatgtccaactcgggcggatgaagattgaaacaaacagactcctggaagagctggttcggaaggagaaggaactgcaggcactgttgcaccgggcgattgaagaaaaagaccaagaaatcaaacacctcaagttgaagtctcaaccaattgagatcccagagcttcccgtcttccacctcaattcatcaggcacaaacactgaagactctgaactcactgattggctgagagttaatggagctgacgaggacacaatcagccggtttctggcagaggattatacactcctggatgtactgtactatgtgacccgggatgaccttaaatgtctaaggcttagaggcggaatgctctgcactctgtggaaggcaatcattgatttccgtaacaagcagacttag

SEQ ID NO: 195574 - DNA, 3771 bp, synthetic construct
  misc_feature 1..3771: note = Description of Artificial Sequence: Synthetic coding sequence
  source 1..3771: mol_type = other DNA
accctgcagcgggccagcggcgccgccaccgaggccccccggcggagtgaacctccccctggcagcggtgtgccctcaggtgagcgcgctccagaacggagacggcggcggggcggagaaggcgccgcccgtgatggatcatgcctcgcccgtcgcgcgcgatcaagcccagaactgtggctggccagaaggtgcggctgggctggcgatgccgcagcggtcgctgcgcgacctggagagatgagcacagaggctgacgagggcatcacattttccgtgcctccatttgctcccagtgggttttgtaccattcccgagggcggcatctgtcgacgcggtggggcagcagctgtgggggagggggaggaacatcagctgcccccaccgccaccgggtagtttctggaatgtggaaagcgccgctgctccaggcatcgggtgccctgcagctacctcaagctcttccgcgactagggggagaggttcttcagtgggcggcggatccaggcgtacaacagtggcctacgttattaacgaggcatcccagggccaactcgtggtcgctgaatccgaggctctgcagagcctccgagaggcctgcgagaccgttggcgctacactcgagacgctccatttcggcaagttagatttcggggagactactgtgctcgataggttttacaacgccgacatcgctgtcgtggagatgtctgacgccttccggcagccctcactgttctatcacctgggcgtacgggagtccttttcaatggctaataatattatcctgtattgcgatactaactccgactccctgcaaagtctcaaagagatcatctgccaaaagaacacaatgtgcacaggcaattatacgtttgtgccttatatgataactccacacaataaagtgtattgctgcgacagtagctttatgaaagggctcacagagctgatgcaaccaaactttgagctgctgctgggccccatatgcttaccgcttgttgacaggtttatccagctgttgaaagtggcgcaagcctcatcaagtcagtacttccgtgagagcattctcaacgatatccgaaaggcacggaacctgtataccgggaaggaacttgcggcggagcttgccaggatccgacaaagagtcgataacattgaggtgctcacagccgacatcgtgattaatttgctgctgtcttatagggacattcaggattatgactctattgtgaaattagtcgaaacattagaaaaactgcctactttcgacctggcgtcccaccatcacgtcaagttccattacgctttcgctctcaatcgcagaaatctgcccggggatagagccaaggcattggatataatgattccaatggtgcagtcagagggccaagttgccagcgacatgtattgcttggtgggcagaatctataaagatatgttccttgactcaaactttacagataccgagtctcgtgatcacggggcgtcctggttcaagaaagcatttgagtcagagcccaccttgcagtcaggcattaattacgctgtactcctcctggccgcaggacaccaatttgaatcgagctttgagttgagaaaagttggagtgaagctctctagcctgctaggcaagaagggaaatttggaaaagttgcagtcatattgggaggttggattttttttgggtgctagcgtacttgctaacgaccacatgagggtgattcaggcctcagaaaagctgtttaaacttaaaactcccgcttggtatctgaaaagtattgtcgagaccatcctgatctacaagcatttcgtgaagctcaccaccgagcagccagtggccaagcaggagcttgtcgatttttggatggattttctcgttgaggccaccaagacagacgtgaccgtggttagattccccgttcttatcctcgagccaaccaagatctatcagccgagttacttgtctatcaataacgaagtggaggagaagactatctcaatttggcacgttttacctgacgacaagaagggaatccatgagtggaacttctctgccagttcggtcagaggagtttccatctccaagtttgaagagcgctgctgctttctgtatgtcctgcacaattctgacgacttccaaatatatttttgcaccgaactgcactgtaaaaagttcttcgaaatggtgaatactatcactgaggagaaaggaaggtccactgaggaaggcgactgcgaaagcgaccttctggaatatgactatgagtacgatgagaatggcgatcgggtagtcctgggtaaaggcacttatgggatcgtatacgcaggcagggatttatccaatcaggttcgtatcgccatcaaagaaatcccagagcgcgattcccgttattctcaacctttgcacgaagagatcgcgcttcataagcacctaaagcacaagaacatagtgcagtacttgggctcattttcagagaatggattcataaaaatttttatggagcaggttcccggcgggtccctgtccgccctgctgcggagcaaatggggtccgttgaaagataacgagcagacaattggcttctacacaaagcaaattctggagggattgaagtatcttcacgataaccagattgtgcaccgtgatattaagggcgacaatgtccttatcaacacttattcaggtgttctcaagatcagcgactttgggacctcgaagagactggccgggatcaatccctgcactgaaacctttaccggaaccctacagtacatggcaccagagattattgacaaaggcccgagaggctatggtaaagccgccgacatctggagcttggggtgcactattatcgaaatggccacgggcaagccacccttttatgagcttggtgaaccccaggcagcgatgttcaaggtgggcatgtttaaggtgcacccagagattcctgaatcaatgtctgccgaggctaaggccttcattttaaaatgcttcgagccggacccagataagcgcgcttgcgctaacgacctgctagtggatgagtttttgaaggtcagctctaaaaaaaagaagacacagcccaagcttagtgacttatccatagctcaggcggagtatttgaggagcatatccttgccggtgcccgtgctcgttgaggatacctcctcctcaagtgagtatgggtccgtctcacctgatactgagctgaaggtggatcctttttctttcaagactagggccaaatcgtgcggcgaacgcgacgtgaaaggcatacgtactttattcctgggtatacccgacgagaacttcgaggaccacagcgcccccccgagccccgaggagaaggactccggtttttttatgctgaggaaagattctgaacgccgagccaccctccaccgaatcctgaccgaggatcaggataagattgtaagaaatctcatggagagcttggcacagggcgccgaggagcccaagttaaagtgggaacacattactacactgatagcctctctaagggagttcgtccgttccactgaccgtaagattatcgccaccactctgagtaagcttaagttggagctcgacttcgacagtcacgggatttctcaggtacaggtggttctgtttgggttccaggacgcagtcaacaaggtactacgcaatcacaacataaagccccattggatgttcgccctcgattctataatcagaaaggctgtacagacagctattactatcttggtccccggcatcaaaccatag

SEQ ID NO: 195575 - DNA, 3867 bp, synthetic construct
  misc_feature 1..3867: note = Description of Artificial Sequence: Synthetic coding sequence
  source 1..3867: mol_type = other DNA
atggccggcccctgcccccggagcggcgccgagcgggccggcagctgttggcaggacccacttgcagttgctcttagtcgcggtcgacagctggccgctcccccaggcaggggatgcgccaggagccgcccactgtccgtggtttatgtcctgaccagggagccacagccaggactggagcccagggagggtaccgaggctgagccattgccactcagatgtctcagagaggcctgtgcccaggtgccccgcccaaggcctccaccgcaactgcgcagcctgccgtttggtactttggagctcggtgataccgccgcattggatgcattctataacgcagacgtggtggtcttggaggtgagcagttccctggtccagccttccctgttttatcacctgggagtgcgggaaagtttttccatgaccaataacgtgctactttgtagccaggcggacttgccggaccttcaggccctaagagaggacgtattccagaagaattccgattgcgtgggctcatacactttgatcccttatgtggtcactgctaccgggcgcgttctgtgcggcgacgcgggacttctgaggggattagcagatggccttgttcaagccggggtcggtaccgaagctctcttgaccccgctcgtggggcgccttgcccgactgctggaagccactcccactgactcttgtgggtattttagggagaccatacggagggatattcgccaggcccgggaacggttttcggggcctcagctccgccaggagctcgcacgcctgcagagacgcctggatagcgtagaattgttatctccagatatcatcatgaacctgctgctgtcgtaccgcgacgtccaggattattcagctatcatcgagcttgtggagacactgcaggcacttcctacctgcgatgtggcagaacagcataacgtatgcttccactacacctttgctctcaatcggaggaaccgacccggggaccgagcaaaagctctgagcgtcctgctccccctcgtccagctggagggcagcgtcgcaccagacctgtactgtatgtgtggcagaatatataaggatatgtttttctcctctgggtttcaggatgcagggcacagagaacaggcctatcattggtatagaaaggcctttgatgttgaaccatccttgcacagcggcatcaacgccgctgtgctgctgatcgcagcaggccaacacttcgaagattccaaggaactcaggctgattggaatgaaactgggatgtctcctggccagaaagggatgtgttgagaagatgcaatactattgggatgtgggcttctacctgggcgcccagatcctcgccaacgacccgacacaggtggttctggctgctgaacagctttacaaactgaacgctccaatttggtatttggtgagcgtgatggaaactttcctactctaccagcacttccgtccgaccccagagcctccaggtggacctccgagacgagcccatttttggcttcactttctcctgcagtcttgtcagccatttaagacagcgtgcgcccagggagatcagtgtctggttcttgttctggaaatgaacaaagtgcttctgcctgcgaagctggaagtgaggggcaccgacccagtttctaccgttacattaagtctgctggagccagagacgcaagacataccgtcctcctggactttccccgtggcgagtatttgcggcgtgtcagcttcgaagcgtgacgagcgatgttgctttctgtacgccttgccgcctgcccaggacgtgcagctctgttttccttcagtgggccattgccagtggttctgcggattgatacaagcctgggtcacaaacccagactcgaccgccccagctgaagaggccgagggagcaggggagatgctggagtttgattatgagtataccgagaccggcgaaaggctggtcttgggtaaggggacatacggggtagtatatgctggaagagatcgacacacaagggtaagaatcgccatcaaggagatccctgaacgggatagccgctttagtcagccactgcacgaggagatcgcccttcatcgtagactgagacataagaatattgtgcggtatttaggcagcgcgtcccagggcggctatctaaagatttttatggaggaggtgcccggcggatcattaagcagtctattaagatcagtttggggtcctttgaaagacaatgagtccaccattagtttctacacacgccagatcctccagggtctgggatacctgcatgacaaccacatcgttcacagagatattaagggggacaacgttctcattaatacctttagcggcctgttgaagatatcagactttggaacctccaagcggctagcaggtataacaccttgcacagagacgtttactggcactcttcagtatatggcaccggagatcattgatcagggaccccggggatacggcaaagccgccgatatctggtctcttggatgcaccgttatcgaaatggccaccggccgcccgccatttcatgaactcggttctccacaggctgcaatgtttcaggtgggtatgtataaagtgcacccgcccatgcctagctctctgtctgcagaggcccaagcatttcttctgaggacgtttgaaccagatcccagactccgggcttctgcacagacattgctcggcgatccattcctacaacccggcaaacgctctcgttcgcccagctcccctcggcacgctccaagaccgtccgatgctccctccgccagtccgacaccttcagccaatagtactacccagagtcagacctttccttgcccacaggcaccttcccaacatcccccgtcaccgcctaagcgatgtctaagttacggcggcacttcccaattgagagtgccagaagagccggctgctgaagagcctgctagcccggaagaatcaagtggcctctctttgttgcatcaggaatccaaaagaagagcgatgctggctgccgtcttggagcaggagctccccgccctcgccgagaacctgcaccaggagcagaagcaggagcagggagctaggctggggcggaatcacgtggaggagttgctgcgctgtttgggcgcccacattcatacccccaatcggagacagctggcacaagaactgagagcactgcagggccggctcagggcacagggtctgggacccgctctcttgcaccggcctctgtttgccttcccagatgcagttaagcagattcttagaaagaggcagatccgcccccattggatgttcgtgctagattcgttactgagccgggcagtgcgcgctgccctaggggtgctggggcccgaagtcgaaaaggaagccgtgagccctcgaagcgaagagctgtcaaatgagggcgattcccagcagagtcctggacaacagtctcctctgcctgtggaacccgagcagggccccgccccactaatggtccagttgtctttactccgtgccgaaacagaccggttgagggaaatcctagccggcaaggagcgagagtaccaagcacttgttcaaagagcactgcagcgactgaatgaggaagccagaacatacgtgctggctcctgaaccgcccacagcgctcagcacagatcaaggcttggtgcagtggctgcaagagttaaacgtcgattcagggacgattcagatgctcctgaatcatagcttcacgcttcacaccctgctgacctacgccactcgggacgatctgatatacactcgtataagaggagggatggtttgccgtatctggcgagccatcctggcccagcgggctggcagtacgcctgtgactagcggcccatag

SEQ ID NO: 195576 - DNA, 315 bp, synthetic construct
  misc_feature 1..315: note = Description of Artificial Sequence: Synthetic coding sequence
  source 1..315: mol_type = other DNA
atggtgcagctgagcctgctgcgggccgagaccgaccggctgcgggagatcctggcaggcaaagagagggagtatcaggctctggttcagcgagctcttcagcgactgaacgaggaagcaagaacatatgtgttggcacctgaacctcccactgccttatcgactgatcagggtctggttcagtggttgcaggagttgaatgtggactctggcacgatccagatggggagagacggcatgccccatttggaagggcacctcggtaccgccagccgcatacacacaagccacctgtggaccctgagggctgaatag

SEQ ID NO: 195577 - DNA, 3843 bp, synthetic construct
  misc_feature 1..3843: note = Description of Artificial Sequence: Synthetic coding sequence
  source 1..3843: mol_type = other DNA
atggccggcccctgcccccggagcggcgccgagcgggccggcagctgttggcaggatccattagctgtggcactgtcccgaggaaggcaactggcggccccacccggcagaggatgcgcacgaagcaggccattatctgtggtctatgtgcttacacgcgagccgcagccaggcctggaaccacgtgaaggaacagaggctgagccgctgccactgaggtgtctcagggaagcatgtgcgcaggttcctcgcccaagaccccccccccagttgcggagtctcccttttgggaccctcgagctcggcgatactgccgcgttagatgccttctacaatgccgatgttgtcgtgcttgaagttagcagctccctagtacagcctagcttgttctaccacctgggggtgagggagtcattctctatgactaataacgtacttttgtgctcacaagccgaccttcctgacctgcaggcccttcgcgactgcgtgggcagctatactctgataccatacgtggtcactgcaactggtcgcgtgttgtgtggagatgctggtctactccgcggcctggctgatggcctggtccaagctggtgtgggaaccgaagccctgctgaccccattggtcgggaggttggctaggctgctagaggctactccaacggactcatgtgggtatttccgagagacaatccggagggacatccgacaggccagggaacgtttttcaggaccacagctgaggcaagagctggcccgcctgcagagacgactcgattcagtagagctgctgagccccgatatcataatgaaccttctgctgtcttaccgtgatgtgcaagactattctgcgattattgagctggtggagactctccaggccctccccacctgtgacgtggccgagcagcacaacgtgtgttttcactacacattcgcactgaatcgcagaaatcgacctggtgaccgcgcaaaggctctctcggtgctactccccctcgtccaactggaaggatctgttgcgcctgacttatattgcatgtgtggccgcatttataaggatatgtttttctctagtggattccaggacgctggtcatagagaacaggcttaccattggtacagaaaggccttcgatgtggagccctcactacacagtgggataaacgccgccgtgctgcttattgctgcaggtcagcatttcgaagattcgaaagaattacgcttgatcgggatgaagcttggctgcttactggcccgcaaggggtgcgttgagaagatgcaatattattgggatgtgggattttacttaggcgctcagattctcgcaaatgaccctacgcaggtggtcctggccgccgaacaactctataagcttaacgccccgatttggtatctggtgagcgtcatggaaaccttcctactgtaccagcacttcagacccacccctgaacccccaggggggcctcccaggagggcccatttctggttacatttcctgctgcagagctgccagccattcaaaaccgcatgcgctcaaggggatcaatgcctggtgctcgtgctggagatgaacaaggtcctgcttcccgccaagctggaggtgcgaggcaccgatcccgtgtcgacagttaccctctctctcttggaacccgagacccaggacattccctcctcttggacctttcccgtggccagtatatgcggtgttagtgctagtaagagggatgagcgttgttgctttctttacgccctccccccagctcaggacgtccagctatgttttcccagtgttggtcactgccagtggttttgcgggttaatccaggcgtgggtgacaaaccccgatagcactgctcccgccgaggaggccgagggagctggcgagatgctcgaatttgattacgagtacaccgagaccggcgaaaggctggttctgggtaagggaacatatggagtggtttatgccggaagagaccgccacacaagagttcgcatcgccataaaagagattcccgagcgcgactcccgcttttcacagccgctgcacgaagaaatcgctctccacagacgactgcggcataaaaacatagtgcgatatctcggctccgcttctcagggcggctatctgaagatcttcatggaagaagtccccggcggtagtctctcatctttgctccgcagcgtgtggggccctcttaaagataatgagtcgaccatttctttctatacaaggcaaatccttcaggggttgggctatttacacgacaatcatattgtgcatcgagacatcaagggcgataacgtactgatcaacacctttagcggcctattgaagatctcagatttcgggacaagcaaacggctggccggaattactccttgtaccgaaacctttactggtacactacaatatatggcaccagaaatcatcgaccaaggcccacgcggctacgggaaggctgctgatatttggtcgctgggttgcacggtgatagagatggctaccggtagacccccctttcacgagctgggcagcccgcaggctgccatgttccaggttggcatgtataaggttcacccgccaatgcctagctccctctctgccgaagcccaggcctttttgctgcgaacattcgagccagaccccagactgagagcctctgcgcaaactctcttgggcgatccattcttacaacccgggaaaaggtcacgtagcccctctagcccccgccatgcccccaggccgagtgacgccccatccgctagtcctaccccctctgccaacagcaccacccaatcccagacctttccatgcccccaggcgccctctcagcacccaccaagcccgccgaaacgatgcctatcttatggtggcaccagtcaactgcgcgtccctgaggaaccagccgctgaagagcccgcttcaccggaagaatctagcggcttaagcctgttgcatcaagagagcaagcggcgagcaatgcttgccgccgttctcgaacaggagctgccagccctcgccgagaatctccatcaggagcagaaacaagaacagggagccagactcgggcgcaaccatgtggaggaattactacgttgcctgggtgcacatatccacactcccaacaggaggcagctggcacaggaactccgcgcactacaagggaggcttagagctcagggcttgggtccagcccttctgcaccgcccgctcttcgcgttccctgacgctgttaaacagattctcagaaaacgacagattaggcctcactggatgttcgtgctggacagcctgctgagcagggcggttcgcgctgccctgggcgtgcttggaccagaggtggagaaggaagctgtgagtccccgatctgaggagctgagtaacgaaggggattcccagcagtctcccgggcagcaaagtcccctgccagtagaacctgaacaaggcccggccccattgatggtgcagctgagcttgcttagggcggagacggaccgattaagggagatacttgccggcaaggaacgggagtaccaggcgctcgtgcaacgagcccttcagagattaaatgaggaggcccgtacctacgtgctcgcacctgagccaccaacggccctatcaaccgaccagggcttggtccagtggttacaggagttgaatgtagactccggaactatccagatgctcctcaaccatagctttactttacacaccctactaacatatgctacacgtgacgaccttatttacacacgaatcagaggtggaatggtgtgtcgcatttggagggcgatcctggcccagcgtgccgggagtactccagtgacctccggaccttag

SEQ ID NO: 195578 - DNA, 2397 bp, synthetic construct
  misc_feature 1..2397: note = Description of Artificial Sequence: Synthetic coding sequence
  source 1..2397: mol_type = other DNA
tgaatgaacctgctgctgagctaccgggacgtgcaggactacagcgccattatagagcttgtggagacactgcaggcactccctacctgcgatgttgccgagcagcataacgtctgcttccattacactttcgcactcaacaggaggaatcgtcctggcgaccgagctaaggcactgtccgtgctgctacctctggtgcagttggaaggttctgtggcacccgatttgtactgtatgtgcggaaggatttataaagacatgtttttttcgtccggcttccaggacgctggacacagggaacaagcataccactggtatagaaaggcattcgatgtggagccttctcttcatagcgggatcaacgctgctgtgcttctgatcgcagcagggcagcactttgaagatagcaaagagctgcggttaataggaatgaagttgggatgcctcctggcgcgaaagggatgcgtggaaaagatgcaatattactgggacgttgggttctatctgggagctcagattctcgctaacgaccctacccaagtggtgctcgctgcagagcaactatataagctgaatgcgcctatatggtacttggtgagtgtgatggagaccttcctgctctatcaacactttaggccgactcccgaacctccaggcggcccaccacgacgcgctcatttttggcttcatttcctgctgcaaagctgtcagccttttaagactgcgtgcgcccagggcgaccagtgtctcgtgctcgtgctggaaatgaataaggtgctcctccctgcaaagttagaggtgcgaggtacagatccagtatcaacagtgaccctgagtctccttgagcctgagacacaagacataccctcaagttggactttccctgttgcatccatatgcggagtcagcgccagcaaacgcgacgaacggtgttgtttcctgtacgctctaccccccgcgcaggatgtgcagctctgttttccgtcagtcgggcattgccagtggttctgcggtctgatccaagcttgggttactaatccggattcgacagccccagctgaagaggccgaaggcgctggcgagatgctcgagtttgactacgaatacacagagaccggcgaacgcctagtgcttggcaaaggcacctatggggtggtgtacgctggtcgagacaggcatacacgagtgcggatcgctatcaaagagattcccgagcgggactctaggttctctcagcctctgcacgaggagatcgccctgcatcgaagactgaggcataagaatattgtgcgctatctgggcagcgcctctcaaggaggttacctcaagatcttcatggaagaggtgcctggaggatccctcagcagcctgttgcgtagcgtatggggccccctcaaggacaatgaatcaactatttccttttacacccgtcagattctccaggggttaggctatctgcatgacaatcacattgttcaccgagacattaagggagacaatgtcttgataaacacattctccggcctactaaagatcagtgatttcgggacttccaaaaggctcgccggcattactccctgtactgaaacattcacagggacacttcaatatatggctccagagatcattgatcaggggcctcgagggtacggaaaagccgctgacatctggtctcttgggtgcacagtaattgagatggcaactggtcggcccccatttcatgagctcggctccccacaggcagccatgtttcaggttgggatgtacaaagttcaccctccaatgcctagcagtctgagcgcagaagctcaggcctttttactcagaactttcgagcccgacccgagactgcgcgcctccgctcagactttgctgggggacccatttctgcagccaggcaagcggagcaggagtccctcatctcctcgccacgctccacgccctagcgacgctccttctgccagtcccaccccctctgcgaactctacaacgcagtcacagacttttccctgtcctcaggcaccttcccagcaccctcctagcccacctaagcgatgcctttcctatggaggcacatcacagctcagagtacctgaggagccagccgccgaggaaccagcctctcccgaagaatcttcggggctgtcgctgctgcaccaggagagcaagcgtcgcgctatgttggctgcagtgctcgaacaagagctgccagccctggcggagaacctgcatcaagaacagaagcaagaacagggggcacgcctaggcaggaaccacgttgaagagctgctacgatgcttaggagcacacatccatactcccaaccgccgccagctggcacaggaactgcgagcactgcagggatggatgaacggtgaggacaagggaagcttctag

SEQ ID NO: 195579 - DNA, 249 bp, synthetic construct
  misc_feature 1..249: note = Description of Artificial Sequence: Synthetic coding sequence
  source 1..249: mol_type = other DNA
tgagagtaccaggccctggtgcagcgggccctgcagcggctgaacgaggaagcccgaacatatgtactcgcccccgagccgcctaccgccctttccacggatcaaggcttggtccagtggctgcaggagttaaatgtggactctggtaccatccagatgggaagagacggaatgcctcacctggaaggtcacctgggcactgcttccaggatccacacttcccacttatggactctgcgggccgaatag

SEQ ID NO: 195580 - DNA, 3867 bp, synthetic construct
  misc_feature 1..3867: note = Description of Artificial Sequence: Synthetic coding sequence
  source 1..3867: mol_type = other DNA
atggccggcccctgcccccggagcggcgccgagcgggccggcagctgctggcaggaccctctcgcagtggctttgagccgcggccgccagttggccgcgccgccaggccggggatgcgcccggtcccggcccctttctgtcgtgtatgtcttaacacgagagcctcagcccggactggagcctagagaaggcacggaggccgagcctctgccgctgaggtgcctgagggaagcttgtgcacaggtgcccagaccgcgccctcccccccagctgcgttctctcccattcggcaccctggagctcggggacacagcagctctcgatgccttttataacgccgacgtagtggtcctcgaagtttcgtcctctctggtccagcctagccttttctaccaccttggcgttagagaaagttttagcatgaccaacaacgtccttctttgctctcaagctgacctccccgacttgcaggccctgcgtgaagacgtttttcagaaaaattctgactgtgttggctcatatacactgataccatatgtcgtgacagcaaccggacgggtgttgtgcggcgacgcgggcttgctgagaggtttggccgacgggctggtccaagcaggcgtgggcaccgaagccctgctcacccccctggtaggtcgcctcgccagattattggaagccacacctacggacagctgcggctattttcgggaaacgatcagacgagatatcaggcaggctagggagcgcttttcaggccctcagctgagacaggagctagctcgtctgcagagacgactggactctgtagagcttttgagccccgatataataatgaacttgctactctcctacagggacgtgcaagactattccgccatcatcgagttagtggagacactacaggctttgccaacttgcgacgtggctgagcagcataacgtgtgctttcattatacctttgctctgaatagacgaaatagacctggcgatcgtgccaaggccttgagcgtgcttctcccactggtgcagctggagggctcggtggcccccgacctttattgtatgtgcggtcgtatctacaaggacatgttcttctcttcagggttccaagacgccgggcatcgggagcaggcctaccactggtatcgcaaagcctttgacgtcgaacctagtcttcactcaggtattaatgccgccgtgctgctgatcgccgcagggcagcattttgaggattccaaggagttaagattgatcggcatgaagctcggctgtctgttggctaggaagggctgtgtcgaaaaaatgcagtattactgggatgtgggattttatctgggcgcccaaatactagccaatgatccaacacaagtggtgctcgccgctgaacagctctacaaactgaacgcccctatctggtacctggtttccgtgatggagacattcctcctgtaccagcatttcaggccaactcccgagccccctgggggaccgcccagaagggcccacttctggttacacttcctgttgcagtcttgtcaaccattcaagaccgcatgcgctcagggtgatcagtgcttagtgctggtgctggagatgaataaggttctgttaccagcgaaacttgaagtgagggggactgatccagtttccactgtgacactgtctctcctcgaaccagaaacacaagatattccgagttcctggacatttcctgtggcaagtatctgcggggtgtctgcctccaagcgcgacgaacggtgttgtttcctctatgcattaccgcctgctcaggacgtccaattatgttttccctctgtgggtcattgccagtggttttgcgggttaattcaggcgtgggtcactaacccagactctacagctcccgctgaagaggctgaaggcgccggggagatgttggagttcgactatgagtataccgaaactggggagcgactggtgctgggcaagggaacgtatggagttgtctatgcaggtagagacagacacacacgcgtgcgcatcgccatcaaagagattcctgaacgtgactcacgatttagccaacctctacatgaggagatagcgctccacaggcggttgcggcacaaaaatattgttagatacctggggtccgctagccagggggggtatcttaaaattttcatggaagaggtccctggagggagcctcagcagcctgctacggtctgtttggggtcccctgaaggacaatgagtccactattagcttctacactagacagatactacaggggcttggctaccttcacgacaatcatatcgtgcaccgcgacattaaaggggacaatgtcctgatcaataccttctcgggcctgttgaagatcagcgattttggtacatccaaaagactggcgggcatcaccccctgtactgagacttttaccggtactctccagtatatggcccccgagatcattgaccaaggacccaggggttatggcaaggccgcagacatatggagcttgggctgcacagtcattgagatggcaacgggccgtcccccctttcacgaactagggtcccctcaggcagccatgtttcaggtcgggatgtacaaggtccaccccccaatgccctcaagcctgtcagccgaagcgcaggcatttttgttgcgtacctttgagcccgacccaaggctcagggcttccgcacagactctcctaggagacccctttctgcaaccaggaaaacggtcacggtccccatcgtcccctaggcacgcgcctaggccgtcagacgctccatccgccagtccgacacccagtgcgaacagtacgacacaaagtcaaacatttccctgtcctcaggctccatcgcagcatcccccctcaccccctaagaggtgtctgagctacggcggcacaagccagctaagagtgcctgaagagcctgccgctgaggaacccgcgtccccggaggagagttctggcctgagccttttacaccaagagtctaaacggagggctatgctggccgccgtgttagagcaggagctcccagcgctggcagagaacctgcatcaggagcaaaagcaggaacagggagctcggctcggcagaaaccacgtggaagaattactgagatgcctcggagcccacattcataccccgaacagacgacagctggcccaagagctgagagcactgcagggacgcctccgcgcgcaggggcttggccctgcactcctgcataggcccctgtttgcattccctgatgccgttaaacaaatcttgaggaagagacagattagaccacattggatgttcgtcttggactcgttgctttcacgggccgtgagagcagcgctgggggtgctgggccctgaggtggagaaggaagcagtcagccccagaagcgaggagctgagcaacgaaggagattcgcagcagagcccagggcagcagagccctctgccggttgagccagaacaggggcccgctcccctcatggtgcaattatcacttctcagagcagagacagataggcttcgggaaatcctggccggtaaggagagggagtaccaggcactcgtacagcgagcactgcaacggctcaatgaggaagctcggacatatgttctcgcccccgagcccccgactgccctatctactgatcagggcctggtgcagtggctgcaggaacttaacgttgacagcggtactattcaaatgttgcttaatcactcctttacccttcacaccctgctaacatacgccaccagagacgatctcatttacactagaataaggggcggtatggtgtgtagaatctggagagccattttggcacagcgagccggctccacccccgtgacatccggtccgtag

SEQ ID NO: 195581 - DNA, 2394 bp, synthetic construct
  misc_feature 1..2394: note = Description of Artificial Sequence: Synthetic coding sequence
  source 1..2394: mol_type = other DNA
atgaacctgctgctgagctaccgggacgtgcaggactacagcgccataattgagctcgtggaaacgctccaggcattgccaacttgcgacgtcgccgaacagcacaacgtttgtttccattatacattcgcgctgaacaggcggaaccgaccaggtgatcgggcgaaagcattaagtgttttactgcccctggtgcaactcgaggggtctgtagcacctgacttgtactgtatgtgtgggcgtatctacaaggacatgttctttagctctggattccaagacgcaggacatcgagagcaggcttatcactggtacagaaaagcttttgacgtagagcccagcctgcactccggaatcaatgcagccgtccttctgatcgctgctggacagcacttcgaagacagcaaggaactgagactcatcggcatgaagctcggctgtttgctggcaagaaaaggatgtgtcgagaagatgcaatattattgggatgtcggcttctacttgggtgcacagatcctcgccaacgatcccactcaggtggtgctggccgccgagcaattgtacaagctaaacgctccgatctggtacctcgtcagtgttatggagactttcctactgtaccagcatttcaggcccacacctgagccacccggggggccgccccgtcgcgcacacttctggctccattttctgctgcaatcttgtcagccattcaaaactgcttgtgctcaaggtgatcagtgtctcgtactggtactcgaaatgaacaaggtcctccttcctgcaaaattagaggtccggggtaccgaccccgtgagtaccgtgacactctccctgctggagccagagacacaagatatccctagctcatggaccttcccagtggccagcatatgcggcgtgtcagcatctaaaagagacgagcggtgttgcttcctgtatgctctcccacccgcccaagacgttcaattatgctttccttcagtaggacattgccagtggttttgtggactgatccaggcctgggtgacaaaccccgactcaaccgcgcctgctgaggaggcagagggtgccggcgaaatgctagagtttgactacgagtataccgaaacgggagagcggctagtcctcggcaaggggacatacggcgtggtgtacgctggaagagacagacacacccgcgtacggattgccatcaaggaaatccccgagagggacagtcggttctcacagccacttcacgaggaaatcgctctgcacaggaggttgagacacaagaatatagtgcggtacctcgggtcagctagccaaggaggctatttgaagattttcatggaagaagtgcctggtggaagcttatccagtcttctcagatcagtgtggggaccactgaaagacaatgaatcaacgatatcgttttacactcgacaaatactgcagggcctggggtacttgcatgacaaccacatcgttcaccgcgacatcaagggcgacaacgtgcttatcaacacattttccgggctccttaagatctctgactttggcacctctaaacggctcgccggcatcaccccctgcacagaaacttttactggaacactgcaatatatggcacccgaaatcatagaccagggccctcgaggatacgggaaagccgccgacatctggtcactgggatgtaccgtgatcgaaatggccacaggacgccctcccttccatgagctgggctcccctcaagcagccatgtttcaggtgggaatgtacaaagtacacccgccaatgccctcgtctctcagcgcggaagcccaagcctttttgcttagaacgtttgaaccggatccacggttgagggcttcagcccaaacactgcttggggatcctttcttgcagccaggaaagcgctcgcggtccccgtcttcgccacgacacgccccccgacccagcgatgccccttccgcttctccaacacccagcgcaaattctacaactcagagccagacgttcccatgcccacaggccccctcacagcaccctccttcacctcccaagaggtgcctgtcatatggaggcacatcacagctacgagttcctgaggagcccgccgccgaagagcccgcctcacctgaggaatcctctgggctgagcttactgcaccaagagagcaaacggagggctatgttagctgcggtgcttgagcaggaacttccagcattggctgaaaacctccaccaggaacagaaacaggagcagggagctcgcctgggccgcaatcacgtcgaggaacttttgcgatgtctcggcgcgcatattcacactccaaaccgccgacaattggctcaggagcttcgagcactccagggttggatgaacggagaagacaaggggtccttttag

SEQ ID NO: 195582 - DNA, 783 bp, synthetic construct
  misc_feature 1..783: note = Description of Artificial Sequence: Synthetic coding sequence
  source 1..783: mol_type = other DNA
atggacatcgccagcaccaacaccagcaacaagagcgacaccaacatggagcaggtgcctgccaccaacgatactatcaaaagactggaatctaagctgttaaagaaccaggcaaagcaacagagtgaatccgggcgcctgagtttgggcgctagcaggggttcttccgttgagtctctcccccccacatccgaggggaaacgaatgtctgccgatatgtcagaaatcgaggccagaattgctgcaaccacagggaatggccagccacgccggagatcaattcaagatttaaccgtcaccggtaccgagcccgggcaggtctcgagtcgtagctcctcgcctagtgttaggatgatcaccacctccggacccaccagcgagaaaccaacccgctcacacccttggacccccgacgactccaccgacaccaatggctcagacaactcgatccctatggcctacctgacactggaccatcaattacagcccctggctccttgccctaactccaaggaatctatggccgttttcgagcagcactgcaaaatggcgcaggagtatatgaaggtacagactgaaatcgctctgctcctacagagaaagcaggaactggtagctgagttggaccaggatgagaaagaccagcagaatacctcccgccttgtgcaagaacataagaagctactcgacgaaaacaagtccctgagtacatattatcaacagtgcaagaagcagctggaggtcatacgctctcagcaacagaagcgccaaggaaccagttag

SEQ ID NO: 195583 - DNA, 1557 bp, synthetic construct
  misc_feature 1..1557: note = Description of Artificial Sequence: Synthetic coding sequence
  source 1..1557: mol_type = other DNA
atgagcaccgccagcgccgccagcagcagcagcagcagcagcgccggggaaatgattgaagctccgagccaggtgttgaattttgaagagattgactataaggaaattgaagttgaagaagtggtgggaagaggcgcgtttggagtcgtctgcaaggccaaatggagggcaaaagacgtcgctatcaaacagatagaatccgaaagcgagagaaaggctttcatcgtggaactgcggcaactgtcccgggtaaatcaccccaacattgtaaagctgtacggggcttgcttgaaccctgtatgcctggttatggagtacgcagaaggaggcagcctgtacaatgtgctgcacggggcagaacctttaccctactataccgcagcccacgcgatgtcatggtgcctgcagtgttcccaaggtgttgcttacctgcactccatgcagccaaaggcccttatacacagagaccttaaacctcccaacttactcctggtggcgggcggcactgtgctgaagatttgcgactttggcaccgcatgtgacattcagacccacatgacaaataacaaggggtcagccgcgtggatggcacccgaggttttcgagggatctaattactccgaaaagtgtgatgtgttttcatgggggatcatactctgggaggtcattacccgaagaaaaccattcgacgagatcgggggcccagcattccgtatcatgtgggcagtgcataacggcaccagaccccccctgataaaaaatctgccaaaaccgattgaatctctgatgactcgttgttggagcaaggacccaagccaacgcccttccatggaggagatcgtgaaaattatgacgcacttgatgcgctacttccccggtgccgacgaaccactgcagtacccatgtcaatattcagacgaggggcagagcaactcagctacttccactggtagcttcatggatatcgcttctactaacacgtccaacaagagtgatactaacatggagcaggtgcccgctactaacgacacaatcaaacgcctggaaagtaaactgttgaagaaccaggccaaacagcagagcgaatctgggcggctcagtttaggagccagtcggggatcgtctgtggagagtctccccccgacttctgagggcaagaggatgagtgcagacatgagtgaaattgaagcacgtatcgccgcaactacagcatatagcaagccaaaacggggacaccggaagaccgcctccttcggcaacattctcgatgtccctgagattgtgattagtggtaacggacaacccagaagaagatccattcaggatttaaccgtgactggtacggagcctggccaggtgtcctctcggagctcatccccgtcagtgcggatgatcaccacatcaggacctactagcgaaaagccaactcgttctcatccttggacgccagacgacagcaccgatactaatggctctgacaacagcatcccaatggcttatctgactcttgatcatcagctccaggcacgcactagttgccggactggccctgggtag

SEQ ID NO: 195584 - DNA, 1476 bp, synthetic construct
  misc_feature 1..1476: note = Description of Artificial Sequence: Synthetic coding sequence
  source 1..1476: mol_type = other DNA
atgagcaccgccagcgccgccagcagcagcagcagcagcagcgccggggagatgattgaggctccctcccaggttctgaactttgaagaaatcgactataaggagatcgaggttgaggaagtcgttggaaggggcgcgtttggagtggtgtgcaaggccaaatggagggcaaaggatgttgctattaagcagatcgagagcgagtccgagaggaaggcattcatcgtcgagctgaggcagcttagcagggtgaaccacccaaacatcgtgaagctttacggagcatgtctcaatcccgtatgcctggtcatggaatatgccgagggcggatccctgtacaatgtgctccacggagctgaaccgttgccatactacactgctgcgcacgctatgagttggtgtctgcagtgttcgcagggagtggcctacctgcactccatgcagccaaaggctttgattcacagagacctgaagccgcccaacttgctgctagtggccgggggaactgtgctgaaaatatgcgactttggcacggcctgtgatatccagacccacatgacaaacaataagggttcagcagcgtggatggctccggaagtgtttgagggatcaaactactctgaaaaatgcgatgtgtttagctggggcattatcctatgggaagttattaccaggcgtaaaccctttgatgaaattggcggaccggcttttcgaattatgtgggctgtccacaatggaacccgcccgccgctgatcaaaaaccttcccaaacctatcgaatctctcatgaccaggtgctggtctaaggacccatctcagagaccaagtatggaggagatcgtgaaaatcatgacacatctgatgaggtactttcccggcgctgacgaaccgcttcagtacccatgccagtactcagatgaagggcaatccaacagcgccacctcaacaggatcctttatggatatagccagcaccaatacttctaataaatcagacactaacatggagcaggttccagccacaaatgataccattaaacggttggagtccaagttgctgaagaaccaagcgaagcagcagtctgaaagcggcaggttgtcactaggggccagtagaggatcatctgtagaaagcctgcctccaactagcgaaggcaagagaatgtcagcagatatgagcgagatagaggcccgcatagctgctaccactggcaatggacagcccaggagaaggtccatccaggatctaactgttacaggaacggagccaggtcaggtctccagccggagctcatcccccagtgtaagaatgatcacaaccagcggaccaaccagtgagaagcccactagatcacatccttggaccccagacgattctacagatacaaatgggtcagacaattctattcctatggcatacctcaccttagatcaccaactgcaagcccggacaagctgcagaaccggtcctggctag

SEQ ID NO: 195585 - DNA, 1821 bp, synthetic construct
  misc_feature 1..1821: note = Description of Artificial Sequence: Synthetic coding sequence
  source 1..1821: mol_type = other DNA
atgagcaccgccagcgccgccagcagcagcagcagcagcagcgccggtgagatgattgaggccccaagccaggtcctcaacttcgaagagatcgattataaagagatcgaggtggaagaagtggtgggcagaggcgcctttggtgtagtatgcaaggccaaatggcgcgccaaggacgtcgccatcaaacaaattgagtctgagtcagaacgtaaagctttcatagttgagttgagacaattatcaagagtgaatcatccgaacatagtcaagctttatggtgcctgtttgaaccccgtctgcctcgtgatggaatatgccgaagggggatcgctgtacaatgtcctacacggcgctgaacctctcccatattacactgcagcacatgccatgtcatggtgccttcagtgttctcagggggtggcctacttgcacagcatgcagccgaaggccttgatccaccgcgaccttaagcctcctaatcttctcctagtcgcagggggcacagtgctaaagatatgcgactttggaaccgcttgtgatatacaaacacatatgacgaataacaaaggatcagccgcatggatggcccctgaggtcttcgagggctctaactatagcgagaagtgcgacgtgttcagctggggaataatcctgtgggaggttatcactcgacgtaaaccctttgacgaaattggcggcccggcgtttaggatcatgtgggcagtgcataacggaaccagacccccgttgatcaaaaatttaccgaagcctatagaaagtttaatgacaagatgctggtccaaggacccaagccagagaccctcaatggaggaaatagtcaagatcatgactcatttgatgaggtactttcccggagccgacgagccccttcaatacccgtgccagtactccgatgaaggtcaatctaactccgccacatccactggctcctttatggatattgctagtacgaacacctctaataagagtgacaccaatatggaacaagtgcctgccacaaatgacactatcaaacgtctagaatctaagctgttgaagaaccaggcgaaacagcagtcggaaagcggtcgcctcagccttggtgcctccagagggtcatctgttgagagcctcccccctacctccgaggggaagcgaatgtccgccgacatgtcagagattgaggctagaattgcagctaccactgcatactctaaacccaagcgcgggcatcgcaaaacagccagtttcggcaacattctcgatgttcctgagattgtgatttctggcaatggacagccacgtaggcggagcattcaggatctgaccgtcacaggaacggaaccaggccaggtgagcagccgcagtagctcacccagcgtcagaatgattacaacatctgggcccacctcagaaaaacctacacgcagccatccatggaccccagatgattcgacagacactaatggctctgacaacagtatccccatggcttatctgacgctcgatcaccaacttcagcctcttgccccctgtccaaattctaaagagtccatggccgtgttcgagcagcactgcaagatggcacaggagtatatgaaagtacagaccgaaatcgccctgctccttcagaggaagcaggagttggtcgctgagctggaccaggatgagaaggatcagcagaatacctccaggctggtgcaggaacacaaaaaattgttggatgagaacaaatccctctccacttattatcagcagtgcaagaaacaactagaagtgatccggagccaacagcaaaagcgccaaggtacgagctag

SEQ ID NO: 195586 - DNA, 1740 bp, synthetic construct
  misc_feature 1..1740: note = Description of Artificial Sequence: Synthetic coding sequence
  source 1..1740: mol_type = other DNA
atgagcaccgccagcgccgccagcagcagcagcagcagcagcgccggagagatgattgaggctcccagtcaggtgctgaacttcgaggaaatcgattataaagagattgaagtggaggaggttgtgggtagaggtgcctttggcgttgtgtgcaaggcgaaatggcgcgctaaggatgtggcaattaaacagatcgaatctgaaagcgagagaaaagccttcatcgtggaacttagacagttgagcagagtgaaccacccaaatattgtgaaattgtatggggcctgcctcaatcctgtgtgcctcgtgatggagtatgccgagggaggctcgctctacaatgtgctgcatggggccgaaccactgccctactataccgcagcccatgcgatgagctggtgcctgcagtgtagtcaaggcgttgcctacctgcactcgatgcaacctaaagctcttatccaccgcgatctgaagcctccaaacctcttactagtagcaggcggcactgtgttaaagatatgtgacttcggcaccgcctgcgacatccagactcatatgacaaacaataaggggtcagctgcatggatggcgccagaggttttcgaaggatctaattacagtgagaagtgtgacgtttttagctggggaattatcttgtgggaagtcatcaccaggaggaaacctttcgacgaaatcggggggccagcttttaggattatgtgggctgtgcataatgggacgcgtcccccactgataaaaaaccttccaaaaccaatcgaatcactcatgacaagatgttggtcaaaggatcccagtcaaagaccatctatggaagaaatcgtgaagataatgacgcatttgatgcgatacttccccggagctgatgagccccttcaatatccttgccaatactccgacgagggccagtccaactccgcaacatccaccggttcgttcatggatatcgctagcaccaatacctccaataaaagtgacaccaatatggagcaggttcctgcaacgaacgatacgattaagaggctggagagcaagctccttaagaatcaggcaaagcaacagtcggagtctggtcgcctgtctttgggggccagccgagggagctccgtggaaagcctcccacccacctctgagggaaagaggatgtctgccgacatgagcgaaattgaggcgagaatcgccgcaaccaccggtaacggccagcctcggcgacgcagcatacaggatctgaccgtaacgggcaccgagcccggccaggtgtcctctaggtcctcctcacctagcgtacgtatgataaccacctcaggccctacctccgaaaagccaactagatcccacccttggacaccggatgatagcacggatactaatgggtccgataacagtatccccatggcctatcttacccttgaccatcagctacagcctcttgccccctgtcccaacagcaaagaaagtatggctgttttcgagcagcactgcaaaatggcacaggaatatatgaaggtgcagactgaaatcgcgctgttgctgcagaggaagcaggaactggtggcagaactcgaccaggacgaaaaagaccagcagaatacctcaaggctagttcaggaacacaagaagctactcgatgagaataagtctctatcaacttattatcagcagtgtaaaaagcaactggaagtcatccgaagtcaacagcagaaacgacagggtacttcctag

SEQ ID NO: 195587 - DNA, 1257 bp, synthetic construct
  misc_feature 1..1257: note = Description of Artificial Sequence: Synthetic coding sequence
  source 1..1257: mol_type = other DNA
atgagcaccgccagcgccgccagcagcagcagcagcagcagcgccggcgaaatgattgaagccccaagccaggtactgaacttcgaggagattgattacaaggaaatcgaagtcgaggaggtggtcggacggggtgccttcggcgtggtgtgcaaagccaagtggagggcaaaagatgtggccattaagcagatcgaatctgagtccgaacggaaggccttcatcgtcgaactgagacagctgtctagggtcaatcatcccaacctgctgctcgtcgccggcgggacagtgttaaagatttgcgatttcggcactgcatgtgacatacaaacccatatgaccaataacaagggttcagcggcgtggatggctcccgaggtattcgagggttctaactattctgagaagtgtgatgtattcagttggggtatcattctctgggaagtgatcactcgtcggaaacctttcgatgagatcggtggcccagcctttagaatcatgtgggctgtgcacaacggaactcgccccccccttattaaaaacttgccaaagcccatagagtccctgatgacaaggtgctggagtaaagatcctagccagcgaccaagcatggaagaaatcgttaagatcatgactcacctgatgcgatactttccaggcgctgatgaacctctgcagtacccatgccaatattccgatgaaggccagagcaattcagcaacaagcacaggcagcttcatggatattgcttcaaccaatacttccaataagagtgatacgaatatggagcaggtgccggctactaatgacactatcaagcgcctcgagagcaaattgctgaagaatcaagccaaacagcagagcgaatcaggtcgattgtctcttggggcctctcggggaagtagcgttgaaagtctgccgcccacatctgaagggaagagaatgagcgcagacatgagcgaaatcgaggctagaattgctgccacaactggtaacgggcagccacggcgcaggtcaattcaggatcttacagttacaggcaccgagccaggacaggtttcaagtagatcttcatctccctcagtgaggatgataaccacatctggacctacctctgaaaaaccaaccagatcccacccatggacccccgacgacagtacggacaccaacggctccgacaactccattcctatggcctacttaaccctggaccaccagctgcaggccaggactagctgccgaacaggacctgggtag

SEQ ID NO: 195588 - DNA, 1404 bp, synthetic construct
  misc_feature 1..1404: note = Description of Artificial Sequence: Synthetic coding sequence
  source 1..1404: mol_type = other DNA
atggagtacatgagcaccggcagcgacaacaaggaggagatcgacctactcataaagcacttaaacgtgtctgatgtgatcgacataatggagaacctttacgctagcgaggagcctgccgtttacgaacccagcttgatgactatgtgccaggactcaaaccagaatgacgaaagaagcaagagccttctcctgtctggtcaagaggtgccatggctgagctccgttagatacggcacagtcgaggacttactcgccttcgcaaaccacatctcaaacactgcaaagcacttctacggccaacggccccaggaatctgggatcctgttgaatatggttatcaccccacagaacggcagataccagatagactccgatgtgctgctaatcccttggaagcttacatatagaaatatcggtagtgatttcatcccaagaggcgcatttggcaaagtgtacctcgctcaggatattaaaacgaagaaaaggatggcctgcaagttaatcccagtggaccaatttaaacccagtgatgtagaaatacaggcctgcttccgccatgaaaatatcgctgagctatatggcgcagtcctgtggggagaaacggtgcacttgtttatggaggccggagaaggggggagtgtactggagaagctagaaagctgcggccccatgagggagttcgagattatctgggtcactaagcatgtattgaaaggactcgactttcttcactcaaaaaaggtgatacaccacgatattaagccctctaatattgtgttcatgagcactaaggccgtcctggtggactttggtttgtcggtacagatgaccgaagacgtctattttcccaaggatttgcgcggcacagaaatctacatgtcgccagaggttatactgtgcagagggcactcaaccaaggctgacatctacagcctgggcgctactctcattcatatgcaaactggcacgcctccttgggtaaagcggtatcctcgctccgcatatccatcctatctttacatcatccataagcaagcccctcccctggaggatattgctgatgactgctcgcccgggatgcgagagctgattgaggcatctctcgaacgcaatcccaaccaccgccctcgggcagccgacctcttaaaacatgaggcacttaacccccctagggaggaccagcctcggtgtcagagtttggattccgcactgcttgagaggaagaggctcctgagccgcaaagaactcgaattgccagagaatatcgcagattcaagctgcaccggatccacagaggagtccgagatgctgaaaaggcagcgatccctgtatatagatctcggagcactggccggatattttaatcttgtgagaggtccacctacccttgagtacggatag

SEQ ID NO: 195589 - DNA, 1404 bp, synthetic construct
  misc_feature 1..1404: note = Description of Artificial Sequence: Synthetic coding sequence
  source 1..1404: mol_type = other DNA
atggagtacatgagcaccggcagcgacaacaaggaggagatcgaccttctcattaagcatctcaatgtgtctgatgtcatagatatcatggagaatctctacgcctccgaagagccagccgtctatgagccaagcctgatgacaatgtgtcaagattctaaccaaaacgatgagcggagcaagtcgctgctgttgtcggggcaagaggtcccgtggttatccagtgtgaggtacggtacagtagaagatttgctcgcatttgcaaatcatattagcaacacagccaaacatttctatggccagcgccctcaggaatcgggaatccttctcaacatggtaattacaccccaaaatggtcgctatcagattgacagcgacgttctgcttatcccttggaagctgacctaccgaaatatcggatctgactttatacctcgaggggccttcggaaaagtatatctcgcacaggacatcaagactaagaagcggatggcttgtaaactcattccagtggatcagtttaagccatctgatgtggagattcaagcatgctttcgacacgaaaacatcgccgagttgtacggagctgttctgtggggtgaaaccgtgcacctattcatggaggcaggggaggggggctctgtgctggagaaactggagtcgtgtggcccaatgagagaattcgaaatcatttgggtgacgaagcatgtcctgaaggggctggattttctgcactctaaaaaggtcattcaccatgatatcaagccgagcaatatcgtctttatgagcaccaaagcagttttagtagactttggattgtcggtgcagatgacagaagacgtctactttcccaaggatctgcgaggcacggaaatttacatgtcccccgaggttatcctatgcaggggccacagtaccaaagcggatatctacagcctgggtgctactttgattcatatgcaaactggcacaccgccctgggttaagagatatccccgatccgcctaccctagctacctttacattatacacaaacaggccccacccctggaagacatcgccgacgattgtagccccgggatgcgcgagcttatcgaggcatcacttgagagaaacccaaaccatagacctcgcgcagccgacttgcttaagcacgaagccctgaacccaccccgagaggaccagccccggtgccagtcgctggactcggccttgctggaacggaagcgcttacttagtcgaaaagaactggaactgccagaaaatattgctgactcatcatgcacagggtcgacagaagaaagcgagatgctgaaaagacaacggtcactgtacatcgatttaggtgcgctagctggctacttcaaccttgttcgtggcccaccaacccttgagtatggttag

SEQ ID NO: 195590 - DNA, 399 bp, synthetic construct
  misc_feature 1..399: note = Description of Artificial Sequence: Synthetic coding sequence
  source 1..399: mol_type = other DNA
atggagtacatgagcaccggcagcgacaacaaggaggagatcgaccttctgataaagcatttgaacgtgagcgacgtcatcgatataatggaaaatctgtacgcatccgaagaaccggcagtgtacgagccttcactgatgacaatgtgtcaggacagcaatcagaacgacgagaggagtaaatctctgctgctgtcaggacaggaggttccttggctgtcctcagtccggtacggtacagtggaagatctgctggctttcgcgaaccacatttcaaatacagctaagcacttctacggacaacggccacaggagtctggcatcctgctcaacatggtccgcttcttcccaatcagttgggtgttgtgtgcccagctgtcatattgttcgttcatatag

SEQ ID NO: 195591 - DNA, 1404 bp, synthetic construct
  misc_feature 1..1404: note = Description of Artificial Sequence: Synthetic coding sequence
  source 1..1404: mol_type = other DNA
atggagtacatgagcaccggcagcgacaacaaggaggagatcgacctgctgatcaaacatctcaacgtgtcagacgtcatagacattatggagaatctgtatgccagcgaggagcctgccgtgtacgagccaagcttaatgaccatgtgtcaggatagcaatcagaacgatgagcggtccaaatcccttctgctctcaggccaggaggttccatggctgtcatctgtgagatacggcacagtcgaggacctcctggcctttgccaaccatatcagcaacacggcgaagcatttttacgggcagaggccccaggagtcaggcatcctcctgaacatggtaatcactccccagaacggcaggtaccaaatcgattctgacgtgttactcatcccatggaagcttacttaccgaaatataggcagcgatttcatacctcgcggcgccttcggtaaagtgtatcttgcacaagatatcaagacgaaaaagagaatggcctgtaaactgattccagtagatcaattcaagccgagtgacgtggagatccaggcatgctttaggcatgaaaacatcgcagagctctacggcgcagttttatggggtgagactgtgcacctctttatggaggctggagagggcggaagcgtgctggaaaagctggaatcgtgcggccccatgcgggagttcgaaatcatctgggtgacaaagcacgttctcaagggtcttgatttccttcatagcaaaaaggtgatccaccacgacattaagcccagcaatatcgtttttatgtctacaaaagccgttttggtcgacttcggtctgtcagtccagatgactgaggacgtttattttcctaaagacctgagaggcactgagatatacatgagcccagaagtaatcctgtgcagagggcattccaccaaggcagacatatattccctgggcgccactttaattcatatgcagacagggaccccgccatgggtcaagcggtatccgcggtcggcctatccgagctatctttacattatccataagcaggcgcccccattagaggatatcgccgatgactgcagccctggcatgcgcgaactgatcgaagcctccctcgaacgcaaccccaatcaccgtccccgtgctgctgacttgcttaagcacgaagccctgaaccccccacgggaagatcaacctcggtgccaaagcctggacagcgcccttttagaacggaaaaggctactttctcggaaggagcttgagctcccggagaatatcgccgactctagctgcactgggtcaactgaagagtccgaaatgctgaaacggcaaaggtccttatacatcgacctcggcgcactggcgggatatttcaacctggtgcgaggaccccccaccctggaatatggctag

SEQ ID NO: 195592 - DNA, 672 bp, synthetic construct
  misc_feature 1..672: note = Description of Artificial Sequence: Synthetic coding sequence
  source 1..672: mol_type = other DNA
atggagtacatgagcaccggcagcgacaacaaggaggagatcgacttgctaatcaagcacctgaacgtgagcgatgttatcgatattatggagaatctgtatgcttctgaagaacccgctgtatacgaaccaagtttaatgacaatgtgtcaggactctaaccagaacgatgagaggagcaagtcgctgctgctgtcaggtcaggaagttccatggctcagtagtgtccgctatggaactgttgaggacttactggcatttgccaatcatattagcaatactgccaagcacttttacggtcaacggccccaggagtctggcatcttgctgaacatggtcattactccacagaatgggcgataccaaatcgattcggatgtactcctgattccttggaaacttacttaccggaacatcggtagcgatttcatccccaggggtgctttcggcaaggtttatctggctcaggacatcaagacgaaaaagagaatggcatgcaaactgattcctgtcgatcagttcaagccttcagatgtggagatacaggcctgttttaggcatgaaaacatcgctgagctgtacggagcagtgctgtggggcgagaccgttcacctgttcatggaggctggcgagggcggtagtgtcctggagaagttggagtcttgcgggtag

SEQ ID NO: 195593 - DNA, 768 bp, synthetic construct
  misc_feature 1..768: note = Description of Artificial Sequence: Synthetic coding sequence
  source 1..768: mol_type = other DNA
atggagtacatgagcaccggcagcgacaacaaggaggagatcgaccttcttataaaacatcttaacgtctccgacgtgatagatataatggaaaatttgtatgcctctgaggaacccgctgtgtacgaaccttctctaatgactatgtgtcaggacagtaaccagaacgacgaaagatctaaaagtcttctactgagcgggcaggaggtcccctggctatctagcgtccggtatggaactgtggaggatctgttggccttcgccaatcacatttccaacacagcgaaacatttctacggccaacgtcctcaggagtccggaatcctgctaaacatggtgattacgcctcagaacggacgctatcagatcgactccgacgtactgttaatcccatggaaattaacttaccgtaatataggcagcgactttattccaaggggcgcttttggaaaagtctatctcgcacaggatatcaagacaaagaagcgcatggcctgtaaattgatccccgtcgaccagtttaaaccttccgatgtggaaatccaagcttgtttccgtcacgaaaacattgcagagctatatggggcagtgctgtggggagagactgtgcacctattcatggaggccggcgagggaggatctgtcttggagaagctcgagtcatgtgggcctatgcgcgagtttgaaatcatatgggttactaagcacgtcctcaaaggtttggactttctgcacagtaagaaagtgattcatcacgatatcaagtag

SEQ ID NO: 195594 - DNA, 573 bp, synthetic construct
  misc_feature 1..573: note = Description of Artificial Sequence: Synthetic coding sequence
  source 1..573: mol_type = other DNA
tgagtggaggacctgctggccttcgccaaccacatcagcaacaccgcaaaacacttctatggacagagaccccaggagtccggcatcctgctaaacatggtcatcacacctcagaacggaaggtatcagattgattcagatgtgctgctgattccctggaagttaacgtatcgtaacatcgggtctgattttatccctagaggcgcttttgggaaggtgtacctggcccaagacatcaagaccaaaaagcggatggcatgcaaactcattccggtagaccagttcaagccatctgatgtcgagattcaggcctgttttcgccatgaaaacattgccgagctgtatggcgccgtgctgtggggcgaaaccgtccatctgtttatggaggcgggagagggcggaagtgtgctcgaaaaactggagtcctgcggtccaatgagagaattcgaaatcatctgggtcaccaagcacgtgctcaaggggctggatttcttacactctaaaaaagtgattcaccacgatataaagcgaaaatacctgtggacctacacatttcttgctcagcgcgactag

SEQ ID NO: 195595 - DNA, 1404 bp, synthetic construct
  misc_feature 1..1404: note = Description of Artificial Sequence: Synthetic coding sequence
  source 1..1404: mol_type = other DNA
atggagtacatgagcaccggcagcgacaacaaggaggagatcgaccttttaatcaaacacctcaacgtctcagatgttatcgacatcatggagaacctttatgctagtgaggaacctgcggtgtacgaaccctctctgatgaccatgtgtcaggactccaatcagaacgatgaaaggtctaaatcattactcttatctgggcaggaagtgccctggttgtcaagcgttagatacggtacagtggaagatctcctggcctttgcaaaccatatcagtaacacagcgaagcacttttacgggcagcggcctcaagaaagcggtatactccttaatatggtcattacaccacaaaacggaaggtatcagatcgatagcgacgtgctcctgataccctggaagctgacttatcgcaatatcggctcagatttcataccgcgcggagcattcgggaaagtttacctagcccaagacatcaaaacaaagaagcgcatggcctgtaagctcatccctgtggatcaattcaagccctccgatgtggaaattcaggcatgctttagacatgagaatatcgccgagctatacggggccgtcctgtggggtgaaacagttcacttatttatggaagcaggtgagggcggttctgttctcgagaagttggagtcatgcggtcctatgcgcgagtttgagatcatctgggtgactaagcacgtcctgaaaggcctagactttctgcattccaagaaagtgatccaccacgacattaagcccagcaacatcgtgttcatgagtactaaggccgtcctcgtggactttggcctgagcgtgcagatgaccgaggacgtttacttccccaaagacctccgcggtaccgagatctacatgtcccccgaggtgattctttgccgaggacatagtaccaaggcagacatctactccttgggggctactcttatccacatgcagacaggtacacctccatgggttaaacggtatcccagaagcgcttaccccagttatctgtatattatccacaagcaggctccacccctggaggacattgctgacgattgctcaccgggaatgagagagctgatagaagcctctcttgagagaaatcctaaccaccggccacgagcagctgatctgttgaagcacgaagccctgaacccgccccgcgaggaccagcccagatgccagtctttggattccgctcttctggagcggaaaagacttctcagtcggaaggaactcgagctgcccgagaacatcgccgattcgtcttgcaccggatccaccgaagagagcgaaatgttgaaaagacagaggagcctgtacattgacttaggagccttggcaggctactttaaccttgtacgggggcctcctaccctcgaatacgggtag

SEQ ID NO: 195596 - DNA, 3357 bp, synthetic construct
  misc_feature 1..3357: note = Description of Artificial Sequence: Synthetic coding sequence
  source 1..3357: mol_type = other DNA
atggagcccagccgggccctgctgggctgcctggccagcgccgccgccgctgctccccctggtgaagatggggccggtgcaggggcagaggaagaggaagaagaagaagaggaggccgcggctgctgtggggccgggcgagctgggctgtgatgcgcccctgccatattggacggccgttttcgaatacgaagccgccggcgaggatgagcttaccctgcgactaggggacgtggtcgaagtcctttccaaagacagccaagtgtccggggacgaaggatggtggaccggccaattgaaccaacgcgtcggtattttcccatccaattacgtgactccacgcagcgctttcagtagtagatgtcaacccgggggggaagatcctagctgttatcctccaatccaattgcttgagatcgacttcgccgaactaaccctggaagagatcattggtatcggtggcttcggcaaggtgtacagagcgttttggattggtgatgaggttgccgtgaaagctgcccggcacgacccggatgaggatatctcccagacaatcgagaacgtgagacaggaagccaaattgttcgcaatgctcaagcaccctaacatcatcgccctgagaggcgtttgcttgaaggaaccaaacctttgtctggtgatggagtttgccagaggcgggcctctgaatagggtgctaagtggtaaacgcatcccgcccgacatcctggtgaactgggccgttcagatcgcccgtggaatgaactatctgcatgacgaggccatcgtacccattattcacagggacctgaagtcctcaaacatcctgatcctccaaaaggtcgagaatggcgatctgtccaataagattttgaagatcactgacttcggactggcccgggagtggcaccgcactaccaagatgtcggctgcgggcacttacgcgtggatggctccagaggtgatcagagcctctatgtttagtaaaggatctgatgtgtggagctacggcgtgcttctgtgggagcttctgacaggtgaggtaccttttaggggaattgatggtctggccgtggcatatggagttgctatgaataagctggctctgcccattccttcaacatgtccagagcctttcgccaagctaatggaggattgctggaatccagatccacacagccgcccttcatttactaacattctcgatcagctgacaacgattgaagagagtggcttcttcgagatgccaaaagatagtttccactgccttcaagataactggaaacacgaaatccaggagatgtttgatcagctgcgggcgaaagagaaagagctcagaacttgggaagaggagttgacacgcgcagccctgcagcagaagaatcaggaggaacttctcagacggcgggagcaggaacttgccgagagggagattgatattctggagagggagctcaacatcataattcatcagctgtgccaggaaaaaccgcgtgtaaaaaaacgtaaggggaaattccgcaaatctagactgaaactcaaggatgggaacaggatctcactgccatctgactttcagcacaagtttaccgtgcaggcatctcccacaatggataaaagaaaatccctgatcaactcacgttcctcgcctcccgcatctccgactattatcccccgactgagggcaattcagctgacccctggggagtctagtaaaacctggggccggagctcagtggtgccaaaggaagaaggcgaggaggaggaaaagcgggctccgaagaaaaaggggaggacatggggcccagggacgcttggtcagaaggagctggctagtggcgacgaaggttctccccagcgacgcgagaaggccaacgggttatcaacaccttccgaatctccccatttccacctgggattgaagagcctggtcgatggatataaacagtggtcctcttcagcaccaaacctcgtaaaaggacctaggtcgagtcccgccttaccagggttcacttctcttatggagatggctcttctggctgcctcttgggtcgtgcctatagatatcgaagaagatgaagattctgaaggaccaggctctggcgaatctcgtctgcagcactctccctcccagagttacctttgcatcccattcccgcggggtgaagatggtgacggaccaagctcagatggcatccacgaagagccaacacccgttaattcagccacttccactccccaactgacccccacaaatagtctaaagagggggggggcacaccatagaaggtgcgaggtggcactgctcggttgcggcgccgtcctagctgccacaggcctcggatttgacctcctggaggcaggcaaatgccagctcctgccgctggaagaacctgagccccccgcaagggaggagaaaaagagaagggaaggtctcttccagcgttcgtcccgtccccgccggagtaccagtcctccaagcagaaagctgttcaaaaaagaggaaccaatgttgttactgggtgacccctccgcttccctgactttgctgagtctctcaagtatttccgagtgcaacagtactagaagtctcttgcgctctgattcggatgagatcgtcgtgtatgagatgcctgtaagtcccgtagaagccccccccctgtccccctgcacccataatcccctggtcaacgttagagttgagcggtttaagcgtgaccctaatcagtcattgacgcctactcatgtcaccttaacgacaccatctcagcccagctctcaccgcagaacaccttcagatggagctctgaaacccgaaacactgctagccagtcggagtccgtcctcaaacggtttgtcaccatctccaggggctggaatgctgaaaacaccttcaccatcacgggatccaggtgaatttccacgactgcctgatcccaacgtggtgttcccccctacacccaggcggtggaacacccaacaggacagcacattggagaggccaaagaccttagagtttctgccacggccccgcccctcagcaaaccggcagcggctagatccatggtggttcgtgagtccctcacatgcacggagtacatcccccgcgaacagcagctccactgaaacaccatccaatttggactcgtgtttcgcatcctctagctcaactgttgaagagagacccggcctcccagcgttgctccccttccaagcaggtccactccctcctaccgagaggacgttgcttgaccttgatgctgaaggccaatctcaagactcgacagttcccctatgccgtgccgagttaaacacgcaccggccagccccttatgaaattcagcaagagttctggtcttag

SEQ ID NO: 195597 - DNA, 2463 bp, synthetic construct
  misc_feature 1..2463: note = Description of Artificial Sequence: Synthetic coding sequence
  source 1..2463: mol_type = other DNA
ctggtgctgatcctgcagaaggtggagaacggcgacctgagcaacaagatcctaaagatcacagacttcggcttagcacgtgaatggcatagaacgactaagatgtccgccgctggaacttacgcttggatggcacctgaggtgatcagagctagcatgttttcaaaaggttcagatgtttggagttacggcgtgttgttgtgggagttactcaccggagaagttccttttcgagggatagacggcctggccgtcgcatacggcgttgctatgaacaagctggccctgcccatcccttctacctgccccgagccttttgcaaaattaatggaggactgttggaatccagacccgcacagccgccctagcttcacaaacatactcgaccagctcactactatcgaggagtcagggttctttgaaatgccaaaagacagtttccactgtctccaagataattggaaacacgaaattcaggagatgttcgatcaattgcgagctaaggaaaaggagctgcggacatgggaggaggagctaactcgcgccgctctccaacaaaaaaaccaggaagaattactgagaaggcgtgagcaggaactggctgagcgcgagatcgatatattggagagagaactcaatattatcattcaccagctctgtcaggagaagcctcgggtgaagaagcgtaaagggaagtttcgtaagagtagacttaagctgaaggatgggaatcgtatctccctgcctagtgattttcagcataagtttactgtgcaagcatcccctaccatggacaagcggaaatctttgataaacagtcggtcttctccacctgcaagccctacaatcatacctaggttgcgagccatccagttaactcctggcgagtccagcaaaacctggggcagatcttccgtggtacctaaagaggaaggagaggaggaggagaagagggctccgaaaaaaaagggccgaacatggggcccggggactctgggtcagaaggagctagccagtggtgacgaaggacttaagagtctggtcgacggatataaacagtggagtagtagcgccccgaacctcgtgaaagggccaaggtccagtccagccctgccaggctttacatccttaatggaaatggcttgtttctcttctacacttgtcattttcactgaagatgaggactccgaaggcccaggtagcggtgaatctagactccagcacagcccaagtcaatcctatttgtgtatccctttccctcgaggcgaagatggtgatgggcccagttcagacgggatccacgaggaacctaccccagtgaatagcgcaacctccacccctcagctgactcccacaaattccctaaaacggggcggagcacaccaccgtagatgtgaggtcgccctgctgggctgtggggctgttctcgccgccacaggtctcggcttcgacctactggaagctggaaaatgtcagctgcttccactggaggaaccggagccccctgctcgtgaagagaaaaagcgccgggaggggttgtttcagcgctcctcaagaccccgtcgcagtacttcaccgcccagtagaaagctgttcaagaaagaggaacccatgctgctgcttggggacccatctgccagtttaactctgctcagcttatcatccatttctgagtgcaattcaacgcgatcattgcttcgttccgattctgacgaaatcgtggtttatgaaatgccagtgtcaccggttgaagcccccccactgtccccctgtacccataaccctctcgtcaatgtacgggttgagcgattcaaacgggatcccaaccagtcattaactccgacgcatgtgacacttactacaccttcccagccctcttctcatcggcggacaccctccgacggggccctgaagcctgaaacactgctagcttctaggagccccagcagcaacggcctgagtccttctcctggcgcagggatgttaaaaactcccagccccagtagggacccgggtgaatttcccagactacccgatcctaatgttgtgtttcccccaaccccccggcgatggaacacccagcaggattctacccttgagcgcccaaagaccctagaatttctgccaagacctcggccttcggccaataggcagcgccttgatccttggtggttcgtttcaccatcacacgcgcggtccacatctcctgccaacagctccagcacggaaacgccatcaaatcttgattcctgcttcgcttccagcagctccactgttgaagagaggccaggactccccgctctgctgcctttccaggcaggaccacttcccccaacagagcgcacattgttagacctggacgccgaggggcaatctcaggactcgaccgtacctctgtgccgggcagaattaaacactcacagacctgccccttacgaaattcaacaggagttctggtcctag

SEQ ID NO: 195598 - DNA, 3315 bp, synthetic construct
  misc_feature 1..3315: note = Description of Artificial Sequence: Synthetic coding sequence
  source 1..3315: mol_type = other DNA
atggagcccagccgggccctgctgggctgcctggccagcgccgccgctgcggcacctcctggagaagacggggccggcgccggcgccgaagaagaagaggaagaagaagaagaagctgccgctgccgttggccctggcgagctgggctgcgatgcacccctaccttactggactgcagtgttcgagtatgaagcagcaggtgaggatgagttaaccctgcgcttgggagacgtcgtcgaggtcctcagcaaggacagtcaggtctccggcgatgagggatggtggactgggcagctgaaccagcgggtggggatcttcccatcgaattacgttacaccccgtagtgcctttagttcacgttgccaacccggaggagaggatccttcttgttatccgccaattcagcttctggaaatagactttgccgaactcaccttagaggaaatcattggaatcggtggttttggcaaagtttacagagctttttggataggcgatgaagtggccgtgaaggccgcccggcacgatccagacgaagacatctcgcagacaatcgagaacgtaagacaggaggcgaagctttttgcaatgcttaaacacccgaacatcattgccctgcgtggagtctgcctgaaagaacctaacctctgcctggttatggaattcgcacgtggcggacctctgaatagagtgctgagtggcaagcgcatcccaccagatattctagtcaattgggcagtgcagattgccagagggatgaattacctccacgatgaggccattgtgcccattatccaccgcgatctgaaatcttccaatattctgatcctgcagaaggtagaaaacggcgacctgtccaacaaaatattgaagataaccgattttgggctggcccgcgagtggcacaggacaacaaaaatgagcgcagcagggacgtacgcatggatggctcctgaagtcatccgggcatctatgtttagcaaggggagcgatgtctggagctatggtgttctcctgtgggaactactcacaggggaggtgccttttcgcggcatcgacggcctagccgtggcctatggggtcgccatgaacaagttggccttgcctatcccctccacctgtccggagccgttcgcaaaactgatggaagactgttggaatcccgacccccattcacggccgtccttcaccaatattctcgatcagctgacaactatcgaagagtccgggttctttgagatgccgaaggattcattccattgcctacaggataattggaaacacgagattcaggaaatgtttgaccagctgagggcaaaagagaaggagctgaggacgtgggaggaagaactgactagggcagcccttcagcagaagaaccaggaagagctgctcaggagacgtgagcaagaattagccgagcgtgagattgatatcctggaacgcgaactgaacatcattatacatcagttgtgtcaagagaagccaagggtaaaaaaacgaaaaggcaagttccgcaagtccagactgaaactcaaggatgggaacagaatcagcttgccatcggatttccaacataagtttactgtccaggcgagccctacaatggacaagaggaagagcctgatcaactcacgaagctcgcctccggcctcccccaccatcataccacggctgagggcgatccagctgactccaggcgagtcaagtaagacgtggggtagatctagcgtggtgcccaaggaggaaggcgaagaggaagaaaagagggcacctaaaaagaaggggcgcacttggggccccggaaccctcggccagaaggagctagcctcaggggatgaaggctccccccagcggagagagaaagccaatggtctctcaaccccctcagagtcgccacattttcatctgggactgaaatcccttgtggacggatacaagcagtggtccagctctgccccgaatcttgtgaaggggccaagaagctctcccgctttgcccggcttcaccagccttatggaaatggaggatgaggacagcgagggtcccgggtctggcgaatcccgcctgcagcactccccctcacagagctacctgtgtataccttttcctcggggagaagacggcgatggcccttcatcagacggcatccacgaagaacccacccctgttaactcggccaccagtaccccacaacttacccctactaactcattgaagaggggaggcgcacaccaccgaagatgcgaggtcgctctgcttggatgtggtgcggtgttggccgcaacaggactggggttcgatcttttagaggctgggaagtgccagcttctcccactggaggagcctgagccaccagcacgcgaggagaaaaagcgccgagagggcctgttccagcgtagctcacgacccaggagaagtacctctcccccttcccgaaagctctttaagaaagaggagcctatgctgctgctcggcgatcccagcgcaagcctcacgctgttgtctctgagctccatcagcgaatgcaacagtacacgctctctgttgagaagtgacagcgacgagattgtcgtgtacgagatgcccgtatccccagtagaggcccctcccctgagcccatgtacacataaccccctggttaatgttcgggtggaaaggttcaagcgagatccaaatcaatcactgacccctactcacgtcacactgacaacgcctagtcaacctagcagccaccgcaggacaccctcagatggggccctcaagccggaaacacttctggcatctcgcagcccttcgtccaatggcctatctcccagtccaggagcagggatgctcaaaacacctagcccctcaagggacccgggcgagttccctaggcttcccgaccccaacgtggtctttcctcctacccctagaagatggaacacccaacaagactcaaccttagagcgtccaaaaaccctcgagtttctccccagacccaggccttcagcaaatcggcagagattggacccatggtggttcgtgagcccaagccatgctaggtctaccagtcctgccaactcatcaagcacagagaccccatccaacctggactcatgttttgcctcttcctctagcactgttgaagagaggccgggcttgccagccctgctgccgtttcaagccggccctctccccccaaccgagaggaccctgcttgaccttgatgccgagggtcagagccaggactctaccgtacctctttgtcgggcagagttgaatacccatcgacccgccccctatgaaatccagcaggagttctggtcctag

SEQ ID NO: 195599 - DNA, 1005 bp, synthetic construct
  misc_feature 1..1005: note = Description of Artificial Sequence: Synthetic coding sequence
  source 1..1005: mol_type = other DNA
atggccctgcggtggggcatcgtgagcgtgggcctgatcagcagcgacttcacagccgtcctacaaactcttcctcgctcggagcaccaggtggtcgcggtggctgcacgggatctttcaagagcgaaagagtttgcccagaagcatgatatccccaaggcctatggatcctatgaggagctggccaaggatccttccgtggaggtggcttatatcggcacacaacacccgcagcataaagctgcagtgatgttatgccttgccgctgggaaagctgtgctgtgcgagaaaccaaccggagtcaatgcagcggaggtgcgtgagatggtagctgaggcccgcagtagggctctattcctgatggaggctatatggactcgatttttcccagcttctgaggcactgcgttctgtgctggcccagggtacacttggggacttgagggtcgcccgcgccgaatttggaaaaaatctcattcatgtgcctagggccgtggaccgggcccaagcaggcggggccttattagacatcggaatttactgcgtgcagttcactagcatggtttttggtggacagaaaccagagaagatctcagtggtcggccggcggcacgaaacaggcgtcgacgataccgtgactgtgctgctccagtatccaggtgaggtgcatgggtccttcacatgttccatcactgtacaactaagcaacactgcgtcagtgagcggcacaaagggcatggtccagctgctcaatccctgttggtgtcccacggagctggtcgttaagggagagcataaagaattccctctccctcctgtgcctaaagattgtaacttcgacaatggcgctgggatgtcctatgaagctaagcatgtgtgggaatgtctcaggaaaggtatgaaagaatcacccgtgatccctctttccgagagtgaactattggccgatatcctggaagaagtcaggaaagctatcggagtgactttccctcaggataagcggtag

SEQ ID NO: 195600 - DNA, 2466 bp, synthetic construct
  misc_feature 1..2466: note = Description of Artificial Sequence: Synthetic coding sequence
  source 1..2466: mol_type = other DNA
atggacgtggtggaccccgacatcttcaaccgggacccccgggaccactacgatttgctgcagcggcttgggggggggacttacggcgaggtgtttaaggcccgtgataaggtgtctggcgatctcgtcgcacttaaaatggtcaaaatggagccggacgacgacgttagcaccctccagaaagaaatcctgatcctgaaaacctgcaggcacgcaaacatcgtagcatatcacggcagttacctgtggctgcaaaagttgtggatctgtatggagttctgcggcgccgggtccttgcaagatatctaccaggtcaccggttctctgtccgagctgcagatttcctatgtatgcagagaagtgctgcagggcttggcttacttgcactcccagaagaagattcatcgcgatatcaagggggccaatatcctgattaacgacgcgggggaggttcgtttggcagacttcggtatctcagcgcaaattggcgccactctcgccaggagactatcattcattggaacaccctactggatggctcctgaagtggccgcagtcgccctgaagggggggtataatgaactgtgcgacatttggtctcttggcattacagcaatcgaactcgccgagttacagcctcctttgttcgatgtgcaccccctgcgcgtgctgtttttgatgaccaaatccggataccagccaccacggctgaaggaaaagggaaagtggtcagctgcctttcataactttattaaggtgacccttaccaagagcccgaaaaagcgacctagcgcgactaagatgctctcacatcaactcgtttctcagcctggcctgaaccgagggttgattctagatctgctggataagttgaaaaaccctggcaagggtccgtcaatcggcgatattgaagatgaagagccagagctgccgcctgccattcctcggcgaattaggtccacccaccggtccagcagtctcggtatacctgatgcagattgttgtaggaggcatatggagtttaggaagctgcgggggatggaaacccgcccgcccgccaacacggcacgactccaacctcccagggacctgcggagctcttctccccggaaacaactatctgaaagctccgatgatgactacgatgatgtggacatcccgactcctgccgaggacacaccgcccccactgcctcccaaacctaaattcaggtcacccagtgacgaaggtccaggatcaatgggagacgacggtcagctttctcctggtgtgctggtgagatgtgcgtcaggcccacccccgaatagccctcggcctgggcctccccccagtacatcctctccccatttgactgcacatagtgaaccttcactttggaatccaccatccagggaattggacaagccacctcttttgcctccgaaaaaagaaaagatgaaacgcaagggatgtgccttgctcgtgaaattgttcaacgggtgcccgttgcgaatccattctactgcagcttggactcaccccagtacaaaggatcagcacctgctgttgggggccgaagagggcatcttcatattgaaccgcaacgatcaagaggctaccctcgagatgctgtttccatcgaggaccacatgggtgtatagcattaacaatgtcttgatgtcactaagtggtaagacccctcacctgtattctcactcaatactcggactgctggaaaggaaggaaacccgggccggcaacccaatcgctcatattagcccccaccggcttcttgctcgcaagaacatggtgagcaccaaaatacaggatactaagggctgccgggcatgctgtgtggcggaaggagcatcatcaggagggcccttcctgtgcggggctctcgaaacctctgtggtgctgctgcagtggtatcaaccaatgaacaagtttctcctggttcggcaggtgttgtttccactaccgacgcccctttcagtgtttgccttgttgacagggcccgggtccgagcttccagccgtgtgcatcggcgtgagccctggccgtcccgggaagagcgtcttgttccacactgtgcggttcggggctctgagctgttggctcggagagatgagcacggagcatagggggcccgttcaggtcacacaggtcgaggaagatatggtcatggtcttaatggacggcagcgtgaagttagtgacacccgagggttctccagtccggggcctcagaacaccggagattccgatgacagaagccgtggaagccgtggctatggttggcggtcagctgcaggctttttggaagcatggggtgcaggtttgggcactgggctctgaccaactcctgcaagagctcagagatcccacactgacatttcggctgctgggatctcctcgccctgtcgtggtggagacccgaccggtagacgacccaacagccccttcaaacctttatatccaggagtag

SEQ ID NO: 195601 - DNA, 720 bp, synthetic construct
  misc_feature 1..720: note = Description of Artificial Sequence: Synthetic coding sequence
  source 1..720: mol_type = other DNA
atggagttccggaagctgcggggcatggagacccggccccccgccaatacggcacgcctgcaaccaccacgagacttgcgttcaagttccccccgtaagcaactttccgaaagctcagacgacgactatgatgacgttgacatacccacaccggcagaggatacacctccacccctgccaccaaagcccaagttccgttctccgtcagacgaaggaccagggtccatgggcgacgacggtcagctctccccaggggtactggtgcgatgtgcctccggcccaccccccaattcgccgcgcccagggcctcccccctcgacaagcagtccccatctgaccgctcactccgagcccagcctctggaacccaccatctagggagttggacaaaccccccctgttgcccccaaaaaaggaaaagatgaagcgaaagggctgcgctctgttggtcaaattgtttaacgggtgccccctacgcatccatagtaccgccgcgtggacccatccatccacaaaagatcaacacctgctgcttggcgccgaggaagggatctttattctcaaccgaaatgaccaggaagccaccctcgagatggagcgcccccccacgtgcatcctgatcgctagcctcgcctgttggaatggcaagcgccctgaacaggagacaccatctctgactttggctccaacagcatattggcagggcactagctcacaatag

SEQ ID NO: 195602 - DNA, 2502 bp, synthetic construct
  misc_feature 1..2502: note = Description of Artificial Sequence: Synthetic coding sequence
  source 1..2502: mol_type = other DNA
atggacgtggtggaccccgacatcttcaaccgggacccccgggaccattatgatctgttacagaggctgggcggtggaacctatggggaagtgtttaaggcacgcgataaggtttctggtgacttagttgcccttaagatggtcaagatggaaccagatgatgacgtatctactctccagaaagaaattttaatcctgaagacatgccgacacgctaacatagtggcttaccatggtagctacttgtggttacagaaattatggatttgtatggagttttgcggcgccggctcactccaggatatctaccaggttactgggtccttgtccgagttacagatatcctatgtctgtagggaagtgcttcaggggttagcgtatctacatagccagaaaaaaatccaccgggatataaagggcgccaacatacttataaatgacgcaggagaagtacgcctggcagactttggaatcagtgctcaaatcggtgccactctggcacgcagactatcgtttatcggcaccccctactggatggctcctgaggtggccgccgtggctctgaagggtggatataatgaactgtgtgatatatggtctctggggatcactgctattgagttggctgaactccaaccacctctgtttgacgtgcacccacttcgggtgctgtttttaatgactaaaagcgggtaccagccaccgagactcaaagagaaaggtaagtggagtgctgccttccacaatttcattaaagtgacattaacaaagtcaccaaagaagcgcccatctgccaccaagatgttaagccaccagttagtgtcacagccagggctaaatcgaggccttatcctagacctgcttgataaattaaaaaaccctgggaaaggaccctctatcggggacattgaagatgaggagccagagcttcctcctgcaataccccggagaattcgatccactcaccgatcttcttccttgggaatccccgatgctgattgctgccgacgccatatggagtttagaaagctccgggggatggaaacgagacctcccgccaatacagccagactgcagccccctagagacctgaggtccagctcccctcgaaagcagctctccgagtcctcagatgacgattacgacgacgtagacattccaactccggcagaagacaccccgccacctctgcctcctaagccaaagtttaggagtccaagcgacgaaggcccaggatcaatgggcgatgatgggcagctgtccccgggagtgctggtccgttgtgcaagcggacctccccctaactctcccagacctggcccacctccatctacctccagcccacatttaactgcacacagcgagccttctttgtggaacccaccctcacgggagctcgacaagcctcctctacttcctccgaaaaaagaaaagatgaagaggaaggggtgcgcacttttagtaaagctgtttaatgggtgccctcttaggatacacagcacagcagcttggactcatccgtccacgaaagaccagcacctgcttctgggagccgaggagggcatctttatattaaaccggaacgaccaggaagctaccttagaaatgctctttcccagtcgcaccacttgggtttactccatcaataatgtcctgatgtccttaagcggcaagactccccacctgtatagccactcaattctgggccttcttgaacggaaggagacccgggccggcaatcccatagcccacatatccccccatcggctgctagcacggaaaaacatggtgtcaactaagattcaggatacaaagggttgccgagcttgctgcgtcgccgagggcgcttcctccggcgggcccttcctgtgcggagccctagagacatcggtggtgctcttgcagtggtatcaaccaatgaacaagtttctattggtgagacaggttttgtttcccctcccaactcctctttcagtattcgccctcctcaccggacctggttcagagttgcccgctgtgtgcataggcgtcagtccaggccgaccggggaaatctgtgctttttcacactgtccgttttggcgccctgagttgctggttgggagaaatgagtactgagcacaggggaccagttcaagtgacacaggtggaggaagacatggtgatggttttgatggacgggtccgttaagctagtaacccccgaaggtagcccggtccgtggactgaggaccccagagattcctatgacagaagctgttgaagccgtggcaatggtgggaggacagctgcaggctttttggaagcacggggtgcaggtgtgggctctggggtcggaccagcttctgcaagaattaagggacccaacattgaccttcagactgctgggatctccgcgactcgagtgctccggtactatcagtccacactgtaatttacttttacctgggtcttctaatagccctgccagtgcctctagggtcgctggcatcacagggctgtag

SEQ ID NO: 195603 - DNA, 2463 bp, synthetic construct
  misc_feature 1..2463: note = Description of Artificial Sequence: Synthetic coding sequence
  source 1..2463: mol_type = other DNA
atggccctgctgcgggacgtgagcctgcaggacccccgggaccggtttgagctattgcagagagttggggccggcacatacggagacgtgtataaggcgcgggatacggtgacttccgagcttgcggccgtgaaaatcgtcaaactcgatccaggcgacgacatctcatcgctgcagcaggaaataaccatcctgcgagagtgtcgtcatcccaatgttgtcgcatacataggatcttacctgcgcaatgatcgtttgtggatttgtatggagttttgcggcgggggttcacttcaggagatatatcacgccacaggccctctcgaggagcggcagattgcttacgtctgtcgagaggccctaaaaggactccaccacctccactctcaggggaaaatccaccgggatattaagggagcaaacctcctgctgaccctccaaggcgatgtgaaattggctgacttcggggtatctggggaactcaccgctagcgtggctaaacgaaggagcttcattgggaccccgtattggatggcacctgaagtcgccgcagttgagcgcaagggaggctacaatgagctatgtgacgtgtgggccctcgggatcaccgcgatcgagctcggagaattacagccccccctgttccatctccatcccatgcgcgccctcatgctgatgtccaagtccagctttcagccaccaaagctaagggataaaacgagatggacacagaacttccaccactttctcaaattggctctcactaagaaccctaagaagaggccgacggcggaaaagctgctccagcacccattcaccacccagcagttgccacgcgccttactgacccagttgctggacaaagcttccgaccctcacctggggaccccaagtccagaagattgcgaattggaaacctacgacatgtttcccgacaccatccactccaggggacagcacggacccgctgaacggacaccttctgaaatccaatttcaccaagtgaagttcggagcgcctagacggaaagaaacagatcctctgaatgagccctgggaagaagagtggacgttgttaggcaaagaggaattatcaggcagccttctccaatcagtccaagaggccctggaggaaaggtctctgaccatcagatcagcatccgagtttcaagaattagactctccagacgatacaatgggaacgataaagcgtgcacctttccttggcccattgcccactgacccacccgcggaagaacccctgagctcaccacccggaaccctcccccctccaccgagcgggccgaattcctccccgttgctgccaactgcgtgggcgacaatgaaacagagggaagaccctgaacggtccagttgtcacggactgccaccaacaccaaaggtgcacatgggggcctgctttagcaaagtgttcaacgggtgtccactcaggattcatgccgcagtgacttggattcatcctgttacccgggaccagtttttagtagtgggggccgaggagggaatatatactctgaacttgcacgagctgcacgaggacactcttgaaaagctgattagccacagatgtagctggctgtactgtgtgaataatgtcctgctgtcactcagtggaaaatccacgcacatctgggctcatgacctgccgggcctatttgagcagagacggctgcagcagcaagttccgctgtccatacctacgaaccgcctgacccaaaggattattccgaggcgttttgctctttcgactaagatacctgacacaaaggggtgtctgcagtgtagggtcgttcgcaacccctataccggggcaacattcctgctagccgctctgcccacctccctcttgctgctgcaatggtatgagccgctccagaaattcctcttgctgaaaaacttcagtagtccactgccatcccctgcggggatgttggagccccttgttctcgacgggaaggagctcccgcaagtttgtgtcggcgctgaaggtcccgaagggcctggttgcagagtgcttttccacgtgcttccattagaagcgggactgactcctgacattctgatcccacccgaaggaattccaggcagcgcacagcaggtcatccaggttgatcgtgacaccattctggtctccttcgagcgctgtgtgcgtatcgtgaacatgcagggagaacccacagccactctggcccccgagctgaccttcgatttcccaattgagaccgtggtttgcctgcaagactcagtgcttgctttctggtcccatggaatgcaggggcgcagcctcgataccaatgaggtcacccaagaaataacagacgaaacccgaatatttagagtgctgggcgctcaccgcgacatcatattggagtctattccgaccgataacccagaagcacactcaaacctttatatcctgacagggcatcaatctacatactag

SEQ ID NO: 195604 - DNA, 2541 bp, synthetic construct
  misc_feature 1..2541: note = Description of Artificial Sequence: Synthetic coding sequence
  source 1..2541: mol_type = other DNA
atggaggcccccctgcggcccgccgccgacatcctgcggcggaacccacaacaagattacgagcttgttcagagagtcggctcaggtacatatggagacgtgtacaaggccaggaatgtgcacactggcgagcttgctgcagtcaaaatcattaagctcgagcccggcgacgacttctccctgatacagcaagagatatttatggttaaagagtgcaagcattgcaacatcgtggcctatttcggaagctacttgtcgagggagaaactgtggatttgcatggaatactgcggaggcggttcccttcaagacatctaccatgtgacaggaccactgagcgagcttcagatcgcctacgtgtgtcgggagaccctgcagggcctcgcctatctgcacacaaagggcaaaatgcaccgggatatcaagggagcaaatattctgctgactgaccacggggacgtgaagctagcagactttggggttgcagcaaagatcaccgccacgattgccaagcggaaaagtttcatcggaactccttactggatggctccagaagtcgcagctgttgaaaagaatggggggtataatcaattgtgtgacatatgggccgtaggtattactgccatcgaactcggggagctgcagcctccaatgttcgatttgcaccccatgagagccctatttcttatgagtaagtccaatttccagcctcctaaacttaaagataaaaccaagtggtcaagtaccttccacaatttcgtcaagatcgccttaaccaaaaacccaaagaagagaccaacggccgagcggctccttacacacacctttgttgcacagcctggcctgtctcgagcactcgccgtggagctactcgacaaggtgaacaatccggataaccacgcccactacacggaagccgacgatgacgatttcgagcctcatgctatcataaggcatacaattagatccaccaaccgaaacgcgcgagctgagcgtacagcttctgagatcaattttgataagctgcagtttgagccaccgttaaggaaggaaaccgaggctcgcgacgagatgggactcagcagcgacccgaacttcatgctccagtggaatccatttgttgatggtgctaatacaggaaagagcactagcaagcgtgccatcccaccgccactgccccctaagccaaggatttccagttaccccgaggataacttccccgacgaagagaaggcttccacaatcaagcattgcccagatagcgagagccgggcccctcaaattctgaggcgccagagctctccgtcctgcggacctgtggctgagacttcctcaattgggaacggtgacgggatcagtaagctgatgtcagaaaacaccgaaggctcagcgcaagcgccccaactcccaagaaagaaagacaaaagggactttccaaagcctgctattaatggcttacctcctacgcccaaagtactgatgggggcatgctttagtaaagtgttcgatggttgtcctctgaaaatcaattgcgccacaagctggatccaccctgatacgaaggatcaatacataatttttgggacagaggatggcatttatactctgaacttaaacgagttacatgaggctacaatggaacaattattcccacggaagtgtacctggctctacgtgatcaacaacacactgatgtccctgagcgtggggaagaccttccagctgtactcccacaatttaattgcgctgtttgaacacgctaagaagcccgggttggcagcacatatccagacacacagattccccgaccgcatcttgcctagaaagtttgcccttacgacaaaaatccccgataccaagggatgtcacaaatgttgcatcgtgcgcaacccttacacgggacacaagtatctgtgcggagccctgcagagtgggatcgttttgctccagtggtacgagccgatgcagaaatttatgctgatcaaacatttcgattttccgctcccctccccgctgaacgtttttgaaatgttagtaattcccgagcaggagtatcccatggtgtgtgtggccatatcaaagggcacagaaagtaaccaggtcgtgcagttcgagaccattaacctgaactcagcctcctcatggttcacggaaatcggagcaggcagccagcagctcgactccattcacgttacacagctagaacgcgacacggtgcttgtttgccttgataagttcgtgaagatcgtcaacctgcagggtaaactgaaatcttcaaagaagcttgctagcgaactgtccttcgattttagaatcgagagcgtcgtgtgcttgcaagattccgtgctagccttttggaaacatggaatgcaggggaagagctttaaatccgatgaggttactcaggagataagtgatgaaacacgagtgtttcgcctgcttggatccgatagggtagtggtgctggagagtcggcctacagagaacccgacggctcacagcaatctgtatatcctagccgggcatgaaaacagctactag

SEQ ID NO: 195605 - DNA, 699 bp, synthetic construct
  misc_feature 1..699: note = Description of Artificial Sequence: Synthetic coding sequence
  source 1..699: mol_type = other DNA
atggccaccgccgagagccgggccctgcagttcgccgagggcgccgcttttcccgcctaccgtgccccgcatgccggaggcgccctgctcccccccccaagccccgctgccgcactcttgcccgctccgccggcaggtccggggcccgcaaccttcgctggtttccttgggagggaccctggccctgcaccgcctccaccggcctccctgggctcccccgctccgcccaaaggggccgcggccccttcagcgagtcagaggagaaagcgtacatcttttagcgcggagcagctgcagttgctcgagttggttttcagaagaaccaggtatcctgacatacatctcagggagagactggcagccctcaccctacttcccgagagtcggatccaggtatggtttcagaacagaagggccaagtctagacggcaatcaggcaaaagtttccaacctctggcacgccctgaaataattttgaaccattgtgcccctggtacagaaaccaagtgcctcaagcctcagctcccgctggaagtcgatgtcaactgcttgcctgaaccaaacggcgttggcggaggaatttccgactcatcctctcaagggcagaacttcgagacatgttcccccctgagcgaggatattggctcaaagctcgactcttgggaggaacatattttctcagcttttggaaacttttag

SEQ ID NO: 195606 - DNA, 723 bp, synthetic construct
  misc_feature 1..723: note = Description of Artificial Sequence: Synthetic coding sequence
  source 1..723: mol_type = other DNA
atggccaccgccgagagccgggccctgcagttcgccgagggcgccgcctttcctgcctatcgcgcccctcatgcaggcggcgccttgctgccccccccctcgccagccgctgcgctgctccccgcaccaccggctggccctggcccggcaacgtttgcgggatttttgggacgggaccccgggccagcgcctcccccacccgcctccttgggaagtccagcccccccaaagggcgctgccgcgccatcagcctctcagagacgaaagagaacttcattttcagcagaacagctccaactgcttgaacttgtattccgccggacacggtatccagatattcacttaagagagcgccttgccgccctgactctccttcctgagagcaggatacagttactcttttcaccactgttccaggtgtggttccagaatcgccgagctaaaagcaggcgtcagtccggcaagagctttcaaccactggcacgccccgaaatcatacttaaccactgcgccccagggacggaaacaaagtgcctcaagccgcaactccccctcgaagtggatgtcaactgccttcccgagccgaatggcgtaggaggcggtatatcagattcctcatcccagggccagaatttcgagacttgctcccccctctctgaagatatcggcagcaagctggatagctgggaggagcacattttttccgcctttggcaacttctag

SEQ ID NO: 195607 - DNA, 882 bp, synthetic construct
  misc_feature 1..882: note = Description of Artificial Sequence: Synthetic coding sequence
  source 1..882: mol_type = other DNA
atggccaccttcagcggccccgccggccccatcctgagcctgaacccccaggaggacgtcgaatttcaaaaggaggtggcccaggttcggaagcggataactcagaggaagaagcaagagcagctgacgcctggcgttgtttacgtacgccaccttcctaatctgttggacgagacacagatcttttcctactttagccagttcggaacggtgacacgtttccggctatcccgtagtaagcgcaccggaaattctaaaggctatgcatttgtggaattcgagagcgaggatgtggccaagatcgtggccgagaccatgaacaactatctgtttggagaaagattgcttgaatgtcacttcatgcccccggagaaggtgcacaaggagctgtttaaggattggaacattcctttcaagcagccctcttaccctagcgtaaaaagatacaataggaataggacgctgacgcagaagctgcgcatggaagagcgattcaaaaaaaaggagcgtctcctgcgtaagaaactcgctaaaaaggggatcgactacgattttccttcgttgattctccagaagacggagagcatctccaagaccaaccggcaaacgtcgacaaaagggcaggttctccgaaaaaagaagaagaaggtcagcgggactctggacaccccagagaagacggttgattcccagggccccacaccagtgtgcacacctacctttctcgaacggcgaaagagccaggtggctgaactgaacgacgatgacaaggacgatgagattgttttcaagcagccaatatcgtgcgtcaaagaagagatccaggagactcaaacacccacacatagccgaaagaagagacggagatctagcaatcagtag

SEQ ID NO: 195608 - DNA, 1257 bp, synthetic construct
  misc_feature 1..1257: note = Description of Artificial Sequence: Synthetic coding sequence
  source 1..1257: mol_type = other DNA
atggccccccggggccggcggcggccccggccccaccggagcgagggtgccaggcggagtaagaacactttggagcggactcactctatgaaagacaaggcaggacagaaatgtaaacccattgatgtgttcgattttcctgacaattccgacgttagtagcattggacggttgggagaaaacgaaaaggatgaggagacatatgagacgtttgaccctccactccattccacagctatatacgctgatgaggaggaattcagtaagcattgcggattatctctgagctcaacaccgccgggcaaggaggccaagcgaagctcggatacctccggcaacgaagctagtgaaatcgaatcagtgaaaataagtgctaaaaaacctggacgcaagctgagacctatctccgatgattctgaatccattgaagagtccgacacaagacgtaaagtgaagtccgctgagaaaatcagtacacagcgccacgaggtaattcggactacggccagctcagagctcagcgaaaaaccagctgagagtgtgacctctaaaaagaccggaccattaagtgctcagccgtctgtggagaaagaaaacttagcaattgaatctcagtctaagacccaaaaaaagggcaagatctctcatgacaagcgcaagaagtcaagaagtaaagcaattgggtctgatacctccgacatcgtgcatatctggtgccctgagggcatgaagacatctgacatcaaggagttaaacatagtcctaccagagttcgagaaaacgcatctcgagcaccagcagaggattgaaagcaaggtgtgtaaagctgctatcgctactttctatgtcaacgtgaaggaacagttcattaagatgttaaaggagtcacagatgctcactaacttaaaacgtaagaacgctaagatgatcagtgacatcgagaaaaaacggcagcggatgatcgaagtgcaggacgaactgctgcgcctggaaccgcagctgaagcaattacagactaagtacgatgagctcaaggaacgcaaaagtagtctgaggaacgctgcctattttttgagcaacctgaagcagctgtaccaggactactcagatgtgcaggcccaagaaccaaacgtgaaggagacctacgatagctcatcattacctgcactcctgttcaaagccagaactctgctgggtgcggaatcacacttaagaaatataaaccatcagctagaaaagctgctggaccaaggctag

SEQ ID NO: 195609 - DNA, 963 bp, synthetic construct
  misc_feature 1..963: note = Description of Artificial Sequence: Synthetic coding sequence
  source 1..963: mol_type = other DNA
atggccccccggggccggcggcggccccggccccaccggagcgagggcgctagacggagtaagaataccctggaaaggactcattccatgaaggacaaggccggtcagaagtgcaagccaatcgatgtatttgactttcccgacaacagcgatgtgagctctatcggccgcctaggcgagaatgaaaaagatgaagaaacatacgagacatttgacccgccgctgcattccacagcgatatatgccgacgaggaggaattttcaaagcattgcgggctaagcttgtcctccactccccccggcaaggaggccaagagaagctccgatacctcaggaaacgaggctagtgagatcgaaagcgtcaagatcagcgcgaaaaagcccgggaggaagctcaggccgatctccgatgattcggagagcattgaagagtctgacacgcgaagaaaggtaaaatctgcagagaaaatttccactcagagacatgaggtgatccgtaccaccgcatcctctgagctgagcgaaaagcccgctgaaagtgtgacgtccaaaaagaccgggccactctcagcccagccctctgtagagaaagagaatctggcaattgagagtcaaagtaaaacccagaagaagggcaagatctcccacgacaaaagaaagaaaagccggagtaaagcgataggctccgatacttctgacatagttcacatttggtgcccagaagggatgaaaacatctgatattaaagagcttaacattgtgttacctgaatttgagaagactcatttagaacaccaacagaggatcgaatccaaagtctgcaaggctgcgattgccacattctatgttaacgttaaagagcaatttatcaaaatgttaaaggagagtcagatgctgactaatctgaagagaaaaaacgctaaggtgcgtgctacagcagaaacaacaacaaataaaatatag

SEQ ID NO: 195610 - DNA, 963 bp, synthetic construct
  misc_feature 1..963: note = Description of Artificial Sequence: Synthetic coding sequence
  source 1..963: mol_type = other DNA
atggccccccggggccggcggcggccccggccccaccggagcgagtctgcgagacggtccaaaaacactttggaaaggacacactccatgaaggataaagcaggccagaagtgcaagcctattgacgtcttcgacttcccagacaatagcgatgtatcatccattggcaggctgggagaaaacgaaaaggatgaggagacctacgaaacctttgatcccccattgcacagcaccgccatctacgctgacgaggaagagttctcgaagcattgtggtttatctctatctagcacgcctcctggtaaagaggccaagaggagctccgatacaagtggcaatgaggctagcgaaatcgaatcagtgaagatcagtgccaaaaaaccagggaggaagctacgccctatttccgatgatagcgagagcatcgaagaaagcgatactcgacggaaggtgaaaagcgcggaaaagatctccactcagagacatgaagtgatcagaacaaccgcctcatctgaactcagcgaaaaaccagcggaaagcgtgacgtctaaaaagactggtccattgtctgcccagccctcagtggagaaagaaaacttggcaatcgagagtcaatcgaagacacagaagaaaggcaagatcagccacgataaacgaaagaaatcccgatcgaaggctatcggcagcgatacttccgatatcgtgcacatttggtgccctgaggggatgaagactagcgacattaaggagttaaacattgtgctgccggagtttgagaaaactcacctcgagcaccaacaacggattgagtctaaagtgtgcaaggctgccatcgctaccttctatgtcaacgtcaaagagcagtttataaagatgctcaaggagtctcagatgctgactaacctgaagaggaagaacgccaaagtgagggctactgctgagactacaaccaacaagatttag

SEQ ID NO: 195611 - DNA, 1014 bp, synthetic construct
  misc_feature 1..1014: note = Description of Artificial Sequence: Synthetic coding sequence
  source 1..1014: mol_type = other DNA
atggccccccggggccggcggcggccccggccccaccggagcgagggagcccgcagatctaaaaacacactggagcgcacccactctatgaaagataaagccgggcaaaagtgcaagcctatcgatgtgtttgacttcccagataattctgacgtctcatccataggcaggttgggcgaaaatgaaaaggacgaggagacctacgagactttcgatccccccttgcattctactgctatctatgcagacgaggaagagttctccaagcattgcggactgagcctctcatcaacacccccaggaaaggaagctaaacgatccagcgacacatctgggaatgaagcttccgaaatagaaagtgtgaaaatctcagcgaaaaagcctgggcgtaagctgcgacccatcagcgatgattcagagagcattgaggaaagtgacactaggagaaaggtgaaaagtgcggagaagatttccacacagaggcatgaagtgataaggaccacagcctcctccgagcttagcgagaaacctgccgagtcagtcaccagcaaaaagacagggccactgtccgcacagccatctgtggagaaggagaacctggcaatcgaatctcagtcgaagacgcagaaaaaggggaaaattagtcatgacaagagaaagaaatctaggtccaaggccataggctccgacacatcagacatcgtgcacatatggtgccctgaggggatgaagacttccgatatcaaagagctgaatattgttcttccagaattcgagaaaacgcatctggaacatcagcagcggatcgaatctaaggtgtgcaaggctgctatcgctaccttctatgtgaatgttaaagagcagttcattaagatgctcaaggagagccagatgcttactaatttgaagcggaaaaacgctaagatgatctctgacatcgaaaaaaagaggcagcgaatgatcgaggtccaagatgaactgttgcgcttgtggacaggggccggactgtggtag

SEQ ID NO: 195612 - DNA, 2760 bp, synthetic construct
  misc_feature 1..2760: note = Description of Artificial Sequence: Synthetic coding sequence
  source 1..2760: mol_type = other DNA
atggccgccgacgtgttcatgtgcagcccccggcggccccggagccgaggacggcaggtacttttgaagccgcaggtgtcggaggatgacgacgatagcgacaccgatgaaccaagcccaccgcctgcatctggagctgcaaccccagcccgcgcgcacgcaagcgcagccccacctcctcctcgggcaggacctggcagagaagagccacctcgtcgccaacagatcatccacagtggtcactttatggtatcctccccccatcgcgaacaccccccaaagaaaggctacgacttcgataccgtgaataaacaaacatgccagacttactctttcggaaaaacatcttcttgccacctaagtattgatgcctccctaacaaagctgtttgagtgtatgaccctcgcctatagtggcaagctagtaagtcccaagtggaagaacttcaaaggactaaagctccaatggcgggataagattcgacttaacaacgcaatttggcgagcctggtatatgcagtaccttgaaaaacgtaagaacccggtatgccactttgtgacacccttggacggatcagtggatgtggatgaacatcgaagacccgaggccattacaacggaaggaaaatactggaaaagccgcatcgagatcgtgattagggagtaccacaagtggcgcacctacttcaaaaagcgcttgcaacaacacaaggatgaggacctgtcatccctggttcaagatgatgacatgctttactggcacaaacacggagatggatggaagaccccagttcccatggaggaagaccctctccttgacaccgatatgctcatgtccgagttcagtgacaccctgttcagcaccctttcaagtcatcaacccgtggcctggccaaacccacgggagatcgcccacttgggaaatgcggacatgatacagccaggcctcatcccattacaacctaaccttgactttatggacaccttcgaaccgtttcaggacctattttccagctccagatccatctttgggtccatgctacccgcctccgccagtgctcctgtccctgatccaaacaatccaccagcacaggaaagtatactgcccactacggcgctccccacagtgagccttcctgactcccttattgctccaccgactgccccctctcttgcccatatggatgaacaagggtgtgagcatacttctagaactgaagatccttttatccagccaactgactttgggcctagtgagccgccactgagcgtgccccagccattccttcccgtatttaccatgcccttactctccccgtcccccgcccccccccccatctcccctgtacttcctctcgtgcctccccctgcgaccgcactgaatccaccagcacctcctacgtttcaccagccacaaaaatttgcgggagtgaacaaggccccatccgtgattacacatactgctagcgccacgctcacccacgacgctcccgctacaactttttcacagagccagggtctggtgatcaccacccaccacccagccccgtctgcagccccttgtgggctggccttgagcccagtgacccgacctccccagccgaggctgaccttcgtgcacccaaagcccgtgtctctgacaggcggacggccgaagcagccccataagatcgtccctgcaccaaagcctgagcccgtgtcccttgtgctcaagaacgctcggattgcccccgcagcattctccggccagccccaggccgtgattatgacttcaggccccttaaagagagaagggatgttagcctcgacagtctcacagtctaatgtggtgatcgccccagccgcaattgccagagccccaggagtgccggaatttcattcgtctatcctggtaactgacctggggcacggcacctcctccccacctgcccctgtgagccggctcttccccagcactgcacaggatcctttggggaagggagagcaggtccctttgcatgggggaagccctcaggtcacggtaaccgggccctcacgggattgtcctaattccgggcaggccagtccatgtgcgtcagagcaatctcccagcccacagtcccctcagaacaactgttccgggaaatccgatccaaaaaacgtggccgccctcaagaacaggcagatgaagcacataagtgctgaacaaaaacgaaggttcaacatcaagatgtgcttcgacatgttaaactcgctgatctcaaacaacagcaagttaaccagccacgcgatcactctccagaagaccgttgagtatattactaagctccaacaggaaagaggccaaatgcaggaagaggcccgacgcctgagggaagagattgaggagttgaacgctaccattatttcctgtcagcagctgcttccggctactggggtgccagttacaaggcggcagtttgaccacatgaaggacatgttcgatgagtatgttaagacccgcacattacaaaattggaaattctggatcttttctataatcatcaagcctttgtttgaatcttttaaaggcatggtgagcactagtagcctggaggagcttcaccggacggccctgtcatggttggaccaacattgtagcttgcctattcttcggccgatggtcctgtccaccttgaggcagctctcaacaagcacctccattctcactgacccagctcagttgcccgagcaggccagcaaagccgtaactcgaattgggaagaggcttggagagtcctag

SEQ ID NO: 195613 - DNA, 657 bp, synthetic construct
  misc_feature 1..657: note = Description of Artificial Sequence: Synthetic coding sequence
  source 1..657: mol_type = other DNA
atggacgagcagggctgcgagcacaccagccggaccgaggaccccttcatccagcctacagacttcggaccctcagagcctcctttgagcgtacctcctccgccaatatcaccagttctccccctcgttcccccacctgccaccgcattgaatccccctgctcctccaacgtttcatcaacctcagaaatttgcaggcgtgaataaggccccgtccgttataacgcatacagcctcagcaactctgacccacgatgcacccgcaactacttttagtcagtcacagggtctcgtgatcaccacacaccaccctgccccctcagcagccccttgtggtctagctcttagtcccgtgactaggccccctcaacccaggttgactttcgtccacccaaagccagtgtctcttacaggtggaaggcccaaacaaccccacaagatcgtgcccgctcctaagcctgagcctgtgagtctggtgcttaaaaacgcaaggatcgcacccggggagccaggcggtgagacgcaatgcggcgcacctcctgatcccgagggctgttttcctataccaaaggcctttaagctagttactactactacgactttggtctgtacatgtatgcggacccacattcatctcaacgagaccaaggtgagctag

SEQ ID NO: 195614 - DNA, 1581 bp, synthetic construct
  misc_feature 1..1581: note = Description of Artificial Sequence: Synthetic coding sequence
  source 1..1581: mol_type = other DNA
atggacgagcagggctgcgagcacaccagccggaccgaggaccccttcattcaacccacagactttggcccatccgaacctcccctttccgtacctcagcctttcttgcctgtgttcacaatgccacttctttcccctagtccagctcccccacccatctccccagtgctgcctctggtccctccccctgccaccgccctcaatcctccagcgcctcctacattccaccagcctcaaaaattcgccggggtcaataaggccccaagcgttattacccacacagcatcagccacactgacacacgacgccccagccacaaccttttcacagtcccagggcctggtgataacaacacatcacccagccccgagcgcagcaccctgcggtttggctctcagtcctgtaacacggccaccccagccacggcttacgttcgtccaccctaaacccgtttccttgacaggaggtcgacctaagcagccccacaagatagtccctgctcctaagccagaaccagtgtccctggtgcttaaaaacgctcggatcgcacccgcagccttttcaggacagcctcaggctgtgataatgaccagtggccccctgaaaagggagggaatgctagcaagtactgtctcgcagagtaacgttgtgatcgctcccgccgctattgctagggcccccggagtgccagaattccacagtagcatcctcgtgaccgatctaggacatggcacctcatcccctcctgccccggtgtcccggctttttccatctaccgcgcaggatccactcgggaagggggagcaagtgccattgcacggaggttcccctcaggtaaccgtgacgggtcccagccgggattgtcccaattcaggtcaggcgtccccttgtgcctccgaacaatcacccagcccccagagtccacaaaataattgctctgggaagtccgatcccaagaatgttgccgccctgaagaatagacagatgaaacacatcagtgctgaacaaaagaggcgcttcaatattaaaatgtgtttcgatatgctcaattctttgattagcaataactctaagctgacttcccatgctattacactgcaaaagactgtggagtatatcacaaaattgcagcaggaaagaggccagatgcaggaggaagcacgccgcctgcgagaagagattgaggagctcaacgcaactattattagctgccagcagctgctgcctgccacgggtgtccccgtgaccaggcgacaatttgatcacatgaaagacatgttcgacgaatacgtaaaaactcgaacccttcagaactggaagttctggattttctcaatcataataaagccactctttgaatcattcaagggcatggttagcacatctagcctcgaggagttacataggacggcgttaagctggctggatcagcactgcagtctgccgatccttagacccatggttctgagtacactgagacagctgtctacttccacaagcattctcaccgatccagcacaactgccagagcaagcttccaaagccgttacccgaatcgggaaacgactcggagagtcttag

SEQ ID NO: 195615 - DNA, 2559 bp, synthetic construct
  misc_feature 1..2559: note = Description of Artificial Sequence: Synthetic coding sequence
  source 1..2559: mol_type = other DNA
atggccggcgccctggccggcctggccgccggcctgcaggtgcccagagttgcgcctagtcctgactctgatagtgacacagactccgaagacccgtcactgagaaggagcgccggtggactgctgcgctcccaggtcatacactctgggcacttcatggtgtcatctccgcactccgactccctgccgcggcggcgggaccaggaggggtcagtgggaccctctgatttcggtcctcgatctatcgatccaactctgacgcggctgttcgagtgtctctcgctcgcttactctgggaagttggtaagccccaagtggaagaactttaagggcctgaaattgctgtgtcgtgacaagattaggctgaacaacgccatatggagagcatggtatatacagtacgtgaaaagaaggaaatcccctgtgtgtgggtttgttacccctctccaaggccctgaggccgatgctcaccgtaaaccagaagctgttgtactggaaggaaactactggaaacggaggatcgaggtcgtcatgagagagtaccacaagtggagaatatattacaagaagaggctccgaaaacctagcagagaagacgatctgctggcccccaagcaggcagaaggtaggtggcccccccccgaacagtggtgtaaacaactgttttcaagtgtcgtgcctgttcttctgggtgatccagaagaagaaccaggcggaagacagctgctagacctgaattgctttcttagcgacatcagtgatactctttttactatgactcagtctggtccctctcctctgcagctcccacccgaggacgcctatgttggaaacgccgacatgattcagccggatctgacacccctgcagccttccctagatgacttcatggacatctctgattttttcactaattctaggctgccacagcctccaatgccttctaacttcccagagccaccatccttctctcccgtagttgactctctattcagtagtggaaccctgggaccggaggtccctccagcatcttcagctatgactcatttgagcggacactccaggctgcaggcaagaaattcttgcccaggcccattagactcttccgcgttcctgagctctgattttctcctaccagaggaccctaagccacgactgccaccccccccggttcccccacccttactgcattatcctccccccgccaaagttcccggcctggagccttgtccccccccccccttcccccccatggcccccccaaccgccctgctgcaggaggagccgctgttcagcccacgtttcccatttcctaccgttccaccagccccaggcgtatcccctctgcccgcccctgccgcctttcccccaacaccgcagtccgtcccaagcccggcccctacacctttccccatcgagttgttgccactgggatatagtgaacctgcgttcggtccatgcttctccatgccacggggtaagccccccgctcctagcccacgggggcagaaagcctcccctccaactctcgctcctgctaccgcatccccacccacaacggctgggtccaacaatccctgcctgactcagcttctcacagccgcaaagcccgagcaagccctggaacctcccctggtcagctccacactcctgagaagccccggtagccctcaggaaaccgttccagagtttccctgcacatttttgcctcctactccggcccctacaccccctcgccctccaccagggccagcgactttagcccctagccgaccgctattagtacctaaagccgagcgactgagtccccctgccccgtccggctccgagagacgattgagcggagatctgagctccatgcccgggccggggaccctgtcagtgagggtgagcccaccccagcccatactgagcagaggccggccagatagcaacaagactgaaaacaggcgaatcacccacatctcggccgaacagaagagacgtttcaacatcaagcttggctttgacactctccacggcctggtcagcaccctgagtgcccagccatcactgaaggtctctaaggccaccacactgcagaagacggcagaatacatacttatgctgcaacaggagagggccgggttacaggaggaggcacagcaattacgggacgaaatcgaagagctgaacgccgccatcaatctctgccaacagcagctccctgccacgggcgttccgattacccaccagcggttcgatcaaatgcgggacatgtttgacgattatgtacgcactcggacactgcacaattggaaattttgggtgttctccattctgatacggcccttgtttgaatctttcaatggcatggtgagcacagcatccgtccacacccttaggcagacaagtcttgcttggttagaccagtactgctccctgcctgcattaagacccaccgtgctgaactctctcagacaactaggcaccagcacttcaatcctaactgaccctgggcggattccggaacaagccactagagcggtaaccgagggtactctgggcaagccattgtag

SEQ ID NO: 195616 - DNA, 2496 bp, synthetic construct
  misc_feature 1..2496: note = Description of Artificial Sequence: Synthetic coding sequence
  source 1..2496: mol_type = other DNA
atggccggcgccctggccggcctggccgccggcctgcaggtgcccagagtggccccatcccccgactcggactccgacactgatagcgaagacccctcgctaagacggtcggctggggggctgctcaggtcacaagtgattcacagtggccacttcatggttagttcgccacatagcgatagccttccaagaaggcgggaccaagaaggaagtgtaggccctagcgattttggtcccaggtctatcgatcccactctcacacgcctctttgaatgcctttctcttgcatattcgggcaaactagtttcacccaagtggaaaaactttaagggcctgaaactgctgtgtagggataagataaggcttaacaatgcaatatggcgagcttggtacattcagtacgttaagcgccgcaagagcccagtgtgcgggttcgtgactccactgcagggaccggaagcggacgcccatcggaaaccggaagccgtcgtgctggagggaaactattggaaacgcaggatcgaggtcgtgatgcgggaataccacaagtggcgaatttactataaaaagcgcctccggaagcccagcagggaggacgacttactggctcctaagcaggctgaaggcaggtggccaccacctgaacagtggtgcaagcagctcttctcatccgtcgtacccgtgttacttggggacccagaggaggaacctggcggtcgtcagctgctggatctgaattgcttcctgtcagatattagcgatacacttttcacaatgacacagtccggtccttctccactccagctcccacccgaagacgcgtacgtgggcaacgccgatatgatccagcctgatctcaccccactgcagcctagcctggatgactttatggacatcagtgactttttcaccaacagtcggctaccgcagccacccatgccatccaatttccccgagcctcctagtttttctcctgtggtggactcactgttttcttctgggactcttggacctgaggttccacctgctagttcagcgatgacacatctctctggccactccaggctgcaggctaggaattcctgccctgggcccctggatagctcggcatttctgtcctccgacttcctgctgccggaggacccaaaaccacgcttacctccacctcccgttccgccacccctgcttcactaccctccacctgccaaggttcccggcctggaaccttgccccccaccacctttccctcccatggcccctcctacggcgttgctgcaggaggagcctctgttcagcccacggttcccctttcccacggtccccccagcccctggagtctctccactgccggctcccgctgcgtttccccctactcctcagagtgtgccttccccagcccctacaccatttccgattgaactactccccctgggctactcagagcccgcctttgggccatgtttcagcatgccacgcgggaagccaccggcaccatctcccagaggtcaaaaagccagccctcctactcttgcccccgcaacagcatcccctccaacaactgccggctcgaataacccatgtctcacccaactcctgacagccgcaaaacccgagcaggcactggagccgccccttgtgtcctccacgcttttgcgctccccaggcagcccccaggaaactgtgcccgaatttccttgcacgtttctccctcctaccccagccccaactccacccagacctccgccgggacctgccacattggctccttcacgccccctgctagttccaaaagccgaaagactctcgcccccagcaccaagtgggtctgaacgccgcctcagtggcgatttgtcatcaatgccaggccccggtactttgagcgttagagtttcccctccgcaacctatcttgtcacgcggaagacccgactccaacaagaacagacgaatcactcatatttctgctgagcagaaacgtcgttttaacatcaagctgggctttgataccctgcacggcctggtgtcgactttaagcgcccaacccagccttaaggagcgggccggcctacaggaggaagctcagcagctgagggacgagatcgaggaactgaatgccgccataaatctctgccagcaacagctcccagctaccggcgtccctatcacacaccaacggttcgaccaaatgagggacatgttcgacgactatgtcagaaccagaaccctgcataactggaagttctgggttttcagcatcctcattcgccccctgttcgaatctttcaatggcatggtctcaaccgccagcgtacatactcttaggcaaacatctctggcttggttggaccagtattgctcactgcctgctctgaggcccaccgtcctgaacagcctgaggcaattggggacctcaacctctattctcaccgatcccggtagaattcccgaacaggcaacaagggccgtgacagagggaaccctcgggaaacccctttag

SEQ ID NO: 195617 - DNA, 2280 bp, synthetic construct
  misc_feature 1..2280: note = Description of Artificial Sequence: Synthetic coding sequence
  source 1..2280: mol_type = other DNA
atggccggcgccctggccggcctggccgccggcctgcaggtgccccgcgtcgcccccagcccggactccgactctgacactgactctgaagacccatctctgagaagatccgccggggggcttctgcgctcgcaggtaattcattcgggacactttatggtgtctagcccccatagcgatagccttccccgaagacgtgatcaggaaggctccgttgggccctccgacttcggaccccgtagtatcgacccaacactgaccagactgtttgaatgtcttagcctcgcctattcaggcaaactggtttcacctaaatggaagaattttaaggggctgaaattgttatgtagggacaagatcagactaaacaacgccatctggagggcctggtatattcagtatgttaagagaaggaagagtccagtatgcggatttgtgactccactgcaggggccagaggcagatgcacaccggaaacctgaggcggtagtgctagaaggcaattactggaaacggcgcatcgagctgcctcccgaagacgcctacgtgggcaatgcggacatgattcaacctgatcttacaccgctgcagccgtctctagatgatttcatggacatctccgacttcttcaccaactcccggctgccgcagccacccatgccctcgaactttccggaacctccatccttctcaccagtagtggactcactgttctcttcggggaccctgggtcccgaagtgcctcccgcttctagcgcaatgacgcatctatccgggcattcaaggcttcaggcccgcaacagttgccccggcccactcgattctagcgcatttctatcctcggattttctcctgcccgaggacccaaaaccaagactgcctcccccacccgttccacccccacttttgcactacccacctccggcgaaggtgccgggactggaaccctgtcctcccccaccgttcccgcctatggctcctcctaccgctctgttacaggaggagcctctcttctctccacgctttccctttcctacagttccaccagctccaggcgtcagtcccctaccggcacccgccgcctttccaccaactccccaatctgtgccatctccagcccctactccattcccaatcgagcttttgcccctgggatactcagaaccggccttcggaccttgctttagcatgcccagaggaaagccccccgctccatcccctagaggccagaaggcttctcctcccactcttgccccggcgaccgcgtcccccccaactacagcaggtagcaacaatccttgcctgactcagctgttaacagctgcgaagcctgaacaggctctcgagccgcctctggttagcagtactctactccgcagcccaggctccccccaggagactgtgccagaattcccctgtacgtttttaccacctacccccgcccctacccccccaagaccaccccctggacctgctaccttggctccgagtcggccgctgctggtacctaaagcagaacgtcttagtcctcctgctccttcaggatcggaaagacggctgagcggggacttaagctccatgcctgggccggggaccctgtccgtgcgcgttagccccccgcaacccatcctgtctcgggggcggccagacagcaataaaactgagaatcgacgaatcacccacatcagcgcagaacagaaaagacgctttaacatcaaactgggttttgatacactgcacggacttgtgtctactctatcggctcagccctcgctcaaggtctccaaagcaaccacgctccagaagactgccgagtatatattgatgttgcagcaagagagagccggcctccaagaagaggcccaacagcttcgggatgagatcgaagaactcaacgccgccatcaatctctgccagcagcagctgcccgccactggagtccccattacccatcagaggtttgaccagatgagggacatgtttgacgattacgttagaacccggaccctgcacaactggaaattttgggtcttcagcatcctgattagaccactcttcgaaagcttcaacggcatggtaagcactgcttccgtgcataccctccgacaaacatccctcgcatggctggaccagtactgctcgcttcccgccctgagaccaactgtgctgaatagccttaggcagctcggtactagtacctctatcctgacagatcctgggcggatacccgagcaagccactcgcgccgtgaccgaaggcaccctgggcaagccattatag

SEQ ID NO: 195618 - DNA, 2553 bp, synthetic construct
  misc_feature 1..2553: note = Description of Artificial Sequence: Synthetic coding sequence
  source 1..2553: mol_type = other DNA
atggccggcgccctggccggcctggccgccggcctgcaggtgccccgcgtggcccctagtccagactcagattccgataccgacagcgaggacccctcactcagaaggtctgccggcggactgctcaggtcacaggtgatccactcagggcatttcatggtttcgtctccccacagtgacagcttaccacgaaggcgggaccaagagggctctgtgggaccaagcgatttcggcccccgcagtatcgatcccacactgacccggctctttgagtgcttgtcattagcctattcaggcaagttagtgtcacctaagtggaagaatttcaaaggattaaaacttctgtgccgggacaagattagactgaataatgcaatttggagggcatggtatatccagtacgtaaaaagacgtaagagccctgtgtgtgggttcgtcactccactgcaagggcctgaagcagatgcacacaggaagcccgaagcagttgtgttggaaggaaattactggaagcgcagaatcgaggtggtaatgagagagtaccataagtggagaatatattataaaaagcgcctgcggaagccctcacgcgaggacgacctgctggcccccaaacaggcagagggcagatggccgcccccagagcagtggtgtaaacagttgttcagcagtgtcgtgcccgtgttacttggggatccagaagaagagcctggtggccggcagctgctcgacctgaattgtttcttgtctgatattagtgacacgctattcactatgacacagtctgggccaagcccccttcaattgccaccggaagacgcttacgtaggaaatgcagatatgattcaaccggatttaaccccactgcagccaagtcttgatgatttcatggacatctccgattttttcacaaactctaggttgcctcagccaccaatgccttccaacttcccagagccccctagcttctctccagtcgtggacagcctgttttcatcaggcactctgggccctgaggtgcccccagccagctctgccatgacgcacctttcaggccacagtagactgcaagctcgtaattcatgcccaggaccccttgattcatctgctttcctctcgtccgactttctgctgcccgaggaccccaaacctcgattaccacctccccccgtgccaccccccctgttacattatcctccacctgcaaaggtccccgggttggaaccctgtccgccccccccattccctccgatggctccaccaacagctcttttacaagaggaacccctgttttcacccagattccccttccccactgtcccccccgctccaggggtgagccctctgcctgcgccagccgcttttcccccaaccccacagtctgtcccaagtccagctcccacaccctttccaattgaactgctgcctctgggctactccgagcccgcattcgggccatgtttttctatgccaagaggcaagcctcccgccccatctcctcgcgggcagaaggcaagcccacccaccctggctcctgccactgcgtctccccctacgactgctggctctaataacccttgcctgactcagctgctgacagcagcaaaaccagagcaggcgttggagcctcccctcgtgtcgagcaccctactccggagccccggctcccctcaggaaactgtgccagagtttccctgcacgtttctcccacctacccccgcgccaacacctcccaggccgccacctgggcctgcgaccctggctccctcacgccctctactggttccgaaagcggagaggctgagccccccagcccccagtggatcggagcggagactaagcggtgacctgagttcgatgcccggccctggaacgcttagcgtgagggtgtctccaccacaacccatcttgtctaggggccgacccgactcgaacaagaacaggaggattacacacattagtgctgagcagaagagaagatttaacattaaattagggtttgacacactgcacggtttggtgagcaccctctctgcgcagccttccttaaaggttagtaaggcgactacactgcagaaaactgccgagtatattttaatgctacagcaagagcgggccgggctccaagaggaagctcagcaactgcgagacgaaatcgaggagttgaacgccgccatcaacctgtgtcagcagcaactgccagctacaggtgtgccaataacacatcagaggttcgaccagatgagagatatgtttgacgactacgtcaggacccgcaccttgcacaactggaaattctgggtcttcagcatcctgatccgtcccctctttgagagcttcaatggcatggtgtctacagcctcggtacataccctgcggcagacttcactcgcttggctcgatcagtactgctccttacctgcactgcgacccacggtgcttaattcactccggcagttgggtacctccacaagcattctaactgacccaggaagaattcctgagcaggccacacgtgccgtgacagaggggactttgggcaagccactgtag

SEQ ID NO: 195619 - DNA, 2502 bp, synthetic construct
  misc_feature 1..2502: note = Description of Artificial Sequence: Synthetic coding sequence
  source 1..2502: mol_type = other DNA
atggccggcgccctggccggcctggccgccggcctgcaggtgccccgcgttgccccatcacccgatagcgattctgatacggatagcgaggatccatccttgagacggtccgcaggcgggcttttacgtagccaggtcatccacagtggtcacttcatggtctcttcaccacacagcgatagcctcccgaggagaagggaccaagaagggtcagttggaccctccgattttggaccccggtccatagatcccaccctgactaggctctttgagtgtctgtctttggcatattctggcaagttggtttcacctaaatggaaaaattttaaaggcctcaagctgctttgccgcgacaaaatacgcctcaataatgccatctggcgggcatggtatatccagtatgtgaaaaggagaaagtcaccggtgtgtggtttcgtaacccctctgcaggggccagaggccgacgctcatcgcaaaccagaagccgtggttttggaaggaaactactggaaacggcgtatcgaagtcgtcatgagagagtatcacaagtggcggatttattacaagaagcggctgagaaagccttcgcgagaagatgacctgttagcaccgaagcaggcagagggccgctggccgccgcccgagcaatggtgtaaacagctattcagcagcgtggtcccagtgttgctgggagatcctgaagaggaaccaggcggaagacagttgctggacctcaactgcttccttagtgatatcagtgacaccctttttactatgacacagtcagggccctcccccctccaactgcctccggaagacgcttacgtaggaaatgcggatatgatccagccagatctcactcctctgcagccttccctcgacgatttcatggatatttctgatttctttaccaacagtagactcccccagccccccatgccaagcaacttccccgagcccccaagcttctcacctgtggtagattctctcttttcttctgggacacttggtcctgaggtcccgccagcctcctccgccatgacccacttgtcaggtcactcaaggcttcaggcgagaaacagctgtcctgggcctctggactcttccgccttcctgagctctgacttcttactgcctgaggatcccaaaccaagattgcctcctccaccagtcccaccccccctgctccattaccccccccctgctaaggtccccggcttagaaccctgtcctcccccccccttcccccccatggctcctccgacggctctgctgcaggaagaaccgctcttcagcccaaggttcccatttcccacagtcccacccgcacctggggtatccccgctccctgccccggctgcatttcctcctacaccgcagagcgtcccttctcccgcaccgaccccattccctatcgagctgctgcccctcggctacagcgaaccagccttcggcccgtgttttagtatgcctagaggcaaaccgcccgcccccagtcctcgggggcagaaggcctccccccccactctggccccagccacagcttcacccccgaccacagctgggagcaacaacccttgtctaactcagctgttaaccgcagcaaagcctgagcaagccctggagcctcctctagtaagctctacactcctgcggagtcccggctcaccacaggagaccgtgccggagttcccatgcactttccttccacctacgccagctccaaccccacctcgaccacccccaggaccagcaaccctcgccccatctaggccacttctggtgccaaaggcggagagactttcaccccctgctccgtccgggtccgagagaaggctgagcggtgatctgtcgagcatgccaggaccggggactttatccgtgagggtgtcaccacctcagcccattttatctcgcggaagacccgattcaaacaaaacggaaaacaggagaatcacacatatcagcgcggagcagaaaagaagatttaacattaagctcggctttgataccctccacgggctcgtttcaaccttgagcgcccagccatccctgaaggaaagggccgggctgcaggaggaggcccagcaactgagagacgagatcgaggagctcaatgccgcgatcaacttatgccaacagcagctccccgccaccggcgtgccaattacacaccagaggtttgaccagatgagggacatgtttgatgactatgtcagaaccagaaccctgcataattggaaattctgggtatttagcatcctgatccgccccctgtttgagtcattcaacggaatggtgtccacagccagtgtccacactctcaggcagaccagtctcgcatggctcgatcagtattgcagcctccctgcgctcaggccgacagttttgaattcgctccgacaactgggaacctctacttctatactgactgatccagggaggattcctgagcaggccacccgggccgtgactgaaggaactctgggcaagcccctctag

SEQ ID NO: 195620 - DNA, 1059 bp, synthetic construct
  misc_feature 1..1059: note = Description of Artificial Sequence: Synthetic coding sequence
  source 1..1059: mol_type = other DNA
atgaacaccatcgtgttcaacaagctgagcggcgccgtgctgttcgaggacggcggcgctagcgaacgtgagcgaggcgggcgcccttattccggagtgctggactccccccacgcccggccggaagtaggtattcctgatggacccccacttaaggacaatctgggcctccgacatcgccggactggcgcccgccagaacggcgggaaagtccggcataagcgccaagctctgcaagacatggccaggccccttaaacagtggctgtataaacatagggacaatccatatccaactaagaccgagaagatactactggctctaggctctcagatgaccctggtccaagtgtcaaactggtttgcaaatgccagacgacgcttgaaaaatactgttaggcagccggatctgagctgggctttgcgaatcaaattgtacaataagtatgtgcaaggcaatgccgagaggctctctgtcagctcggacgactcatgtagcgaagacggcgaaaatccccccaggacccatatgaacgaaggcggatataatacgcccgtgcaccacccagtaatcaagtctgaaaatagtgtaattaaagccggcgtgcgacctgagagccgtgcctccgaagattatgtcgcaccccctaaatataagtcttccctgcttaacagatacctgaatgatagtttacgccatgtgatggccaccaacacaaccatgatgggcaaaactcgacagcgtaatcattctggtagtttctcctcaaatgagttcgaggaagagctggtatccccatcatcctctgaaaccgagggcaacttcgtgtaccgaacagacacactggaaaacgggtcaaacaagggggagtcggccgccaacaggaagggacctagtaaagacgacacctactggaaagagattaacgctgcaatggcactgactaatcttgctcagggaaaagataaactccaggggactacctcatgtataattcaaaaaagttcccacattgctgaggtgaagacagttaaggtgcctctcgtccagcaattttag

SEQ ID NO: 195621 - DNA, 1059 bp, synthetic construct
  misc_feature 1..1059: note = Description of Artificial Sequence: Synthetic coding sequence
  source 1..1059: mol_type = other DNA
atgaacaccatcgtgttcaacaagctgagcggcgccgtgctgttcgaagacgggggggcgtctgaaagggaaagagggggcagaccttattccggcgttctagacagcccacatgcgcgtcctgaggtgggtataccagacggcccaccgctgaaggacaatctgggtctgcggcatagacggaccggagcacgacagaacgggggaaaagtgcggcacaagagacaagcactccaagacatggcacggcctctcaagcagtggttatataagcaccgagataacccatatcctacaaagacagagaagatcctgttagctctcgggagccagatgactctggtccaggtgagcaactggtttgcaaacgcgcggaggagactcaagaatactgtccggcagccggacctctcctgggctttgcgcataaaattatacaataagtacgttcaagggaatgcggaacggcttagcgtctcctccgacgactcatgctccgaagacggcgagaacccccccagaacacatatgaacgagggtggatacaacactcctgtccatcacccagtcatcaagtcagagaattctgtaatcaaggccggcgtccgtccagagagccgggcctccgaagattatgttgctcctccgaaatacaaatccagtctactgaatcgatatttgaacgattcacttcgccatgtcatggctacaaacaccacaatgatgggaaagacccgccaaagaaaccactccggcagcttcagctcaaacgaattcgaagaggaactggtttcccccagctccagtgagactgaaggaaacttcgtgtaccggactgacacactggaaaacggatcaaataagggcgagtcagctgctaataggaaggggccaagtaaggacgacacatactggaaagagatcaatgccgcaatggccctcacaaacctcgcccaagggaaggataagctgcaggggaccacatcgtgcattattcaaaaatccagtcatattgccgaggtgaaaacagtaaaggtcccgttggtgcagcaattctag

SEQ ID NO: 195622 - DNA, 177 bp, synthetic construct
  misc_feature 1..177: note = Description of Artificial Sequence: Synthetic coding sequence
  source 1..177: mol_type = other DNA
atgaacaccatcgtgttcaacaagctgagcggcgccgtgctgttcgaagacgggggtgcatcagagcgggaaagaggaggcagaccctacagtggggtgctcgactcgcctcatgcaagacctgaggttggcatacctgatggacctccgttaaaggataatctcgggctgcgctag

SEQ ID NO: 195623 - DNA, 288 bp, synthetic construct
  misc_feature 1..288: note = Description of Artificial Sequence: Synthetic coding sequence
  source 1..288: mol_type = other DNA
atgaacttcgacttccccttcaagaagggcagcggcatccccctgcttaccacaaacctaagcccgcagtgtctctcactgctccacgcgatggtggcatatgacccagatgagagaatcgcagctcaccaggccctgcagcacccctattttcaggagcagcgcacacagaatggctctgaagacgaggccagcgccgtattgctgcctatccaaacccgctcgtctcttaatcccctgctgagtacctgtatgctgccaggtcgctccgtcaccctgctggtatag

SEQ ID NO: 195624 - DNA, 1260 bp, synthetic construct
  misc_feature 1..1260: note = Description of Artificial Sequence: Synthetic coding sequence
  source 1..1260: mol_type = other DNA
atgaagaactacaaggccatcggcaagatcggcgagggcaccttctctgaggtgatgaaaatgcagagtctgagggacggaaattactacgcctgtaaacaaatgaaacaacggtttgagagcatcgaacaggtgaataatctgagagaaattcaagctctgaggaggctgaacccacatccaaatattctgatgttgcacgaggtggtgttcgaccgtaagtcaggttctctcgcattaatttgtgagctgatggacatgaacatttatgagcttatcaggggacggcgataccctctgtcggaaaaaaagatcatgcattatatgtaccagctatgcaagtccctcgatcatattcaccgcaacggaattttccaccgggatgtgaagccagaaaatattctgataaaacaggacgtactcaaactcggcgatttcggcagttgccgctcagtttattcaaagcagccatatacagaatacatctctacaagatggtaccgggcccctgagtgtctgcttacagacgggttttacacctataaaatggatctgtggtccgcagggtgcgtgttttacgagatcgccagtctacagcctctgttccctggagttaatgagctagatcaaatctccaagattcacgatgtgatcggtacgcctgcccagaagatccttacaaagtttaaacaaagtcgcgcaatgaactttgactttccatttaaaaagggcagcgggataccgttgctgactaccaacttgtctcctcagtgcctgtccctgttgcatgccatggtggcctatgatcctgacgagaggatcgctgcccaccaggccctgcaacacccctattttcaggagcagcgtaagacagagaagagagcgctcggtagtcatcggaaggcaggtttcccagagcaccctgtcgccccagaacccctgtccaacagctgccagatcagtaaggagggtcgcaagcaaaagcaaagtcttaagcaagaggaggacagaccaaaaagacggggacccgcttatgtaatggagcttccgaagttgaaacttagtggagtggtcagactgagcagctatagctcaccgaccttgcagtccgtactgggttcaggcactaacggtagggttcctgttctgagaccactcaaatgtatcccggcttctaagaagaccgatccacagaaggacctgaagccagccccgcagcagtgccgactgccaaccatagttagaaaaggtggtagatag

SEQ ID NO: 195625 - DNA, 2667 bp, synthetic construct
  misc_feature 1..2667: note = Description of Artificial Sequence: Synthetic coding sequence
  source 1..2667: mol_type = other DNA
atggccggcgccgccgccgagagcggccgggagctgtggaccttcgcaggtagccgggacccgtccgccccgaggctcgcgtacggctacggaccggggtcactgcgagagctgagagccagggagttttcaaggttagccgggactgtctacctggaccatgctggtgccacactgttttctcagtcgcagctggagtcttttaccagcgatctaatggagaacacctatggcaacccccatagccaaaatatttcctcaaagctgactcatgacactgtggaacaggtgagatacaggattttagcccatttccatacaaccgccgaggactacaccgtgatattcaccgcgggaagtaccgctgctcttaaactcgtggcggaggcgttcccctgggtgtcccagggacccgagagcagcggctcgagattttgttatctgaccgactcacatacaagcgtcgtgggcatgaggaacgtcaccatggcaatcaatgttatcagtacaccagtgagaccggaggacctatggtcggccgaggaaaggtccgctagcgcgtctaaccctgattgtcagttaccacatctgttttgctacccagctcaatcgaactttagtggggtgcgctaccctctgtcatggattgaagaggttaagagcggccggctgcatccggtgagcacacccggcaagtggtttgtactcctagacgctgcctcttatgtgtcgacatcacccttggacctgtccgcacaccaagcggactttgttcccatctctttttataagattttcggcttcccgacagggttgggagccttgctggttcataaccgggctgcaccactgctccgaaaaacgtacttcgggggtgggacagcttcggcctacctcgcaggtgaggacttctatatccctaggcaaagcgtagctcagcgctttgaggatgggaccatttctttcctcgatgtgatcgccctgaaacatggattcgataccctggaacgattgacaggaggaatggagaacatcaaacaacatacatttaccttagcccagtatacttatgtcgctctctccagtcttcagtacccaaacggcgccccggtggtgcgaatttattctgactccgagttctcctcgcccgaggtccagggccccataattaatttcaacgtgctggacgataaggggaacattatcgggtactcgcaggttgacaagatggcctctctttacaacattcacctgagaacgggctgtttctgcaacacaggcgcatgtcagcgccacctgggtataagcaatgaaatggttaggaagcatttccaagccggacacgtatgcggcgataacatggacttgatagatggacagcccaccgggtcagtccggatcagcttcggctacatgtccactttggatgatgtacaggcttttctcaggtttatcatcgatacccgattacatagcagcggagactggcccgtgcctcaagcacacgccgacactggcgagactggcgcccccagcgctgattcccaggccgacgttatacctgccgtcatgggcaggcgatccctcagcccacaggaagacgcactaaccggctctagagtttggaataactcaagtaccgtaaacgccgtgccagtagcaccccctgtctgtgacgttgcacggacccaaccaacaccatccgagaaggccgcaggagtgctggaaggcgcactggggccacatgtggtcactaacctgtacctctaccctataaaaagttgcgccgcgttcgaggtgacaaggtggcccgttggcaaccagggattgctgtacgatcggagttggatggtggtgaatcacaatggggtttgcctcagccagaagcaggagccccggctgtgtctgatacagcctttcattgatttgagacagagaatcatggtgatcaaggccaaaggcatggagcctatcgaggtcccactggaggagaattctgagaggactcagatacggcaatcgcgcgtctgcgcggaccgggtgtctacctacgactgtggagaaaagatcagctcctggttgtcaacattttttgggagaccatgccaccttatcaagcagtcctcgaattcccagcggaatgccaagaagaaacatgggaaagatcaattgcccggaaccatggctactttatcgctggtaaatgaggctcaatacctcctgattaatactagctccatcttagaactgcatagacagctcaatacttctgacgaaaatggcaaggaggagcttttttcattgaaggacttgagtctgcggttccgagctaacattattattaatgggaagcgggcgttcgaggaagaaaaatgggacgagattagtataggctcactgagattccaggtgttgggtccatgccaccgatgtcagatgatctgcatcgaccagcagacgggtcagcggaaccagcacgtgtttcagaagctctctgaatctagggaaacaaaagtcaatttcggcatgtatctgatgcacgccagccttgacctgagcagtccttgtttcttgtctgttgggtcccaggttctcccagtcctgaaagagaatgttgagggccacgacctgcccgcaagtgagaaacaccaggatgtgacttcctag

SEQ ID NO: 195626 - DNA, 1863 bp, synthetic construct
  misc_feature 1..1863: note = Description of Artificial Sequence: Synthetic coding sequence
  source 1..1863: mol_type = other DNA
atggccgcccggcccctgagccggatgctgcggcggctgctgcggagcagcgccaggagctgctcctcaggtgcccccgtgacgcagccctgtcccggggagtccgctcgcgctgcctcagaggaagtgtctcggaggaggcagttcctgagagagcacgcggcaccttttagcgcctttctgacggactccttcgggcgtcagcacagctacctgcggataagcctcaccgagaagtgcaacctgcggtgtcagtattgtatgcccgaggagggcgtgcctctgactcctaaggctaacctcctcactaccgaagaaattctgactctggctcgactgttcgtgaaagaggggattgacaaaattcgcctcacaggcggtgaaccattgattcgccccgacgtcgtcgacatagtagcacagcttcagcgccttgaaggcctgaggacaattggcgtgactacgaatggcatcaaccttgccagactgttgccacaactacaaaaagcggggttatccgctatcaacatctcattggacaccttggtacccgcaaagtttgagttcatcgtgcgtaggaaggggtttcacaaagttatggaaggtattcacaaagcaattgagctgggttataatcccgtgaaagttaattgtgtggtcatgcgagggctaaacgaggacgaactgctggatttcgcagctctgacggagggccttcccctagacgtcaggtttatagagtatatgcctttcgatggcaacaagtggaacttcaagaaaatggtgagctataaagagatgctggatacagtgcgccagcagtggcccgaactggagaaagtccccgaggaggagtcatccacagccaaggcatttaagattccaggattccaggggcaaatcagctttatcacctccatgtctgaacatttctgtggaacatgtaaccggctgaggatcaccgccgacggaaacttgaaagtctgccttttcggcaacagcgaagtgagcctgcgcgatcatctgcgggccggcgcttctgagcaagagcttctgcggatcatcggggcagcggtgggacgcaaaaagcgacagcatgctgaacttttcctcatgttcccaaatagtccaccagcgaacccatccattttttcttgggaccctttgcatgtgcagggactgaggcccaggatgtctttctcttcccaggtcgcgacactctggaagggatgtcgcgtgccccagaccccacccctcgcccagcagcgtctgggctccggctccttccagcggcattataccagtcgggccgactccgacgctaacagcaagtgtctctcgcctggaagctgggcttctgctgctccctctggcccgcagctcaccagcgagcagttaacccacgttgactccgagggccgtgccgctatggttgacgtcggaagaaaacccgacacggaaagggtcgcagtggcttcggctgtggtgctcctgggacccgtggcatttaaactcgttcagcagaatcagttgaagaagggggacgccctggtggttgctcaactggcaggcgttcaggccgcaaaggtgactagccaactgattccattgtgccatcacgttgccctgagccacatccaggttcagttagagctggacagcacacgtcacgccgtgaaaattcaggcgtcctgcagagccaggggccctacaggcgtggaaatggaggctctaacatccgccgcagttgccgcactgactctgtacgacatgtgcaaagctgtctcccgtgatatcgttttagaagagataaaactcatcagcaagacggggggacagcgcggagatttccaccgcgcttag

SEQ ID NO: 195627 - DNA, 1911 bp, synthetic construct
  misc_feature 1..1911: note = Description of Artificial Sequence: Synthetic coding sequence
  source 1..1911: mol_type = other DNA
atggccgcccggcccctgagccggatgctgcggcggctgctgcggtcaagcgctaggtcctgttcctccggggcaccagtcacacagccttgtcccggggaatcagcacgggctgcctcagaagaggtcagccgtcgcagacagttcttgcgtgagcatgctgcccctttctcagcgttcctgaccgactcttttggaaggcaacatagctatctgaggatttccctgaccgagaagtgcaatcttcgttgccagtactgtatgccagaagagggagtgcctttaactcccaaagccaacttgttaacaactgaagagatacttactctggcacggttgtttgttaaggaaggcattgataagatcagactaaccggcggcgagcccttgattcggcccgacgttgtcgatatcgtagcacagctacaaagactcgaagggcttaggacaatcggagtgactacaaacggtataaacttggcaagactgctcccccagttgcaaaaagctgggttgagcgctattaacatctccctggataccctcgtgcctgctaagtttgagtttattgtgcggcgaaaaggattccacaaggtaatggagggcatacacaaggcaattgagctaggctataacccagtcaaggtcaactgcgtcgtgatgaggggtctcaatgaagatgaattgctggattttgctgctctgacagaaggcctaccacttgacgttagatttatcgagtacatgcctttcgacggcaataagtggaacttcaaaaagatggtgtcctacaaagagatgctggatacagtaagacaacaatggccggagcttgaaaaagtaccggaagaggaaagcagcaccgctaaggcttttaagatccccggatttcaaggccaaatctcattcataacctccatgtccgaacatttctgcgggacatgcaacagattaaggataacagccgatgggaacctcaaagtttgcctattcggcaactccgaagtgtcccttagagaccatctaagagccggagcgagtgagcaggaactcctgcgtatcataggagctgcggtggggcggaaaaaaagacaacatgctggcatgttttctatctctcagatgaagaaccggcccatgattttgattgaactctttcttatgtttcctaattctcctcccgcgaacccctccatctttagttgggatcccctacatgttcagggcctgagaccgagaatgagttttagttctcaagtcgctaccctctggaaggggtgccgggtccctcaaactccaccacttgcacaacagcgcctggggagcggtagttttcagaggcactataccagcagggccgatagtgacgcaaattctaaatgcttgtctcccggttcctgggcctccgcagccccttctggccctcagctaacttcggaacagcttacacatgtagatagcgagggacgcgctgccatggttgatgtgggcaggaaacccgataccgagagagtcgcagtggcctccgcagtcgttctcctgggtccagtggcctttaagcttgtgcagcagaaccagctgaaaaagggagacgcgctcgtggtggcacagctggctggagtgcaggctgccaaggtgacgagccagctcatcccactgtgtcaccacgttgccctctcccatatccaggtccaactggagctggacagcacccgccacgctgtgaaaattcaggcatcatgcagagctagggggccaaccggggtggagatggaagccctgaccagtgcagctgtcgccgccttgaccctgtatgacatgtgcaaggccgtgagtagggacatcgttctagaagagattaaattgatttccaagacgggaggacagcgcggggacttccaccgggcctag

SEQ ID NO: 195628 - DNA, 456 bp, synthetic construct
  misc_feature 1..456: note = Description of Artificial Sequence: Synthetic coding sequence
  source 1..456: mol_type = other DNA
atgcccttcgacggcaacaagtggaacttcaagaagatggtgagctacaaagaaatgctggatacagttaggcagcaatggccagaactggagaaggtccctgaagaggagagtagcactgccaaggcgtttaaaattcccgggttccaaggacagatctcttttatcacttcaatactgaccgtcgcgcgttcctgttggccattgtttctctggccgccaagcagtgagaccggctgtgcacatatgggccatagtccaaaagatagctgtcagacaacccagcctaccccaggacccgtgcacggctgctccactcatccgtctctgttctggtcgatctcaggaaaagaaaaattgatgatcgactgcctgcatcctcactccgctcagatcaaactgagatgccaactgtgtcgctgcaaaaatgaggacactgtctgggttgggcactag

SEQ ID NO: 195629 - DNA, 1071 bp, synthetic construct
  misc_feature 1..1071: note = Description of Artificial Sequence: Synthetic coding sequence
  source 1..1071: mol_type = other DNA
atgtggaagagctggaagctgcggaccgacgtgcgggaggtgagccgccgccgccagtttttgcgcgaacacgcagcacccttctctgcattcctgaccgactccttcggccgccagcacagctatctgaggatctccttgacagagaaatgcaacctgagatgccagtactgcatgcctgaggaaggagtgccccttactccgaaggccaatctgctgaccaccgaggagatcctgacactggccaggctcttcgtcaaggagggtatagataagatccgtctgacgggcggggagcctttgattcgccccgacgttgtcgacattgttgctcagctgcagcgacttgaaggacttcgaactatcggggtgaccactaacgggataaatctggcacgtctgttgcctcaactgcagaaagctggcctgtccgccatcaacatttcactggatactctggtgcccgccaagtttgagttcatagtgcgcaggaaaggctttcacaaagtgatggaagggatccacaaggctatagagttaggatacaaccctgttaaagtcaactgtgttgtgatgcgcggcctgaatgaggacgagctgcttgattttgccgctctcaccgaagggctcccccttgacgtccgatttatcgaatacatgcctttcgacggtaacaaatggaacttcaagaagatggtgtcctataaagagatgctcgacacggtgagacagcaatggccggagctggaaaaggtcccagaagaagaaagcagcaccgccaaagctttcaaaattccggggttccagggacaaatcagctttattacctctatgtctgagcatttttgcggcacctgcaatcgtctgaggattacagccgacggcaatctgaaagtgtgcctgtttggtaacagcgaggtgagcctgcgcgatcacctgagggcaggcgcttccgagcaggagttattgcgtatcattggtgccgctgtgggaagaaagaaacgccagcatgccggaatgttctcaatttctcagatgaagaatcgccccatgatactgatcgggggatag

SEQ ID NO: 195630 - DNA, 1158 bp, synthetic construct
  misc_feature 1..1158: note = Description of Artificial Sequence: Synthetic coding sequence
  source 1..1158: mol_type = other DNA
atgtggaagagctggaagctgcggaccgacgtgcgggtgcgggagggcgccggcggtagcccctgtgcatcctcgcagcctgggtccaggggcccctgttttctgccagggttgagcagccaggaggtgagcaggagacgtcagttcctcagagaacacgccgcccctttctctgcttttctcaccgatagctttggtcggcagcactcctatctgagaatttcactgacagagaaatgtaacttgagatgccagtactgcatgcctgaggagggggtgccactgacaccaaaggcgaatctgctgacaaccgaagagatccttacgctggccagattgtttgtcaaagagggtatcgacaagattcggctcacgggcggcgaacccctgatacggcccgatgttgtggacatcgtggcccagctccagcgtctggagggcctacgtactataggagtgacgacaaacggaatcaacctggccagactgttacctcagctccagaaagcgggtctttccgcgatcaatataagcctggacacacttgtacccgccaaattcgagttcattgtgaggcggaagggctttcacaaggtgatggagggcatccacaaggcaattgagctgggatacaaccctgttaaggtgaattgcgtagtcatgcgaggtctaaacgaggacgagctattggatttcgctgctctaacagaaggacttccgctggacgtgcgatttatagagtacatgccttttgacggtaacaaatggaactttaaaaaaatggtgtcttataaggagatgctggatactgttcgccagcagtggcccgagctggagaaggttcccgaggaggagagcagtacagccaaagcatttaaaattcccgggtttcaggggcaaatttcattcatcacttctatgtcagagcatttttgcgggacctgcaacaggctgaggatcacagccgacggaaatctgaaggtctgtctgtttggaaactccgaagtatcccttcgggaccatttgagagcaggtgcctctgagcaggagctgcttcgcattatcggcgccgccgtcgggagaaaaaaacggcagcatgccggaatgttttccatttcccagatgaagaatcgacctatgatcctaatcggaggctag

SEQ ID NO: 195631 - DNA, 1158 bp, synthetic construct
  misc_feature 1..1158: note = Description of Artificial Sequence: Synthetic coding sequence
  source 1..1158: mol_type = other DNA
atggccgcccggcccctgagccggatgctgcggcggctgctgcggtctagtgccaggtcctgtagctccggcgcccctgtcacccagccgtgcccgggcgagtctgccagggccgctagtgaggaggtgtcacgacgccgacaatttctgagggagcacgcagcccctttttcagcattcttaacagatagctttgggagacagcacagttatctgagaatttcactgaccgagaaatgcaatttacgttgtcaatactgcatgcctgaagagggagtcccgctgacccccaaagctaatctcctgaccaccgaagagatcctaactctggccaggctcttcgtcaaagagggaatcgataagatcaggctgaccgggggggaacccctaatcagacctgacgttgtcgatattgttgctcagctgcagcgcctcgagggactgcggaccattggagttacaaccaacggaattaacctcgcccgtctactcccacagctgcagaaggctggcctatccgcaatcaacatttcccttgatacccttgtgcccgccaaattcgaattcatcgtccgcagaaagggttttcataaagtgatggagggcatacacaaagccatcgagctgggttacaacccagtgaaagtcaactgtgtggttatgaggggtttaaatgaggatgagctgctggacttcgccgcgctgactgaagggttacctttggacgtcaggttcattgagtacatgccgttcgacgggaacaaatggaatttcaagaagatggtctcgtacaaggaaatgttagacactgtgcgtcagcagtggccagagctcgagaaagtgcccgaggaggagagctccactgccaaagccttcaagattcctggtttccagggacagatcagctttatcacgtctatgtcagaacatttctgcggcacctgtaatcgcctgcggatcacggcagacggcaacctcaaagtctgtctcttcggcaattccgaggtgagcctgcgagaccatctaagagctggtgcaagtgaacaggagttgctgcgcatcatcggtgctgccgtgggtcgtaagaaaaggcagcacgcaggcatgttctccatctcgcaaatgaaaaacaggccaatgatcctgatcggcggctag

SEQ ID NO: 195632 - DNA, 1602 bp, synthetic construct
  misc_feature 1..1602: note = Description of Artificial Sequence: Synthetic coding sequence
  source 1..1602: mol_type = other DNA
atgcccgaggagggcgtgcccctgacccccaaggccaacctgctgacaactgaggagatcctgacactggcacggttgtttgtgaaagaaggtatcgataagatccgccttacaggaggagagccgttgattcggcccgacgtggtcgatatcgttgctcagttgcagagactcgaggggctgcgtaccatcggtgtgaccacaaatggaattaatttggctaggctgcttccccaactccagaaagctgggttgtctgctatcaacatttcactagatactctggtgcccgctaagtttgagtttatcgtgagaagaaaggggttccacaaggttatggagggaatacataaagctatcgaactgggctataatcctgtgaaggtgaattgcgtcgtgatgagaggacttaacgaggatgagctgctggacttcgcagcattaacggaaggccttcctctggacgtcaggtttatcgagtatatgccgtttgacggaaacaagtggaatttcaagaagatggtgtcatataaggagatgcttgacacggtccggcagcaatggcccgaactggaaaaggtccctgaagaggaatctagcactgcgaaggcattcaagatacctgggttccaggggcagatatcttttataacaagcatgtccgaacatttttgtgggacgtgcaaccgtcttcggatcaccgccgacggtaacttgaaggtctgcctgtttgggaatagcgaggtcagcctccgggatcatctgcgggccggcgcctccgagcaagagttgttgagaattataggtgctgcagtgggtcggaaaaagagacaacacgctgagcttttcttgatgttccccaattcaccgcccgcaaacccctcaattttttcctgggacccactgcacgtccaaggcctccggccccgcatgtctttttcaagccaggttgccacactgtggaagggttgtcgcgtgcctcagacaccaccgctggcgcagcagcgccttgggtccgggtccttccagaggcattacacatcaagggcagactccgacgctaactctaaatgcttgtcccccggaagctgggcttccgccgcacctagcggcccccagctcacatccgagcaactcacccatgttgacagtgaaggccgcgctgccatggtggatgtcggacggaagccggatactgagagagtcgctgtggcgagcgctgtcgtgttactagggccagtagcctttaaactagtacaacagaatcagcttaaaaagggcgatgctttagtggttgcccagcttgccggggttcaggccgctaaggtgacttcacagctaattccattgtgccaccacgtagcgctgtcacatatccaggtccagctggagcttgattccacacggcacgcagttaagatccaggcctcctgcagggctaggggcccgacaggcgtcgagatggaggctctgacgtctgctgcagtggcagcattaactctgtacgacatgtgcaaggccgtgtcaagagatattgtactagaggagatcaagctgatatccaagaccggcgggcagcggggagattttcaccgggcctag

SEQ ID NO: 195633 - DNA, 1911 bp, synthetic construct
  misc_feature 1..1911: note = Description of Artificial Sequence: Synthetic coding sequence
  source 1..1911: mol_type = other DNA
atgtggaagagctggaagctgcggaccgacgtgcgggtgcgggagggcgctggtggatctccctgcgctagcagtcagccagggagtcgtggtccatgctttcttccaggcctgtcttctcaggaggtctcccgcaggagacagttcctacgagagcacgctgcaccattctccgcctttctgaccgactcattcgggcggcagcactcatacttgcgtatttctcttaccgaaaaatgtaaccttcggtgccagtactgtatgcctgaggagggcgtgcctctgacgccaaaagcgaatcttcttacgacagaggagatcctgactttagcacggctcttcgtaaaagaaggaattgataaaatcagactaaccggcggagagcctttgattcgacctgacgtggtagacatcgtggcgcagttgcagcggctggaaggtcttcgcactataggagtgactacaaatggcatcaacttagctcgcctcctcccccaattacagaaggctggcctcagcgccatcaatatctctctggacaccctagtccccgccaagtttgagttcatcgtgcggcggaaggggttccataaagttatggaaggaatccataaggctattgaattggggtacaatccagtcaaggtgaattgcgtcgtgatgcgaggccttaacgaagacgaattgcttgactttgccgccctgacagaaggactgcctttagatgtccgtttcatcgagtacatgcccttcgacggaaataaatggaactttaagaagatggtcagctataaggagatgctcgatacagtccgtcagcagtggcccgagctggaaaaagtgcccgaagaagaaagctccaccgcaaaggctttcaaaatccccgggtttcagggccagatcagcttcattacctcgatgtcagagcacttctgcggcacatgtaaccggctccgcattaccgcagatggcaacttgaaggtatgtctatttggaaactcagaagttagcctgcgagaccacctgcgagccggagcatccgagcaggaattactgcgtattatcggggctgcagtcgggcgaaagaaacgacagcacgccggcatgttttcaattagccaaatgaaaaatcgccccatgatcttgatcgagctcttcctaatgtttccaaattcgcctcctgccaacccctcaatatttagctgggacccgctacacgtgcaaggcctcagaccccgaatgagcttctcatctcaggtcgcgaccctgtggaagggctgcagagttccgcagacaccgccattggcccagcagcgcctgggctccggatcctttcagagacattatacgtctcgcgcagacagtgacgcaaactcgaagtgtctcagccccgggagttgggcctctgccgccccctctggcccccagctgacaagcgagcaactgacacatgtcgactctgaggggcgcgcggccatggtagatgtggggagaaagcccgacacagaacgcgtggccgtggcctcggcggttgtgcttctgggacccgtcgctttcaagctcgttcaacagaatcaactgaagaagggggatgccctcgtggtcgctcagctggccggtgttcaagcagccaaagtcacatcgcagttgatcccgctctgccatcacgtggctctttcccacatccaggttcaactggaactcgacagcacacgacatgccgtgaaaattcaagcctcttgtcgggcccgtgggccaactggggttgaaatggaggctttgacgagtgcagcagtggctgccctcactctgtacgatatgtgcaaagcggtttctcgggacatcgtgctggaggagattaaactaatttccaaaacaggggggcaaagaggggactttcaccgggcctag

SEQ ID NO: 195634 - DNA, 1071 bp, synthetic construct
  misc_feature 1..1071: note = Description of Artificial Sequence: Synthetic coding sequence
  source 1..1071: mol_type = other DNA
atgtggaagagctggaagctgcggaccgacgtgcgggaggtgagccggcgccggcagtttctcagggaacacgccgctcctttctccgcttttctgactgattcatttggcagacagcacagttatttgcgcatcagcctcacagaaaaatgcaatctccgctgtcaatactgtatgccagaagagggcgtgcctcttactcctaaggcgaacctgcttacgactgaggagatcttgactttagcacgattgttcgtaaaagagggtattgacaagatacgcctgacagggggcgaacccctcatccggccagacgttgtggacatagtggcgcagctgcagcgcctcgaaggcttgagaacaatcggcgtgacaacgaacggtattaatctggctagattgctgcctcagttacagaaggcaggcctctctgccatcaatatctctttagacaccctcgttccagccaagtttgagtttatcgtaagacgaaaaggttttcacaaggtcatggaaggcatccacaaagccattgaactgggctacaatcctgtgaaggtcaactgtgtggtgatgagaggccttaatgaggacgagctgctggatttcgcagcacttaccgagggtcttccacttgacgtgagattcattgaatatatgccatttgacgggaataagtggaattttaaaaagatggtaagctataaagagatgcttgacaccgttcgccaacagtggcccgagcttgaaaaggtcccagaggaggaatcgtccaccgccaaagcttttaagattcccgggtttcagggccagatctcatttatcacatccatgagcgagcacttctgtggtacttgtaacagacttcgcatcacggccgacggcaatctcaaagtttgtctcttcggaaactctgaggtgtccctgagagaccatcttagagcaggcgcttctgaacaggagctcctgagaattatcggcgctgccgtcgggagaaaaaagcgtcagcatgccggaatgtttagcattagtcagatgaagaatcgaccaatgatcctgattggcggctag

SEQ ID NO: 195635 - DNA, 267 bp, synthetic construct
  misc_feature 1..267: note = Description of Artificial Sequence: Synthetic coding sequence
  source 1..267: mol_type = other DNA
atggtgcccctgtgccaggtggaggtgctgtacttcgccaagagcgccgaaattacaggggtgagatcggaaaccatttcagtcccccaggaaatcaaagcccttcagctgtggaaagagatcgagacccgccatcctggacttgcagacgtgcggaaccagatcatattcgctgtccgccaggagtacgtagagctcggcgatcagctccttgttctgcagcccggagacgagattgcagtcatccccccaatcagtggaggctag

SEQ ID NO: 195636 - DNA, 567 bp, synthetic construct
  misc_feature 1..567: note = Description of Artificial Sequence: Synthetic coding sequence
  source 1..567: mol_type = other DNA
atgagcagcctggagatcagcagcagctgcttcagcctggagaccaagctgccactctctccaccgcttgtggaggactctgcttttgaaccatccaggaaagacatggatgaagtggaagagaaatccaaagacgtgataaattttaccgcagaaaagttgtcggtggacgaagtcagccagctggttatcagccccctctgtggcgctatcagtcttttcgtggggacgactcggaataactttgagggcaagaaggtcatttccctggagtacgaagcttatctgccaatggccgaaaatgaggttcggaaaatttgttctgacatccgccagaaatggcctgttaagcacattgcagtcttccataggctaggtctggtgcccgtgtccgaggccagcatcattatcgctgtgtcaagcgctcaccgcgccgccagcttagaggcagtgtcttacgcgatcgatacgctgaaagccaaggtacctatttggaagaaggaaatctatgaagagtctagtacttggaaaggcaacaaagagtgtttttgggcaagtaacagttag

SEQ ID NO: 195637 - DNA, 267 bp, synthetic construct
  misc_feature 1..267: note = Description of Artificial Sequence: Synthetic coding sequence
  source 1..267: mol_type = other DNA
atggtgcccctgtgccaggtggaggtgctgtacttcgccaagagcgccgagataaccggagtgcggagcgaaaccatttctgttccacaggagataaaggcgctgcaactctggaaagagattgagactaggcaccccggacttgctgatgttaggaatcagatcattttcgcagtgaggcaggaatatgttgagctgggcgaccagcttctggtcctgcaaccaggagatgagattgcagtcatcccacccatttcagggggttag

SEQ ID NO: 195638 - DNA, 267 bp, synthetic construct
  misc_feature 1..267: note = Description of Artificial Sequence: Synthetic coding sequence
  source 1..267: mol_type = other DNA
atggtgcccctgtgccaggtggaggtgctgtacttcgccaagagcgctgaaataacaggggtacgctctgaaactatttcagtgccacaagagattaaggccttgcagctgtggaaggagattgaaactcgtcatcccgggctggccgatgtgcgcaaccagataatcttcgccgtgaggcaggagtacgtcgagcttggcgaccagctcctggttctgcagccaggggacgaaatcgccgtaatcccccccatttcaggaggctag

SEQ ID NO: 195639 - DNA, 267 bp, synthetic construct
  misc_feature 1..267: note = Description of Artificial Sequence: Synthetic coding sequence
  source 1..267: mol_type = other DNA
atggtgcccctgtgccaggtggaggtgctgtacttcgccaagagcgcagagatcactggagtgaggagcgagaccatttcagtgccccaggaaatcaaggcattacagttgtggaaagaaattgaaacacgtcaccccgggttagcagacgttcgcaatcagattattttcgccgttcggcaggagtacgttgagctgggggatcaactgctagtgctgcagccgggcgatgaaatagccgttatacctcctatttctggtgggtag

SEQ ID NO: 195640 - DNA, 462 bp, synthetic construct
  misc_feature 1..462: note = Description of Artificial Sequence: Synthetic coding sequence
  source 1..462: mol_type = other DNA
atgagcagcctggagatcagcagcagctgcttcagcctggagaccaagttaccactgagccctcctttggtggaggatagcgcgtttgaaccctccagaaaagacatggacgaggttgaagagaaatctaaggacgtcatcaattttactgctgagaagctcagtgtcgatgaggtgagccagctggtgatctcacctttatgcggggccataagtttgttcgtagggaccacccgtaataactttgaaggcaagaaggtgatcagtttagaatacgaagcttatttaccaatggccgagaatgaagtgcggaaaatttgcagtgacataaggcagaagtggcccgtcaaacacatcgcggtgttccaccgactgggccttgtgcctgtgtctgaggccagtatcattattgcagttagctccgcccaccgcgcagcatcactcgaggccgtctcttactag

SEQ ID NO: 195641 - DNA, 1644 bp, synthetic construct
  misc_feature 1..1644: note = Description of Artificial Sequence: Synthetic coding sequence
  source 1..1644: mol_type = other DNA
atggaggtgggcggcgacaccgccgcccccgcccccggcggcgccgaagaccttgaggatacccagttcccatccgaggaggcccgggagggggggggggtgcatgccgttcccccggatcccgaagacgaagggctggaggagaccgggagcaaggataaagaccagccccccagtccttcaccccctccacagtccgaagccttgtcctccaccagccggctctggtctcccgccgcccctgaaaactcccccacctgtagtccagaatcatcgagcgggggccagggaggagatccttcagacgaagagtggcgttcgcagagaaagcatgttttcgtgttgtctgaggctggcaaaccaatctacagccgctatggaagcgtggaggctctaagtgccactatgggggtgatgaccgctctggtgtcatttgtgcagtctgccggcgacgccattcgggccatctacgccgaggaccataaactcgtgtttctgcagcagggccctctgctgttagtagccatgtcacgcacctcccagagtgctgcccagctgcgaggtgagctgctggctgtgcacgcacaaattgtgtcaacactgacgagggccagcgtggctcggatattcgctcacaagcaaaactacgacctgcggcgactgttagctggcagcgaaaggacactggatcggttgctggatagcatggaacaggatccaggcgcgctgctcctgggagctgtgcgctgtgtcccactcgcccggcctcttcgggacgcattgggcgctcttctgaggagatgtacagcccctggactggcactgagcgttctggcagtaggcgggcggctgataactgccgcccaggagcgtaatgtgctcgcagaatgtcgcctcgatcccgccgacctacagctcctcctcgactgggtgggcgctcctgcctttgcggccggggaggcctgggccccagtgtgcctgccacggtttaaccccgatggcttcttttacgcatacgtggctcggctcgacgctatgccagtctgcctgctgctgctgggcacacagcgcgaggctttccacgcaatggccgcttgcagacgtctggtggaagatgggatgcacgcccttggcgccatgcgagcgctaggtgaagccgccagcttcagcaacgcttcctctgcaagtgctccagcttactccgtgcaggctgtgggtgcccccggattgaggcatttcctgtataaacccctggacattccagaccatcatagacaattgccacaatttacatctccggaactcgaagctccatattccagggaggaggaaaggcagcggctatctgatctgtaccatagactgcatgcccggttacacagcacatccagacccctgaggctgatctatcacgttgcagagaaagagacactgctagcttgggtgacaagcaaatttgagctttacacatgcctgtcccctctagtaacaaaggctggagcaatcctggtcgtaacaaaactgttgaggtgggtcaagaaagaagaggaccgactgtttattcgatacccgcctaaatattcaaccccgcccgccacttcaacagaccaggcagctcataacggactctttacaggcctatag

SEQ ID NO: 195642 - DNA, 438 bp, synthetic construct
  misc_feature 1..438: note = Description of Artificial Sequence: Synthetic coding sequence
  source 1..438: mol_type = other DNA
atggaggtgggcggcgacaccgccgcccccgcccccggcggcgccgaggacctggaggacactcagttcccttcagaggaggctcgtgaaggcggaggggtgcatgctgtgccaccggatccagaagacgagggactggaagagaccggctctaaggacaaggatcaaccacctagcccgagccctcccccccagtccgaagctctgagctcaacctctcgcctctggtctcccgcagcccccgagaatagccccacctgttctcctgagtcctcatctgggggccagggcggcgatccttccgatgaagaatggaggtctcagcgtaacggctgccgcacgtgtacgactgcctgtatgttagtgtctacagcccctcccgatccctgtgctagttttacgacttggcttaggaggagacactactggccaggttag

SEQ ID NO: 195643 - DNA, 1317 bp, synthetic construct
  misc_feature 1..1317: note = Description of Artificial Sequence: Synthetic coding sequence
  source 1..1317: mol_type = other DNA
atggaggtgggcggcgacaccgccgcccccgcccccggcggcgccgaagacttggaggatacccagttcccttccgaagaggctagagaaggtgggggagttcatgctgtgccaccagacccagaggatgaaggcttagaggagaccgaggaccacaagttagtgttcctgcagcagggcccccttttgcttgtggccatgtctcggaccagccagtcagccgcgcagctgaggggagagctgctagcagttcatgctcagatagtgtccaccctgacccgggccagcgtcgcacgtatctttgcccacaagcagaactatgacctaagacgtctccttgccggctctgagcgcacattggacaggctgctagattcaatggagcaggaccctggtgcactcttactgggtgccgtgcgatgcgtgccactggcccgccctctcagagacgccctaggtgcccttcttaggcgttgcacggcccccggattggctctgagcgtgctggcggtgggtgggcggcttatcaccgcagctcaggaacgaaacgtcctggctgaatgccgactggatcccgccgatctgcagctcctgctcgattgggtaggggcccctgcttttgctgcaggagaagcctgggctccagtttgtctgcctagattcaacccagacggcttcttttacgcttatgtcgcaagactcgatgctatgcctgtttgcttgcttctgttgggtacccaacgcgaagctttccacgccatggccgcgtgtagacgattggttgaggacggaatgcatgcactcggggctatgcgcgccctaggggaggcagcgtcctttagtaatgctagttctgcaagcgcccctgcctactctgtgcaggccgtgggggcccccggtctccgccacttcctctacaaacccctggatattcctgatcaccaccgacaactaccacagtttacttcgcccgagttagaggctccatattcccgagaggaggaacggcaacgcctttctgacctgtatcaccgcctccacgcccgccttcattcaacaagccgccccctgcggttgatttaccacgtggccgagaaagaaacgctcctcgcttgggtgaccagcaagttcgagctgtatacctgcctgtctccccttgttacaaaggctggcgccatccttgttgtgaccaaattgttgcggtgggtaaaaaaggaagaagataggctgtttatcaggtacccgccgaaatatagcaccccgcctgccacaagcactgaccaggctgcccacaatggcctgttcacggggctctag

SEQ ID NO: 195644 - DNA, 1206 bp, synthetic construct
  misc_feature 1..1206: note = Description of Artificial Sequence: Synthetic coding sequence
  source 1..1206: mol_type = other DNA
atggtgagcggccagctgcggttcggcgtgaagaccgaggaccacaagcttgtatttttgcagcaggggcccctgctcctggtggcgatgtcacggaccagtcagtctgcagcacagttgcgcggggaactgctggcagtacatgcacagatcgtgtccacgctgacaagagcctctgtcgcccggatctttgcgcacaagcagaattatgacctgcggcggctactggcaggcagtgagcggacgttagaccggctgttagactcaatggagcaggaccccggggctctgctcctgggggctgtgaggtgtgtacctctggcacgcccactgcgcgatgctttgggggcactgctgcggcggtgcactgccccaggcctggcactgtccgtgttggccgtgggtggccgtctcattactgctgcccaggaaagaaatgtgctggccgaatgccgtctggacccagccgatttgcagcttctgctcgattgggtaggggcacccgccttcgccgcaggagaagcatgggcacctgtgtgtctgcctaggttcaatcctgacggtttcttttatgcttacgtggcgagactagacgccatgcccgtgtgcctcctgctgctgggaacacagcgggaggccttccacgctatggcagcttgccgacgcctggtggaagatggcatgcacgctctgggtgcaatgcgcgccctgggagaggccgcctctttttcaaacgctagctctgcttcggcccctgcctactcagtacaggccgtcggcgccccgggcttacgccactttctttacaaaccactcgacatccccgatcatcaccgtcagcttccccagtttacaagcccagaactggaagcaccttacagcagggaagaagaacgccaaaggctgagcgacctttaccatcggctacatgctaggctgcattccaccagcaggcctctccgtctgatctatcacgtagccgagaaagagactttgctggcttgggtgacaagtaaatttgaactgtacacctgcctctcgcccttagtgacaaaagcaggagcgatactggtggtcaccaaactgctgagatgggtgaaaaaagaggaggaccgcctgttcataagataccctcctaaatattctacccctccagcgacctccactgatcaagctgctcataacggattgtttaccggtctttag

SEQ ID NO: 195645 - DNA, 1584 bp, synthetic construct
  misc_feature 1..1584: note = Description of Artificial Sequence: Synthetic coding sequence
  source 1..1584: mol_type = other DNA
atggagaaccaggagaaggccagcatcgccggccacatgttcgacgtggtcgtcatcgggggcggcattagtggcctatccgccgccaaactccttaccgaatatggggtgagcgtccttgtcctggaggcccgcgaccgcgttggcggacgtacctacaccatacgtaacgagcatgtggactatgtcgacgttggcggggcctacgtgggccccacacagaacagaatcctgaggcttagtaaagagctgggcattgagacctataaggtcaatgtatccgaaagactagtccagtatgtcaaagggaagacctacccattccgaggagcttttcctcccgtgtggaatcccatcgcatatttggactataataacttgtggaggactattgataacatgggcaaggagataccaaccgacgcaccttgggaggctcaacatgcagacaaatgggataaaatgaccatgaaggaactgatcgataagatatgttggactaaaacggccaggaggttcgcctatctgtttgtgaacattaacgtgacatctgagccccacgaagtctcggctttgtggttcctttggtacgttaaacagtgtgggggtaccacccgcatctttagtgtcactaacgggggccaggagcggaagttcgtgggggggagtgggcaggtgtcagaaagaattatggacctgctgggggaccaggtgaaactcaaccaccccgtgacacacgtggatcaatcatcagataacattataatagagaccttaaatcatgagcactacgagtgtaaatacgtgatcaacgcgattcctccaaccttgacagcaaagatacatttcagaccagaattgcccgccgaacgtaatcagttgatacagcggctgcctatgggcgctgttatcaaatgcatgatgtattataaggaagcgttctggaaaaagaaggattactgcggctgtatgatcatagaggacgaagatgctcctatctctatcacactggacgatacaaagccagacggttctctgcctgctatcatgggctttatcttggctcgcaaggcagatcgtctcgcaaagttgcataaggagattcgcaaaaagaagatctgtgaactatacgctaaggtgctgggctcccaagaagccctgcatccggtacattacgaggagaagaactggtgcgaagagcagtactctggtgggtgctacactgcatacttccctcctggaatcatgacacagtatgggcgcgtcattcggcagccagtgggtagaattttcttcgcaggaactgagacggccaccaagtggagcggatacatggagggggccgtggaggccggcgagcgggccgcacgggaagtcttaaacggactggggaaagttactgaaaaagacatctgggtgcaagaacccgagagcaaggatgtacctgcggtggaaatcacccacaccttctgggagcgcaatcttccttccgtgagtggactgcttaaaatcatcggattttctacaagcgtgaccgcgctcggatttgtgctttacaagtataagctgctaccccgatcctag

SEQ ID NO: 195646 - DNA, 1185 bp, synthetic construct
  misc_feature 1..1185: note = Description of Artificial Sequence: Synthetic coding sequence
  source 1..1185: mol_type = other DNA
atgggcaaggagatccccaccgacgccccctgggaggcccagcacgcagataagtgggacaaaatgactatgaaagagctgatcgataagatatgctggacaaaaacagccaggcgctttgcttatctttttgttaatatcaacgtgacctccgagccccacgaggtatcagcactttggtttctctggtacgtgaagcagtgcggagggacaacaaggatctttagtgtgacgaacggcggtcaagaaagaaagttcgtgggcggcagcggccaagtatctgagcgcataatggacttgctgggagatcaggtgaaacttaaccaccccgtgacacacgtggatcaatccagtgacaacatcatcatcgaaacccttaatcacgagcactacgagtgcaagtacgttataaacgcgatcccaccaaccctcactgccaagatccactttcgaccagaactccctgccgaaagaaaccagctcattcaaagactgcccatgggggcggtgattaagtgcatgatgtactacaaagaagcattctggaaaaagaaagattactgtggctgtatgataatcgaagacgaagatgctcctatcagcatcaccctggacgacacaaaaccagatggatccttgccggcgattatgggctttattctggcacgcaaggccgacaggctcgccaagctgcacaaggagattcgcaagaagaagatatgcgaattgtacgccaaggtactcggatcacaggaggctctgcatcccgtacactacgaggagaagaattggtgcgaagagcagtacagcggcggctgctacactgcatacttccctcccggaatcatgacccaatacggccgggtaatacggcagccagtcgggaggattttcttcgctggaacagagacagctactaagtggtccgggtacatggagggagccgttgaagccggtgaacgggcagcgcgcgaggtcctcaacggcctggggaaggttaccgagaaggacatctgggtgcaagagcccgagtccaaggatgtccctgctgttgaaatcacccacaccttttgggaaagaaacctgccctcagtctccggactgctgaagatcatcggtttcagcacctctgtgaccgctctcggcttcgtgctgtacaaatataagctgctgcctaggagctag

SEQ ID NO: 195647 - DNA, 1563 bp, synthetic construct
  misc_feature 1..1563: note = Description of Artificial Sequence: Synthetic coding sequence
  source 1..1563: mol_type = other DNA
atgagcaacaagtgcgacgtggtggtggtgggcggcggcatcagcgggatggcggccgccaagctgctccacgacagcggacttaatgtcgtcgtgttagaggctcgagacagagtgggcggacgcacatacacgttgcggaaccagaaagtgaagtacgtcgatctgggcggctcatatgtgggccctacccagaacagaatcttgcgattggcgaaggaactgggccttgaaacttataaggtaaatgaggtcgaacggcttatccaccacgtgaagggtaagtcctacccattcagggggccattccccccagtgtggaacccaataacttacctggatcacaacaacttttggcggactatggatgatatggggcgggagatcccaagtgatgccccctggaaagctcccctggcggaagagtgggacaacatgacgatgaaagagctgctggacaagttgtgttggaccgagagcgcaaaacagctagccacattgttcgtgaatctgtgcgtcactgccgagacccatgaggtttccgcactgtggtttctctggtacgtcaagcagtgtgggggcacaactcgcatcatttcaacaaccaatggcggacaagaaaggaagtttgtgggtggttctggccaggtttcagagcgtataatggatcttttgggcgaccgtgttaagttagagagaccagttatatatattgaccagacgagggaaaacgttctggtcgaaacgctgaatcacgagatgtacgaagctaaatacgtgataagcgcaatcccgccaacactgggaatgaagatccacttcaatccacctctccctatgatgcggaatcagatgattacacgcgtgcccttgggaagcgtgatcaagtgcattgtatattacaaggaacccttctggagaaaaaaggattactgcggcaccatgatcatcgacggcgaggaagctcctgtagcctatactcttgacgacacaaagcccgagggaaattacgctgctataatggggtttatccttgctcacaaggcacgtaagctcgcccggctgactaaggaggaaagattgaagaagctttgtgaactgtacgcaaaggtgctgggcagtttggaggctctggagcccgtacactatgaggaaaaaaactggtgtgaggagcagtattccggtggctgttatactacatatttccctccgggtatactaacccagtacggccgcgttctgaggcagcccgtggatcgaatctattttgcaggcacggagaccgccacccattggagcggctacatggagggagcggtagaggctggtgagagagcagctagagagattctccacgcgatgggtaagatccctgaggacgagatttggcagtccgagcctgaaagtgtggacgtccccgcgcaacctattactactacctttttggagagacacctgccaagcgtgcctggactgcttcgcctaatcggacttacaacaattttttcggccactgctctaggatttctggcccacaaacgggggttactcgttagggtatag

SEQ ID NO: 195648 - DNA, 1515 bp, synthetic construct
  misc_feature 1..1515: note = Description of Artificial Sequence: Synthetic coding sequence
  source 1..1515: mol_type = other DNA
atggccgccgccaagctgctgcacgacagcggcctgaacgtggtggtactggaggcccgcgatagggtggggggacggacctacaccttgcgcaatcagaaggtaaagtatgttgatctgggtggcagctacgttgggcctacccagaacaggattctacggctggcaaaagaattaggacttgagacatataaggtaaatgaagtggagaggttgattcaccacgtgaagggtaaaagttaccccttcagaggccctttcccaccggtttggaacccaatcacgtatctcgaccacaataacttctggagaaccatggacgatatgggccgcgagattcctagtgatgcaccctggaaggctccacttgccgaggaatgggataacatgaccatgaaagaattactagacaagctatgctggacggaatccgccaaacagctggcaactctcttcgtgaacctgtgtgtcacagcagaaacccacgaggtgagcgctctgtggtttctgtggtacgtaaaacagtgcggagggactacgcgcataattagcacgacaaacggcggtcaggagcgcaagttcgtcggagggagcggacaagtttctgagagaatcatggatctgcttggcgaccgcgtgaagctggaacggcctgtcatctacatcgaccagacaagagaaaacgtgctagtggaaacactgaatcatgaaatgtacgaagcaaagtatgtaatctcagcaatacccccaaccctcggcatgaagattcacttcaacccccccctcccaatgatgagaaaccagatgatcaccagggtccctttaggatctgtcatcaaatgtattgtttactacaaggagccattttggaggaagaaagactactgcggtaccatgatcattgatggcgaggaagcacctgtagcatatactttggacgacacaaagcctgagggtaattacgcggcaatcatgggattcatccttgcgcacaaggcccgaaagctggcaaggttgactaaagaggagagacttaaaaaactgtgtgagctctacgccaaggtgcttggctcactagaagcacttgagccagtgcactacgaagagaagaactggtgcgaagaacagtacagcggcggatgctacacaacctacttccccccggggattctgactcagtatggtcgggtgctgaggcagcccgttgacagaatttactttgccggaaccgagaccgctactcactggagcggttacatggagggcgccgtcgaagccggtgagcgggcggcaagagaaattctgcacgcgatggggaagatccccgaagacgagatttggcagtctgaacccgaaagtgtcgatgttccagctcagccgattacgacaactttcctggaaaggcacctgccttctgtgcctggcctcctacgccttatcggccttactacaatcttctcagcaactgcattgggcttcctggctcacaagagaggcctcctcgtgcgggtgtag

SEQ ID NO: 195649 - DNA, 1236 bp, synthetic construct
  misc_feature 1..1236: note = Description of Artificial Sequence: Synthetic coding sequence
  source 1..1236: mol_type = other DNA
atggccgccgccaagctgctgcacgacagcggcctgaacgtggtggtgctggaagctcgggacagagttggaggtaggacgtataccttaagaaaccaaaaggtgaagtacgtggatctgggggggtcatacgtcgggccgactcaaaacaggattcttagactggccaaggagttgggtttggagacttataaggtgaacgaggtggagaggctgattcatcatgtgaagggtaagtcctatccttttcgcggcccctttccgcctgtctggaatccaatcacttatctagaccacaacaatttctggaggaccatggacgacatggggcgagaaattccctcagatgcaccttggaaggccccactcgccgaagagtgggacaatatgacaatgaaggagctgctggacaagctctgttggaccgagtctgccaaacagttggccacactgtttgtcaacctatgcgtaacagccgaaactcacgaggttagtgccctgtggtttttatggtatgtgaaacagtgcggcggcaccactaggataataagtacaacaaatggcggccaggagcggaagtttgtcggaggcagcggtcaagtcagtgagaggatcatggacctgctcggcgatagagtgaaactagagagaccggtgatttatattgaccagacaagggagaatgtcttggtggaaactctgaatcatgaaatgtatgaagctaagtacgtgattagcgctatcccgcctacccttggaatgaagattcactttaatcccccgttgcctatgatgcgtaaccaaatgatcacaagagtccccctgggctcggttataaaatgcatagtgtactataaggaaccattttggcggaaaaaggattactgtggaacaatgataatcgatggagaggaggcgcccgttgcctatacactggatgacaccaaacccgagggcaattatgccgcaattatggggtttatactggcccacaaggccaggaaattagctaggcttacgaaggaagagagattgaagaaactctgtgagttgtatgccaaagtccttggatctctagaggccctggaagggagcacgccagcttctggacaggacctcttatgcagacatagggactgccacactctggagcgcctgcacggaggtggttgtagggggcgcggagaatcctctccccgggaccctgcctgccacggagaagacagtcgcggttag

SEQ ID NO: 195650 - DNA, 741 bp, synthetic construct
  misc_feature 1..741: note = Description of Artificial Sequence: Synthetic coding sequence
  source 1..741: mol_type = other DNA
atgttcgccccccggctgctggacttccagaagaccaagtacgccaggttcatgaaccacagagttccagcccacaagaggtatcaacccactgagtacgagcacgccgccaattgcgcaacccatgcgttttggataattccctccatcctggggtcttcaaacctgtacttcctcagcgatgacgattgggagacgatttcagcgtggatctacggtctcggcctctgtggcttatttgtggtcagcaccgtgttccacacaatcagctggaagaagagccatctgaggatggtggagcactgtcttcacatgttcgatcggatggtgatttacttctttatcgccgcgagttatgctccatggctcaacctccgcgagctgggcccgtgggctagccacatgcgctggcttgtgtggataatggccagcgttggaacgatatacgttttcttctttcacgaacggtataaacttgtcgaactcctctgttacgtcgtcatggggttctttcccgcactggtgatcttgagcatgcctaacaccgaggggatatgggaactggtgaccggaggcgtgttttactgcctgggaatggtcttctttaagtccgacggacgcattccattcgcgcacgccatatggcatctgttcgttgcatttggcgcaggcactcactattatgccatttggagatacctctatctgccatccactctgcagactaaggtttctaagtag

SEQ ID NO: 195651 - DNA, 813 bp, synthetic construct
  misc_feature 1..813: note = Description of Artificial Sequence: Synthetic coding sequence
  source 1..813: mol_type = other DNA
atgttcgccccccggctgctggacttccagaagaccaagtacgcccgctttatgaatcatagagtccctgcgcataaaagataccagcccactgagtacgaacatgctgccaactgcgctacccacgccttttggatcattccttcgatactgggaagctctaatctctatttcctgtccgatgacgactgggagacgatcagtgcctggatttatggcctcggcctctgcggcctgttcgttgtttccaccgtctttcacaccatctcttggaagaaatcacaccttcggatggtggaacactgtctgcatatgttcgaccggatggtaatttacttctttattgccgcaagctacgccccctggctgaacctcagagagctcggaccttgggcaagccatatgagatggctcgtgtggatcatggccagcgtgggcactatctacgtttttttctttcatgagcgaaccggctcgtgcgtgcagttcctccgcggtgaagcatgtcctaaagctggtaccgcctgcctcccagctaggtacaagttagtggaactgttgtgctacgtggtgatgggcttcttccctgctcttgtcattttaagcatgcctaacaccgaaggaatctgggagctcgtcaccggaggggtgttttattgcctgggaatggtgttttttaagtcagatgggagaatcccgttcgcccacgccatttggcacctgtttgtggctttcggcgctggcacacactattatgccatttggcgatacttgtatcttccttccacactgcagacaaaagtatccaaatag

SEQ ID NO: 195652 - DNA, 582 bp, synthetic construct
  misc_feature 1..582: note = Description of Artificial Sequence: Synthetic coding sequence
  source 1..582: mol_type = other DNA
atgttcgccccccggctgctggacttccagaagaccaagtacgccagatttatgaaccaccgcgtgcctgctcacaaaaggtatcagcctacggaatatgaacacgcagctaactgcgctacccatgctttttggattatcccatctattctggggagcagtaatctgtacttcttgtccgatgacgattgggaaactatttccgcctggatctatggcttaggactgtgcggactcttcgtagtgagcacggtattccacaccatttcctggaaaaaaagccacctgaggatggttgagcactgtctccacatgtttgacagaatggtgatttacttctttattgctgcctcttatgctccatggctgaacttacgggagctcggcccttgggccagtcatatgcgctggctcgtctggatcatggcgtcagttggaaccatctatgtctttttctttcacgagcgctacaaattggtggaactgctatgctatgtcgtgatgggtttctttccggcgcttgtcatcttgagtatggccggcaagctgcgacccggtatgacgtgtctgaagagacagtag

SEQ ID NO: 195653 - DNA, 942 bp, synthetic construct
  misc_feature 1..942: note = Description of Artificial Sequence: Synthetic coding sequence
  source 1..942: mol_type = other DNA
atggagaccggccccgaggaccccagcagcatgcccgaggagagctctcccagacggactccccaaagcatcccctatcaggatctgcctcatctggtgaacgctgacggtcagtacctattttgcaggtattggaagccgaccggtacccccaaagctctgattttcgtctctcacggtgcaggagaacacagtggacgctacgaagaattggcaagaatgttaatgggcctcgacctgctagtgttcgcacatgatcacgtggggcatggccagtccgaaggcgagcgaatggtggtgagtgacttccacgtattcgtacgcgatgtcttgcagcacgtcgatagcatgcagaaggattatcccgggctgcccgtctttttattaggccacagtatgggcggcgcaattgcgattttgactgccgcagagcggcctgggcacttcgcggggatggtgctcatctcccctctagtgctcgctaatccagaatccgcaactactttcaaggtactggcagctaaggtgttgaatctggtgctgcccaacctcagcctcggccctatcgatagttccgtgttatcccgcaataagaccgaagtcgatatctacaatagcgacccactgatctgtagagcaggtcttaaagtctgtttcgggatacaactgctgaatgcagtctctagagttgagagggcgctacccaaattaactgttccctttctcctattgcaggggtccgctgaccggctgtgcgactcaaagggagcctaccttctgatggaacttgccaagagccaagacaaaactctgaagatctacgagggcgcctatcacgtgttgcacaaggagctgcctgaggtgaccaattccgtgtttcatgaaatcaatatgtgggtgtctcagagaactgctaccgccggcacagcgtcccccccatag

SEQ ID NO: 195654 - DNA, 912 bp, synthetic construct
  misc_feature 1..912: note = Description of Artificial Sequence: Synthetic coding sequence
  source 1..912: mol_type = other DNA
atgcccgaggagagcagcccccggcggaccccccagagcatcccctaccaggaccttccacacctggtcaatgcagatggtcagtatctgttttgccgctactggaaaccaaccggcacccctaaggctctaatttttgttagtcatggcgccggcgagcactccggcaggtatgaggagctggctagaatgctgatggggctagatctgttggtttttgcccatgatcatgttggccacggtcagtccgagggagaaaggatggttgtcagtgacttccatgtctttgtgcgcgacgttctccagcatgttgactccatgcagaaggactaccccggcttacctgtgttcctcctcggccatagtatggggggggcgatcgctatactaacagcagccgagcgccctgggcattttgctggcatggtgttgattagccccttagtcttagcaaaccccgagtctgccacaacttttaaggtactcgctgccaaggtgttaaatctggtcctccctaacctgagcctggggccaatcgattcaagtgtcctgtcccgcaacaagaccgaagtcgatatatataactccgaccctctcatatgtcgcgctggcctgaaagtgtgttttggcatacagctgttaaacgcagtgtcgcgggtcgagcgcgcgcttccaaaactcacagttccttttctgttgttgcagggttcagctgaccgactctgcgacagcaagggggcctacttattgatggagctggctaagtctcaggataaaaccctgaagatctacgagggcgcttatcacgtcttacacaaagagttaccagaggtaaccaattccgtgttccatgaaatcaatatgtgggtctctcaacgcaccgcaacagctggcaccgcctctcccccttag

SEQ ID NO: 195655 - DNA, 912 bp, synthetic construct
  misc_feature 1..912: note = Description of Artificial Sequence: Synthetic coding sequence
  source 1..912: mol_type = other DNA
atgcccgaggagagcagcccccggcggaccccccagagcatcccctatcaggatctgccccaccttgtaaatgcagatggtcaatatcttttctgccggtattggaaacctaccgggacacccaaggcgttgatattcgtctcccacggcgccggtgagcattcaggccggtatgaggagctcgcccggatgctcatgggcctggacctgttggtgttcgcgcatgaccacgttggtcacggtcaatccgagggggagagaatggtggtgagcgacttccacgtgttcgtgcgagacgtacttcagcacgtggacagcatgcaaaaagattaccccgggctccctgtgttcctgctgggacactccatgggaggcgcgattgcgattcttactgccgccgagcgccccggccatttcgccggaatggttctgatctcgccactggttctcgctaacccagagtcggcaaccacctttaaggtactggccgcaaaagtgcttaatcttgtgctgcccaacctctctttggggcctatcgattcgagcgtattaagccgaaataagacagaggtcgacatttacaactccgatcctctgatatgccgcgctggcctgaaggtttgcttcggcatccagttactgaatgctgtgtctcgtgtggaaagggccctgcccaagctaaccgttcccttcctcctgcttcaggggtcagcagaccgtctgtgcgactcaaagggcgcctacctccttatggagctggcaaaatcccaggacaaaaccctaaagatatatgaaggagcctaccacgtcctgcacaaggaactacctgaagtcacgaattctgtattccacgagatcaatatgtgggtttcacaacgaaccgcgacagccggaactgcgtcaccaccctag

SEQ ID NO: 195656 - DNA, 852 bp, synthetic construct
  misc_feature 1..852: note = Description of Artificial Sequence: Synthetic coding sequence
  source 1..852: mol_type = other DNA
atggagaccggccccgaggaccccagcagcatgcccgaggagagctcgccacggcgtacgcctcagtccattccttatcaagacctccctcacctggtgaatgctgatggccagtacctgttctgtcgctactggaagcctacaggaacccccaaggctctgattttcgtaagtcatggggcaggagagcacagcggtcgatatgaagaacttgctaggatgctcatggggctagacttgctggtttttgcccatgaccacgtcggccacgggcaaagtgagggagaaagaatggtggtctccgattttcacgttttcgtgcgagatgtgttgcagcacgtggacagcatgcaaaaagattatcctggactcccggtttttcttctgggtcacagcatggggggtgctattgccatcctgacggcagctgaaaggcccggacacttcgctggcatggtgttaatctcccctctggtgctagccaatccggaatccgctactaccttcaaagtagacatctataactcagaccctctaatctgccgtgcgggcttgaaggtgtgcttcggcattcagctgctcaatgcagtgtcacgagtagagcgagcactgccgaagctcaccgtgccgttcctgctgctccaaggttctgccgacagactctgcgatagcaaaggggcatacttgctaatggaattggccaaatctcaggataagactctaaaaatttacgaaggggcatatcacgtgcttcacaaggaactgcctgaggtgaccaatagcgtgttccacgagattaatatgtgggtcagtcagcggacagcgactgccggtaccgctagcccaccttag

SEQ ID NO: 195657 - DNA, 234 bp, synthetic construct
  misc_feature 1..234: note = Description of Artificial Sequence: Synthetic coding sequence
  source 1..234: mol_type = other DNA
atgcccgaggagagcagcccccggcggaccccccagagcatcccctaccaagaccttccgcacctggtgaatgccgacggtcaatatctgttttgccgctattggaagcctactggaactccgaaagccttgatatttgtctcacatggggcaggcgaacatagtggaaggtatgaggagttggcccgcatgctgatggggctggatttgctcgtgttcgcccacgatcattag

SEQ ID NO: 195658 - DNA, 942 bp, synthetic construct
  misc_feature 1..942: note = Description of Artificial Sequence: Synthetic coding sequence
  source 1..942: mol_type = other DNA
atgaagacccggcccgaggaccccagcagcatgcccgaggagagctctccccgacgcacaccgcagtcaataccctaccaggaccttcctcacctggtgaacgcagacgggcagtacttattctgcagatactggaagcccaccggtacccctaaggctctaatctttgtctcacacggggctggagaacactccggtcgctacgaagagctggccaggatgctgatgggactagacctactggtgtttgcacacgatcacgttggccatggccagagtgaaggggaacggatggtcgtcagtgacttccacgtcttcgtgcgggacgtgctgcaacacgtggacagcatgcagaaagactacccggggctccccgtatttctcctggggcactccatgggtggagctatcgctatcctgaccgctgcagaacgccctggacatttcgctggcatggtgctcattagccctctcgtgctcgctaaccctgagtcggctactacatttaaggtcttggccgccaaggttttgaatctggtcctgcctaacctgtccctcggccctatcgacagcagcgtgttaagccggaacaagacggaagttgatatctataactctgatcccctgatctgtcgcgccggactaaaagtgtgctttggcatccaactccttaacgcagtctcccgtgtcgaacgggccctgcccaaactcactgtgccctttctcttattgcaggggtctgctgatcgtttgtgtgatagcaagggagcttacctcctgatggaattagctaaatcccaggacaaaacactgaagatctatgagggcgcttatcacgtcctgcataaggaactgcccgaggtcaccaattcagtgttccacgaaatcaacatgtgggtgtcacagcgaaccgccaccgccggaaccgcctcgcccccatag

SEQ ID NO: 195659 - DNA, 1842 bp, synthetic construct
  misc_feature 1..1842: note = Description of Artificial Sequence: Synthetic coding sequence
  source 1..1842: mol_type = other DNA
atgtgctgctggcccctgctgctgctgtggggcctgctgcccggcaccgccgccggcgggagcggcaggacctacccccatcgtacactcttagatagcgaaggaaaatactggctgggatggtctcagcggggctcacagatcgcgttccgtcttcaagtaaggactgcaggttatgtgggcttcggcttttctccgacaggcgctatggccagtgccgacatagtggttgggggtgtggcccacggtcgtccttatctccaggattacttcaccaacgccaacagagagctgaaaaaagacgcccaacaagactaccatctcgaatacgccatggaaaatagcactcacacaatcatcgagtttactagggagctgcacacctgcgacataaacgacaaatcaatcaccgactcaactgtgcgagtcatttgggcataccatcacgaggatgctggagaggcaggtccaaaataccacgatagtaacaggggcaccaaatctcttcgactgctcaaccccgaaaaaacttctgtgcttagcaccgctctgccgtatttcgacctggtgaaccaagacgtgcctattccaaacaaggatactacgtattggtgtcagatgtttaagatccccgtgtttcaagaaaagcatcatgtgataaaggtggaacctgtgatacagcgcggtcatgagagcctcgtgcatcacattctgctgtaccagtgttctaacaacttcaacgactcagtgttggagtcagggcatgaatgttatcaccccaacatgcccgacgccttcctgacctgcgagactgtgatttttgcttgggcgatcggcggcgagggattttcctaccccccccacgtaggactgtctctgggaacccctcttgatccacactacgtactcctagaggtccattacgacaatccgacatatgaggagggtctgattgacaattctggactgcgtctgttttatacgatggatatccgaaagtacgacgccggagtgatcgaagcgggcctctgggtaagcctttttcacaccattccacccggtatgcccgaattccagtccgagggtcactgcacactggagtgccttgaggaggcccttgaggctgaaaaacctagtgggattcacgtttttgccgttttgctgcacgcccacttggcaggtagagggattaggctccgccattttcgaaaaggcaaggagatgaaactgttagcttatgacgatgacttcgacttcaattttcaagaatttcagtacctcaaggaggaacagacaatcctgccaggggacaaccttatcacagagtgtaggtataataccaaagaccgagccgagatgacttggggaggcctgagcaccaggagcgaaatgtgcctgtcataccttctgtactatcctagaattaacttgaccaggtgtgcctccatccctgacattatggaacagctccagtttatcggggtcaaggagatctacaggcctgtgaccacatggccctttatcattaagtccccgaaacagtataaaaatcttagcttcatggacgccatgaataaattcaagtggaccaagaaagaggggctgtctttcaacaagctggtgttgtccctgccggttaatgtgagatgctctaagacagataatgccgaatggtcaatccagggcatgacagccctgcctcctgacatcgaaagaccttataaagctgagcctcttgtgtgtgggaccagctctagctcctcgctccatcgggacttttctattaatctgctcgtttgtttactcctgctctcttgtactctgagtacaaagagtctctag

SEQ ID NO: 195660 - DNA, 1023 bp, synthetic construct
  misc_feature 1..1023: note = Description of Artificial Sequence: Synthetic coding sequence
  source 1..1023: mol_type = other DNA
atgagcgagctggagcagctgcggcaggaggccgagcagctgcggaatcagatccaggatgctagaaaagcttgtaacgacgccacgctggttcagatcacctccaacatggattctgtgggccggattcagatgcgaacacgacgtaccttgaggggtcatctggcaaaaatatatgctatgcattgggggtatgatagccgtcttttggtgtcagcatcccaggacggaaagctcattatctgggacagttacaccaccaacaagatgcatgcgattccgctgaggagcagctgggtgatgacatgtgcctacgccccttccggcaactatgtagcgtgcggcggactggacaacatctgctccatctataacctcaagacccgagagggaaacgtgcgagtcagcagggagctccccggccacacagggtacctttcatgctgccggttcttggatgacagccagattgttacaagcagtggagacacaacctgcgctttgtgggacatcgaaacagctcagcaaacaaccacttttacaggccattctggagacgtgatgtcactgtcactgtcccctgacatgcgcactttcgtgtccggcgcctgcgatgcctccagcaagctgtgggatatccgggacggaatgtgtagacagagcttcaccggccacgtgtccgatatcaatgccgtctctttcttccccaatggctacgcttttgctacaggtagcgacgatgccacctgccgcctcttcgacctgcgggccgatcaggaactgttactttactcccacgataacataatctgcggaataacgtccgtagctttctctaagagcggccgccttctactagctggatacgatgacttcaattgcaatgtttgggacacactgaagggagaccgtgcgggtgtactcgcggggcacgacaatcgcgtaagctgtctcggcgtaaccgatgatggaatggccgtcgcgaccggatcatgggacagtttcctgcgcatttggaattag

SEQ ID NO: 195661 - DNA, 1089 bp, synthetic construct
  misc_feature 1..1089: note = Description of Artificial Sequence: Synthetic coding sequence
  source 1..1089: mol_type = other DNA
atggcccccaagcaggaccccaagcccaagttccaggagggcgagcgcgttctgtgcttccatggcccattactatacgaagcaaagtgcgtcaaggtcgcgattaaagataagcaggttaagtactttatccactactcaggctggaacaaaaagtcagctgtaaggccgcgacgaagtgaaaagtctctgaaaacccatgaagacatagtagcattgttccctgtgcctgaaggcgcccccagtgtgcaccacccccttctgacatcctcctgggatgagtgggtccctgagagccgcgtgttgaaatatgttgatacaaaccttcagaaacagcgggagctccagaaggccaaccaggagcagtacgcggagggaaaaatgaggggtgctgcacctggtaagaagacctctggtctacagcaaaagaacgtagaagtaaaaacgaaaaaaaataagcagaaaacacctggtaatggagacggcggatctacgtcagagacgcctcaacccccgaggaagaagcgcgccagagtggatcccaccgtggagaatgaggagacctttatgaatagagttgaggtcaaggtgaagattccagaggagctcaagccgtggctggttgacgactgggacttgattactcggcaaaagcagctcttctatttgcccgccaagaaaaacgttgatagtatcttagaggactatgccaactataagaagagccggggtaacacagacaacaaagagtacgccgtcaatgaagtcgttgcaggcattaaggagtatttcaatgtcatgctgggcacccagctgctttataaatttgaacggcctcagtacgccgagatcctggcagaccaccctgacgcacctatgagccaggtgtacggggccccgcacctgctacggttgttcgtccgtattggggccatgttagcctacactccccttgacgagaagagtctggcacttctcctcaactacttacatgattttctaaagtatttggccaagaactcagccactctgttctcggcatcggattacgaagtcgcaccaccggaatatcatcgcaaagctgtttag

SEQ ID NO: 195662 - DNA, 1047 bp, synthetic construct
  misc_feature 1..1047: note = Description of Artificial Sequence: Synthetic coding sequence
  source 1..1047: mol_type = other DNA
atgatccccttcccccacccccaggtgaccgacgccctgggccggtactcgaattacatcctctcctccactgttgagagtcctagtctacgcagcatgaatttcgagaaacaaggcgagagagtcctctgttttcatggccccttgctgtatgaagctaaatgtgttaaagtcgcaattaaagacaagcaagtgaaatacttcatccattacagcggctggaacaagaattgggatgaatgggtgccagaaagccgtgtacttaaatatgttgatacgaacctgcagaaacaacgagagctgcagaaagctaatcaagaacagtacgccgaagggaagatgcgcggcgccgctccaggcaaaaagactagcggacttcagcagaagaatgttgaggtgaaaacaaaaaaaaacaaacagaagacaccaggaaacggtgatgggggctccacctcggagaccccgcagccgccccgaaaaaaaagagcccgcgttgaccccactgtggagaacgaggaaactttcatgaatcgggtcgaggtgaaggtgaagattccggaggaactgaagccttggctggtcgatgattgggacctcataacaaggcaaaagcagctcttctatttacctgctaagaagaatgtggatagcatcttagaagactacgccaactacaagaagagccgcggcaatactgacaataaagaatacgctgtgaatgaagtagtcgctggcataaaggaatacttcaacgtgatgctgggaacacagttactctataaatttgagcgaccgcagtatgcagaaattttggccgatcatccagacgctcccatgtcacaggtctatggtgcaccacacctcctcaggttgtttgtccgaatcggagcaatgctggcatatactccactggatgaaaaaagcttggcccttctgctgaattatctgcacgacttcctgaaatatctggccaagaacagtgccaccctcttttctgcttctgattacgaggtggccccacctgagtaccatcggaaagctgtgtag

SEQ ID NO: 195663 - DNA, 972 bp, synthetic construct
  misc_feature 1..972: note = Description of Artificial Sequence: Synthetic coding sequence
  source 1..972: mol_type = other DNA
atggcccccaagcaggaccccaagcccaagttccaggagggcgagagggtcctttgtttccacggcccactgctgtacgaagcgaaatgcgttaaagtggccataaaagacaaacaggtgaagtacttcatccactattccggatggaataaaaactgggatgagtgggttcccgaatctcgggtactaaagtacgtcgacacaaatttacaaaagcagcgagaactccaaaaagctaatcaagagcagtatgccgaaggaaagatgaggggggccgcccctgggaagaaaaccagcgggttgcagcagaagaatgttgaggttaaaactaaaaagaacaagcagaaaaccccaggaaacggggacgggggctctactagcgaaactccccaaccacctcggaagaagcgcgcaagggtcgaccccactgtggagaacgaagagacatttatgaaccgcgtagaagttaaagtcaaaattccggaagagctgaagccttggctggtcgacgattgggacttgattaccaggcagaagcaacttttctacctcccagcgaagaagaatgtcgattcaatcctagaagactacgcaaattacaagaagtcgcggggaaatactgataacaaggaatacgcagtgaatgaagtagtggctggaatcaaggaatattttaatgtgatgttgggtacacagttgttatacaagttcgaacgtcctcagtatgccgagattcttgccgatcaccccgacgccccaatgtcgcaggtgtatggagccccccatctgttaaggctcttcgtcagaatcggagctatgctcgcctacaccccgcttgacgagaaaagtcttgctctactcctgaattacttacacgacttcctaaagtacctggctaagaatagtgcaaccctgttctctgcgtcagattacgaagtggccccccccgaataccatcgtaaggccgtctag

SEQ ID NO: 195664 - DNA, 708 bp, synthetic construct
  misc_feature 1..708: note = Description of Artificial Sequence: Synthetic coding sequence
  source 1..708: mol_type = other DNA
atgcggggcgccgcccccggcaagaagaccagcggcctgcagcagaagaatgtggaagtgaaaaccaaaaagaacaagcagaagacgcctggaaacggagatggtggatccacaagtgagacgccccagccaccacggaagaaaagagctagagtcgacccaaccgtggagaatgaggagacctttatgaacagggtggaggtgaaggtaaagatccctgaggaattgaagccatggttggtggacgactgggacctgatcaccaggcaaaaacaactcttttatctcccagcaaagaagaacgtggactccatacttgaagactatgccaattacaaaaaatcaagaggaaatacggataataaggaatacgctgtgaatgaggtggtggctgggattaaggagtactttaacgtgatgctgggaacacagttgctctataagttcgagaggcctcaatacgccgagattctagcagaccatcctgatgcccctatgtcccaggtctacggcgcacctcatctcttaagactgtttgtgaggattggtgccatgcttgcatacaccccactcgatgagaaatcactggccctgctgctcaactatcttcatgattttctgaagtatctggctaagaattcggccaccctgttctccgcttcggattatgaggttgcccccccagagtaccatcgaaaagctgtttag

SEQ ID NO: 195665 - DNA, 708 bp, synthetic construct
  misc_feature 1..708: note = Description of Artificial Sequence: Synthetic coding sequence
  source 1..708: mol_type = other DNA
atgcggggcgccgcccccggcaagaagaccagcggcctgcagcagaagaacgtggaggttaagacgaaaaagaacaagcagaaaactccaggtaacggcgatgggggaagtactagcgagactcctcaaccccccaggaaaaagagagccagggtggacccgaccgtagaaaatgaggaaactttcatgaaccgcgtggaggtcaaagtaaagatccctgaggagctgaaaccctggctcgtcgacgattgggacctaattacaagacagaaacagcttttctaccttcccgctaaaaaaaatgtggactccatcctagaagactacgccaactataaaaagtcacggggtaataccgataataaggaatatgccgtcaacgaggttgttgccggcattaaggagtactttaatgtgatgctcggtactcagctcctctacaagttcgaacgtccgcagtacgcagagatcttggcagaccacccagacgcccctatgtcgcaggtatatggcgctccccacctactccgcttgtttgttagaattggcgccatgctcgcctataccccattggatgaaaagagcctagccctgctcctgaattatctccacgattttcttaagtatctcgcaaagaactctgccaccctgttcagcgcatccgactacgaggtggcaccccctgaataccaccgaaaggccgtttag

SEQ ID NO: 195666 - DNA, 345 bp, synthetic construct
  misc_feature 1..345: note = Description of Artificial Sequence: Synthetic coding sequence
  source 1..345: mol_type = other DNA
atggtgagccggaaggccgtggccgccctgctggtggtgcacgtggccgccatgctcgccagtcagacggaggcattcgtgcccatttttacctatggagaactgcagaggatgcaggagaaggagagaaacaagggtcaaaaaaagtctctgagcgtgtggcaacggagtggcgaggagggccctgtggatcctgccgaacctattagggaggaggagaacgaaatgatcaagctgaccgcacccctagagattggtatgcgcatgaattctcgccagctggaaaagtatccagctacactggaggggctgctctccgagatgttaccccaacatgcgaagtag

SEQ ID NO: 195667 - DNA, 348 bp, synthetic construct
  misc_feature 1..348: note = Description of Artificial Sequence: Synthetic coding sequence
  source 1..348: mol_type = other DNA
atggtgagccggaaggccgtggccgccctgctggtggtgcacgtggccgctatgttggcgagccagacagaggcattcgtgccaatatttacgtatggcgagttacagaggatgcaggagaaggaaagaaataaggggcagaagaaatccttatccgtgtggcagaggagcggagaggagggcccagtagaccccgcagagccaatcagagaggaggaaaatgaaatgatcaagctaaccgccccactggaaatcggcatgcggatgaattctcgacagctcgagaaatacccagcaacccttgagggcctgctttcagagatgctgccacaacacgccgcaaagtag

SEQ ID NO: 195668 - DNA, 327 bp, synthetic construct
  misc_feature 1..327: note = Description of Artificial Sequence: Synthetic coding sequence
  source 1..327: mol_type = other DNA
atggtgagccggaaggccgtggccgccctgctggtggtgcacgtggccgcaatgctcgcttcacagaccgaagccttcgtgcctatttttacttatggagagctgcagagaatgcaggagaaagagcggaataagggtcaaaaaaagagcctcagcgtctggcagcgctccggggaggaaggaccagtggatcccgccgaaccaattcgggaagaggaaaacgagatgattaagctgaccgctcccctagaaatcggcatgcgcatgaactcccggcagctagagaaatacccagctacacttgaaggactgctcactgccaaatag

SEQ ID NO: 195669 - DNA, 1011 bp, synthetic construct
  misc_feature 1..1011: note = Description of Artificial Sequence: Synthetic coding sequence
  source 1..1011: mol_type = other DNA
atggcccggcggcggagccagcgggtgtgcgccagcggccccagcatgttaaactctgctaggggtgctccggagctgttgagaggaaccgctaccaatgcagaggtgagcgctgcagcggcgggggcaacaggtagcgaggagttaccacctggcgaccgcggatgcagaaacggcggggggcgcggccccgccgcgaccacttcctctactggcgttgcggtgggggccgagcatggggaggactcactgtcccggaagccagaccctgagcccggtcggatggatcaccaccaaccggggactgggagatatcaggtgttgctgaatgaagaagataattctgagagttccgccattgagcaacctcccacgtccaatcccgcccctcagatcgtccaggccgcctccagcgcccctgccctcgagacagactcgagccctccaccctactccagtatcaccgtggaagtgccaacaacttccgacaccgaagtgtatggtgaattctacccagttccccctccttactccgtggccacttcccttcctacatatgatgaagcagaaaaggcaaaggcggcagcaatggcagcagccgccgcagaaacatcacagcgtatacaggaggaagagtgccctccaagggatgacttctccgacgcggaccagttgcgggttggcaacgatgggatctttatgttagccttcttcatggcgttcatctttaattggctaggattttgtctgtcattttgcataactaacacgatagccgggcgctatggagcgatttgcggattcggactgagcctcattaaatggatcttaatcgtcaggttcagtgactattttacggggtacttcaacggccagtattggctgtggtggatttttttggtgcttgggcttctccttttctttcgtggttttgtgaactacctgaaagtgaggaatatgtcggagtctatggcggccgcccatcgcactcgttatttcttcttgttgtag

SEQ ID NO: 195670 - DNA, 1161 bp, synthetic construct
  misc_feature 1..1161: note = Description of Artificial Sequence: Synthetic coding sequence
  source 1..1161: mol_type = other DNA
atgggcagcccctggaacggcagcgacggccccgagggcgcccgggaacctccttggccagccctccccccgtgcgatgaaagacggtgctcaccgttccctctaggagccctggtacccgtcacagcagtgtgtctgtgtttgttcgttgtgggcgtgagtggtaacgtggtcaccgtcatgctgatcggaagatatcgggacatgcggaccactacgaatttgtatttaggcagcatggctgtgagtgatcttctgattctcctgggactgcctttcgacctgtatcgtttgtggcgctcccgtccatgggttttcgggccgttactgtgcagattgtcactgtacgtcggagaaggatgtacgtatgcaaccttgctgcacatgaccgccttaagcgtcgaacgttacctggccatctgtcggcctctccgcgcccgggtccttgtgacacggaggcgcgttagagctcttatcgccgtgctatgggccgtggctctgctgtccgctggtcccttcctcttcctggtcggtgtggagcaagatcccggcatctctgtcgtgcctggattaaatggtacggcgcgtatcgccagctctccccttgccagtagtcctcccttgtggcttagccgagcaccccccccgtcccccccgtccggccctgagactgctgaagccgccgctctcttctctagggagtgcagaccgtctccggctcaactgggcgcactgagggtgatgttatgggtaaccaccgcctatttctttcttccatttctgtgcctctctattctctacgggcttatcggacgtgagctgtggagtagccgacggcctcttcgtgggcctgccgcttcaggaagggagagagggcacagacagacagtacgcgtgctacggaaatggagccgcaggggaagcaaggacgcgtgcctgcagtcagcaccgcccgggactgcccagaccctcggaccactccctctgctggcccaactgtgggctccgcttccggcaccattccccatcagcatccccgcctccacaagacgaggaggggggagcgggatatataatctgcttgttgcactcccccgctggcaaaatcatctgcacaaacatggacgtttcgctgatgacgttctgctttcagtgctatag

SEQ ID NO: 195671 - DNA, 1206 bp, synthetic construct
  misc_feature 1..1206: note = Description of Artificial Sequence: Synthetic coding sequence
  source 1..1206: mol_type = other DNA
atggagaagagcaagaacttccggatcgacgccctgctggccgtggatccccctcgggcagcaagtgcccagtcagcgcctcttgctctcgtgacaagcttggccgccgctgctagtggaaccggcgggggcggcggaggcggtggagccagcggtggtacttctggatcgtgctctcccgccagtagcgaacccccagccgcgccagcggaccggctgagggctgagtctcccagtcctcctcgccttttagctgctcattgcgctttgctgcccaagccaggatttctaggcgcaggaggcggcggcggcggtaccggaggagggcacggagggccccatcaccatgcccatccaggagccgcagcagctgcggcagccgctgctgctgccgctgcggctggcggactcgctcttggcctgcacccaggaggggcacagggcggcgcagggctccccgcccaggccgcactgtacgggcacccagtgtatggttattcagccgcggcggctgccgctgcgctggcgggccagcaccctgcgctctcctatagctatccacaggtgcaaggagcccatcccgcgcaccccgcagatcctatcaagttaggcgccgggacgttccaattagaccagtggctgcgagcatccacagcggggatgattctgcctaagatgcccgacttcaactcacaggcgcagagcaacctgctggggaagtgcaggaggccaagaaccgctttcacatctcaacagcttcttgaactggagcatcagttcaagctcaacaaatacctgtctcggcctaagaggttcgaggttgccacatcgcttatgcttactgaaacgcaggtcaagatctggtttcaaaaccgccggatgaaatggaaaagatccaagaaagcaaaggagcaagcggcacaggaggcagaaaaacagaagggaggcggcggaggagctggtaagggtggggccgaggagcccggcgcggaggaattgctggggcctcctgccccaggcgataaagggtccggacgaaggttacgcgaccttagggacagcgaccctgaggaagacgaggacgaggatgatgaagaccacttcccctatagcaacggcgcttccgttcacgcagcgtccagcgattgctcctcagaggacgacagcccaccaccgcgcccgagccatcagccagcgccccagtag

SEQ ID NO: 195672 - DNA, 696 bp, synthetic construct
  misc_feature 1..696: note = Description of Artificial Sequence: Synthetic coding sequence
  source 1..696: mol_type = other DNA
gccgccgccgccctggccggccagcaccccgccctgagctacagctatcctcaggtacagggggctcaccctgctcaccccgcagaccctataaaacttggagcaggaactttccagttggatcagtggctcagagcatccacggctggaatgattctccctaagatgcccgatttcaatagccaggcacaatcaaatttactgggaaagtgtaggaggccccgtaccgctttcacctcccagcagctcctggagttagaacatcaattcaagctaaacaaatacctgagtcggcccaagagattcgaggttgctacctcactgatgttgacagagactcaggtcaaaatctggttccagaaccgcagaatgaaatggaagcgctctaagaaggcgaaagaacaggcggcgcaagaggccgagaagcagaaggggggcggcggcggagcaggtaaggggggagccgaggagccaggcgccgaagagttactggggcctccagctcccggcgacaagggaagtggacgcaggttgcgagacctacgcgactctgaccccgaggaggacgaggacgaagacgacgaggaccactttccttattcaaacggcgcctccgtccacgctgcctctagcgattgcagcagcgaagacgatagtccacctcctcgcccttcacatcagcctgcccctcaatag

SEQ ID NO: 195673 - DNA, 570 bp, synthetic construct
  misc_feature 1..570: note = Description of Artificial Sequence: Synthetic coding sequence
  source 1..570: mol_type = other DNA
atgggcggcctgagcaccgtgggcgcctgccccggcatcctgggcgcccagcaggcccaggctcagagcaacctcctggggaagtgtcgcagaccaagaaccgcattcacgtctcagcagctgttggaactcgaacatcaatttaaactcaataagtacctctctcgacccaagagatttgaagtggcgacatccctgatgttgacagagactcaagtgaagatctggtttcagaacagaagaatgaaatggaagcggagcaagaaagccaaggagcaggctgctcaggaggccgagaaacagaaaggcggagggggaggcgccgggaagggtggggccgaggaacctggagctgaagaactgctcggaccaccagcccccggagacaaggggagcgggagaagactgcgggatctccgcgactctgaccccgaggaggacgaggatgaggatgacgaggaccattttccttattccaacggtgcctccgtccacgctgcgtcctccgattgcagctctgaagatgatagccctccccccagaccatctcaccaaccagctccccaatag

SEQ ID NO: 195674 - DNA, 1692 bp, synthetic construct
  misc_feature 1..1692: note = Description of Artificial Sequence: Synthetic coding sequence
  source 1..1692: mol_type = other DNA
atgcccagcaagttcagctgccggcagctgcgggaggccggccagtgtttcgagtctttcctggtagtacgggggctcgacatggagaccgaccgagagaggctgcggacaatatacaatagggactttaaaatctcttttgggaccccggctccagggttctcgtccatgctctacgggatgaagatcgctaacctggcctatgtgaccaaaactcgcgtacggtttttcagactggacaggtgggccgatgtaaggttccctgaaaagcggcggatgaagctggggagcgatatttccaaacaccacaagagccttctggctaagattttctacgatagggcggaatacttacacgggaaacatggcgttgatgttgaggtccagggaccgcatgaggctagagatgggcagctgctgatccgacttgacttgaatcggaaagaagtccttacacttagactgagaaatggaggcacccagagtgttacactgacgcacttattccctctgtgccgtactccacaatttgcgttttacaatgaagaccaggaactgccctgcccattgggacctggggagtgttacgagctgcacgtacactgcaagacatcatttgttggatattttccggccaccgtgctctgggaacttttgggccccggtgaatctggaagtgagggagccgggactttttacatagccaggtttcttgccgctgtagcgcattccccgctcgcggcacagcttaagcccatgactccattcaaacgaaccagaataactggcaatcctgtggttacgaatcggatcgaagaaggagaaaggcctgatcgcgctaaggggtacgacttggagctgtctatggcactcggaacctattaccctcccccgcgactccgccagctgctcccaatgttgctacagggtactagcattttcaccgcccccaaggagatcgccgaaatcaaggcacaactcgagactgccctgaagtggagaaattatgaggtgaagttgcggctgctgctccacctcgaggagttacaaatggaacatgatatcagacactatgatctggaatccgttccaatgacatgggatcctgtggaccaaaatccccgacttttgaccctggaagtgccaggtgtaactgagtcaagacccagtgtgttacggggcgatcatctgtttgcacttctgagttcagagacacaccaggaagacccaataacctataaaggatttgtgcacaaggtggagctcgatagggtcaaattatcattcagcatgagcctgctttccagattcgttgatggtctaaccttcaaggtcaatttcacattcaataggcagccactcagagttcagcacagagccctggaactgacagggcggtggctgctgtggccaatgctgttccctgttgctccaagggacgtacccctactgccctctgacgtgaaactgaaactgtatgaccgttccctggagagcaacccagaacaactccaggccatgaggcacattgttaccggcaccacccgccctgctttaaccgcctgtctcacccttaatcagaatcccgctgaactgcccctgcagggcacaggcagacttggtgagggtgtgtataacccaagccacagtacgccctcacccgccggagagaacgacacttcctcctgctag

SEQ ID NO: 195675 - DNA, 3012 bp, synthetic construct
  misc_feature 1..3012: note = Description of Artificial Sequence: Synthetic coding sequence
  source 1..3012: mol_type = other DNA
atgcccagcaagttcagctgccggcagctgcgggaggccggccagtgctttgaaagcttcttggtggttagagggttggatatggagaccgatcgggagcgtctgcggaccatctacaaccgcgactttaagatctctttcgggacccctgcgcctggatttagctctatgctgtacggaatgaagatcgctaatctggcatacgtaacgaagacccgcgtgcgattctttcggctcgatcgctgggcggatgtacggttcccagagaaaagacgaatgaagctagggtcagatatcagtaaacatcacaagagccttctcgctaaaatcttctacgaccgggcggagtatctgcatggcaagcacggagttgatgtcgaggtgcagggaccacacgaggcccgcgacgggcagctcttaatacggctagaccttaacaggaaggaggtgctcactctgaggctgcggaatggaggaacgcaatccgttactctgacccacctgttccctttgtgccggacaccacaatttgcattttataatgaggaccaagaattgccttgtccactggggcccggcgaatgttacgaacttcatgtgcactgtaaaaccagcttcgttggctattttccagctactgtgttgtgggagcttctagggccaggtgagagtggatccgaaggtgcaggaaccttttatatagctaggttccttgccgctgttgcacacagccctctggcagctcagctgaagccgatgaccccctttaagcggacgcgaatcaccggtaaccctgtagtgacaaacaggatcgaagagggcgaaaggccagaccgggctaaagggtatgatctggaactgtccatggccttggggacctattatccgcctccaagactgcgccagctattgcccatgctcctgcaggggacaagtatctttactgccccaaaggaaatagctgagatcaaagcccagctcgagacggctcttaagtggagaaactatgaagttaaacttagactcctgctccacctcgaggagctgcagatggaacacgacataaggcactatgacctcgagagtgtgcccatgacatgggatcccgttgaccagaatccccgccttctaaccttggaggttcctggcgtcactgaaagccggccttcagtgctgagaggagatcaccttttcgcacttcttagcagcgaaacacaccaggaagacccgataacttataagggattcgtgcataaagtggagctggaccgggtgaagctgtctttctccatgagtctcttatctcggtttgtcgacggcttaacattcaaggtaaattttacttttaacaggcagccattaagggtccaacatcgggccctggagttgacgggacgttggctgctgtggcccatgctattccctgttgcaccccgcgatgtcccgctactcccctccgatgtcaagttaaagctctacgacagaagtctagagtctaaccccgagcagttgcaggcaatgcgccacatcgtgaccggcactacgagacctgccccctacatcattttcggcccgcctggtacgggaaagacagtgactcttgtcgaggccattaagcaagttgtgaaacatctgccaaaggcccacatcttggcctgtgctcctagtaacagcggcgctgacttgctttgccagcgactacgagtgcacctcccatcgtccatttatcgcctccttgctccgagtagagacatccggatggttcctgaagatattaagccatgctgtaactgggatgctaagaaaggcgagtatgtcttccccgcaaaaaagaaacttcaggagtaccgcgttctcattactaccctcataacagccggtaggcttgttagtgctcagtttccaatagaccacttcacacacattttcattgatgaagctggccattgcatggagccagaaagtctggttgcaattgccgggctgatggaggtgaaggaaacaggggatcctggtggtcagttagtcttggccggagaccctagacagctcggcccagttctacgatctccactcacccaaaagcatgggctcggttattccctgctggaacgcctgttgacatataactctctgtacaaaaaggggcccgacgggtatgatccgcaatttattacgaaacttctgcgtaattataggtcacaccccacaatactggatattccaaatcagctatattatgagggagaactgcaggcatgcgccgatgtagtcgacagggagagattttgtaggtgggccggcctgccaagacagggatttcccattatttttcacggggtgatggggaaagacgagagggaaggtaacagcccaagcttctttaatcctgaggaggccgcaacagtgacaagctacttgaagctgctgcttgctcccagttcaaagaagggaaaggcacggctttcgccccgatccgtgggggtgataagtccttaccggaagcaggtcgagaaaatacgctattgtattacaaaactcgatcgcgaactgcgagggctggacgacattaaagacctgaaggtggggagtgtggaggagttccaaggacaggaaagaagtgtcattcttatctccaccgtcagatcttcacagagctttgttcaactggatctagatttcaatctaggtttcctgaaaaaccctaagagattcaatgtagctgttacccgagctaaggcactgctcattatcgtaggcaacccgctgttgctgggtcacgacccggattggaaggtgtttttagaattctgcaaagagaatggcggttatactggctgccccttccctgctaaactcgatttacagcagggccagaacctgctgcaggggttaagtaagctcagcccttctacctccggtcctcactcacatgattacctgccacaggagagggagggggaggggggtctgtctttacaggtagagcctgagtggaggaacgagctgtag

SEQ ID NO: 195676 - DNA, 2844 bp, synthetic construct
  misc_feature 1..2844: note = Description of Artificial Sequence: Synthetic coding sequence
  source 1..2844: mol_type = other DNA
atgctgtacggcatgaagatcgccaacctggcctacgtgaccaagactagggttcggttttttcggctggatagatgggctgatgtgcggtttccggagaagcgccgcatgaagctgggcagcgatatatcaaagcaccataagtccctgctcgcgaagatcttttatgacagggccgaatatttacacggaaagcatggggtggatgtggaggtgcaggggccccacgaggctagggacgggcaattgctgataagactggatttgaatcggaaggaagttctcaccctacgactcaggaacggcgggactcaatctgtgacacttacccatctgttccccctgtgccggacacctcagttcgccttctacaatgaagaccaggagctcccatgtccattaggaccgggagaatgctacgaactgcatgtccattgtaagacttcattcgttggatacttccccgctaccgtcctctgggaactgctgggaccaggggagtccggatctgagggtgcaggcactttctacattgccagatttcttgccgccgtggctcacagcccccttgctgcccagctcaagcctatgacgccctttaagcggactagaatcactggcaaccctgtcgtcactaatcgaattgaggaaggggagcgcccagaccgggccaagggctatgacctcgaactctccatggccctaggcacatattacccccctccgcgtctccgccagctgctcccgatgttactgcaaggcacgtctatatttaccgcccccaaggaaatagctgagatcaaggcccagctggagacggccctcaagtggagaaattatgaggtcaagctgcggcttctgctacacctggaggagctacagatggagcacgatatccggcattatgacctggaaagcgtgccaatgacctgggatcccgtggatcagaacccccgactccttactctggaagtcccaggggtgacggagtcacgaccatccgtgctgcgtggagaccacctattcgccctgttgagctcagagacacatcaggaagaccccattacatataaaggattcgtgcacaaagtggagctggatagggttaaattaagcttttccatgagcctgctttctcggttcgtggatggactgacctttaaggtgaattttaccttcaaccggcagcctctgcgcgtacaacaccgtgcactggagttgaccggaagatggctgctgtggccaatgctctttcctgtggccccacgggacgtgccactgttgccttcggacgtgaagctgaagctctacgaccgcagtctggaatccaacccagagcaacttcaggccatgagacacattgtaactggaacaacacggccggctccatatataatttttggacctccaggaactggtaaaaccgtaaccttggtcgaagctataaagcaggtcgtcaaacatctgcctaaagctcatatcctggcctgcgccccttctaacagtggtgcagacctgctctgccagcgactgagagtgcacctgccaagctctatctaccggctgctcgcaccctctcgtgatatcaggatggtcccggaagacatcaaaccctgttgcaattgggacgcaaaaaagggggagtatgtcttccccgctaagaaaaagcttcaggaatacagagtactgattacgacactgatcacagcaggtagactggtaagtgctcagttccccatagaccatttcacgcacattttcatagacgaagccgggcattgtatggagccagaatcacttgtggccattgcgggcctcatggaagtaaaagaaaccggtgaccccgggggacagctcgtgttagctggtgatcccagacagctagggccagtattgcggtcaccactcacacaaaagcacgggttagggtatagcctgcttgagcggctactgacgtataattccctctataagaaaggaccagatggctatgatccgcagtttatcacaaagctgcttaggaactaccgaagtcaccctaccatattagatattccaaatcagctgtattacgagggcgagctgcaggcgtgcgctgacgttgtggatagagagagattctgtagatgggctgggttgccccggcagggcttccccatcattttccatggggtgatggggaaggatgagagagaaggaaacagcccaagcttcttcaatcctgaagaagctgctacagtgacatcttaccttaagctgttgttggccccgtctagtaagaaggggaaggcacgactgtccccccgtagcgtaggggtgatttctccatatcggaagcaagtcgagaagatacgttactgcatcaccaagctcgaccgagagctaaggggcttggacgacattaaggatttaaaagtgggctctgtcgaggagttccaaggtcaggaacgtagcgtgatcctgatatcaactgtcaggtcctctcagtcttttgtgcaactcgatctcgactttaacctgggcttcttaaaaaatccaaagcgatttaacgtcgctgtgactcgcgctaaggccctgcttattattgtgggtaatccactgctcctcggtcacgaccctgattggaaagtgttcctggaattctgtaaggagaacggcggttacaccggctgccccttcccggcgaagctcgatctccagcaggggcaaaatctactgcagggtctcagcaaactctcaccgtctactagtgggccccacagccatgattacctaccacaagaaagagaaggagaagggggtctttctctgcaagttgaacctgagtggcgcaatgaactgtag

SEQ ID NO: 195677 - DNA, 3012 bp, synthetic construct
  misc_feature 1..3012: note = Description of Artificial Sequence: Synthetic coding sequence
  source 1..3012: mol_type = other DNA
atgcccagcaagttcagctgccggcagctgcgggaggccggccagtgctttgagtctttcttagtggttcgcggtctagacatggaaactgatcgcgagcgcctcagaactatctacaaccgcgactttaagattagcttcggtacacccgcgcccggattcagtagcatgctgtatggcatgaaaattgcaaatctcgcctacgttacgaagaccagagtgaggttcttcagactcgaccggtgggccgacgtgcgatttccagaaaagcgacgtatgaagctgggatccgacatctccaagcatcataaatcactcctcgctaagatcttctacgacagagccgagtacctgcacggaaagcacggggtagatgtcgaggtgcaggggccgcacgaggcacgggacggtcagctgctcattaggctagacctgaacagaaaagaagtcctaaccctgcgcctgagaaacggcgggacccagtcggtgaccctgactcatcttttccctttgtgcagaacaccccagttcgctttctacaacgaagatcaggagttgccgtgcccgttgggacctggggaatgttatgagcttcatgtgcactgtaagacctcgtttgtcggatactttcctgctactgtgttgtgggagttgctgggaccaggtgagtcaggttcagagggagccggaacattctatatagcaagatttttagccgcggtggcccactccccactggcagcccaactgaaaccaatgacccctttcaagagaacgaggattacaggtaatccagtagtgactaacagaattgaggaaggagagaggcccgacagggctaaaggctacgatttggagctcagcatggctctgggcacttattaccctccacctcgcttacgacaactactgccaatgcttctgcagggcacctctatattcactgctcctaaagagattgccgagattaaggcccagctggagactgccctaaagtggagaaattacgaagtgaagctgcgactgcttcttcacttggaggaactgcagatggagcacgacattagacattatgatctggagagcgtccctatgacttgggacccagtcgatcagaaccccagacttctgaccctcgaagtgcctggcgttactgagagtagaccttcagttctgcggggggatcatctgtttgccctgctcagctcagagacccaccaggaggatccaataacatataagggctttgtgcataaagtggagttagaccgcgtgaagctcagtttctctatgtctctgcttagccggtttgttgacggcctgacttttaaagtcaatttcacgttcaaccgccagcctctgcgtgttcagcatagggctctcgaactgaccggaagatggttgctgtggcccatgctctttccagtagcccctcgtgatgttccactccttccttccgatgtgaagctcaagctgtatgataggtccctcgaatccaatccagagcaactacaggcaatgagacacatcgtgaccggcaccacccgccccgcaccgtacataattttcgggcccccaggcaccggcaaaacagtgaccctggtggaggccattaagcaggttgtgaagcatctgcccaaggctcacatactcgcctgtgctccctcaaactcgggtgcagacctactctgccaacggctacgcgtacacctccctagctcaatctatcggctgcttgcccccagtagagatattaggatggtgcccgaagatatcaaaccatgctgcaattgggatgccaagaagggtgagtacgtgtttcccgccaagaagaaactgcaggagtacagggtcctgattaccaccttaatcactgcaggacggctggtcagtgcccagtttccaatagaccacttcactcatatctttatagacgaagcaggacattgtatggagcctgagtccctcgttgctatcgctggactcatggaagtgaaggagaccggagaccccggtggccagctcgtgctggctggggatccgaggcagctggggcccgtattgagatctccattaactcagaagcacgggctagggtacagcctcctcgagcgcctacttacttacaactccctttacaagaaaggccccgatgggtatgatccccaattcatcacaaagctcctacgcaactacagatcacatcctacaatcttggacattccaaatcagttgtattacgagggagagcttcaagcctgtgccgacgttgtggatagagagcgtttttgtcgctgggcgggccttccacgccaagggttcccaatcatatttcacggggtcatggggaaagacgagagggaggggaactccccctccttttttaaccccgaggaggccgccacagtaaccagctatctgaaactgctgctggctcctagctccaagaaaggtaaagcaaggttgtccccccggtccgtaggagtcattagtccgtatagaaaacaggtggaaaagattcgctattgcattaccaaacttgatcgggagctgaggggtctggatgatatcaaggatctgaaagtgggatctgtggaggaattccagggccaggagaggagcgtgattctgatcagtacagtcagatctagccaaagtttcgtgcaactggacctcgattttaatcttggctttctgaagaatccaaaaaggttcaacgtagccgtgaccagagccaaggcactcttgattatcgtaggaaaccccctgctcctggggcacgaccccgattggaaagtctttcttgaattctgcaaagaaaatggcggatacactggatgtccattccctgccaaattagacctgcagcagggccagaatcttctgcagggtcttagcaagctatcaccatccacctcaggcccccattcacatgattatttgccacaggagagagagggggagggtggcctcagcctgcaagtggaaccagaatggcgcaatgaactgtag

SEQ ID NO: 195678 - DNA, 2826 bp, synthetic construct
  misc_feature 1..2826: note = Description of Artificial Sequence: Synthetic coding sequence
  source 1..2826: mol_type = other DNA
atggagaccgaccgggagcggctgcggaccatctacaaccgggacttcaaaatttcctttggcactcctgcacccggattttcttccatgctttacggtatgaagatcgccaacctcgcttatgtcactaagactcgcgtgagatttttccgtctggatcgctgggctgacgtgagattccctgaaaaaaggcgcatgaaactgggctctgacattagcaaacatcacaagtcacttctcgcaaaaatcttctatgaccgcgccgagtatctccacggtaagcatggtgggacccagagtgtcactctgacacacctctttccactctgtcgcactcctcagtttgccttctacaacgaggaccaagagctgccctgcccgctcggccccggggaatgttatgaactgcatgttcactgcaagacgagttttgttggatacttccctgccacggttctttgggaactgctcggcccaggagaatctggatcagaaggggcaggtaccttctacattgccaggttcctggcggcagtggcacacagccccctcgctgcacaactgaaaccaatgacaccattcaagagaacgagaattacaggcaatcctgttgttacaaataggatcgaggagggtgagcgccccgacagggccaaggggtatgatctggaactctccatggcgctgggtacatactacccaccacctcgcctccgccagttactccctatgcttctgcaaggaactagtatcttcacagcccccaaggaaatcgctgagatcaaggcacagctggagaccgccctcaaatggcggaactacgaggtgaagctgcgcttgctgcttcacctcgaagagttgcagatggaacatgatatccgacactatgaccttgagagtgttccaatgacctgggaccccgtggaccagaacccgagactcctgacgcttgaagttcctggagtgaccgaatctcgcccatctgttcttcgcggggaccacttatttgctctcctgtcttcagagacccaccaggaggaccctatcacatataaaggattcgtgcacaaagtagaactggatcgggtgaagctcagtttcagcatgagcctcttgtccagattcgtggacggtttaacgttcaaagtgaacttcacgtttaacagacagcctctgcgcgttcagcacagggcactcgagctgacgggtaggtggctactgtggcccatgttattcccagtggccccaagagacgttcctctgctgccatccgacgtcaaactgaagctgtatgaccgctccctggagagtaaccccgagcagcttcaagcaatgcgacacatcgttaccggaacaacacggcccgctccctatattatcttcggaccgcccgggacggggaagactgtcaccctcgtggaggcaattaaacaggtggtcaagcacttgcctaaggcgcatattcttgcctgcgcgccctcgaactcaggcgctgatctgctatgtcagcggctgcgcgtccacctcccttcctctatatatcgcctgctagcgccatcacgggatattcgcatggtccctgaggacatcaagccctgttgtaactgggatgccaaaaaaggagagtacgttttcccagctaagaaaaagttgcaagagtaccgcgtcctgattaccacactgatcacggccggccgtttagtaagtgcccagttccctattgaccactttacccatatttttatcgacgaggcaggtcattgtatggaaccagaaagcctggtcgccatcgccgggcttatggaagtgaaagaaaccggggaccccggcggacagctggtcctcgccggtgacccaagacagctgggccccgttttgagatctccgttgacccagaagcacggcctgggatacagcctgctggagaggttgctgacgtacaattcactttacaagaagggacccgatggctacgacccccagttcatcaccaaacttctgcgcaactaccgctcccatcccactattctcgacatccctaatcagctctactatgaaggcgagttacaggcatgtgctgacgtcgtagacagggagaggttttgtcggtgggcaggtctgcctcgccagggattcccaattatcttccatggggtaatgggcaaggacgaacgcgaaggaaactccccttcattttttaatccggaagaggctgccacagtgacctcctacttgaagcttttactggctccaagctcgaaaaagggcaaagcacgattgagcccacgctcagttggggtgattagtccctatagaaagcaggtggaaaaaattaggtactgcatcacaaagctggaccgggaactgagaggtcttgatgatataaaagatctgaaggtcggatctgtcgaagagtttcaaggtcaggagcgcagcgtcatactgataagcacggttcgctcttcgcagtccttcgtacagttagacctggacttcaatttgggcttcttgaaaaacccaaagagatttaatgttgctgtgacaagagcgaaggccttgctaataattgtgggtaatcctctgcttctgggtcacgacccagattggaaggtcttcctggagttctgtaaagagaacgggggctacaccggctgtccatttcccgctaagctggacttgcagcagggtcagaacctactgcaggggctgtccaaactgtcacctagcacatccggacctcattcccacgattatttaccccaggaacgtgagggtgagggggggcttagcctgcaggtagaacctgagtggagaaacgagctgtag

SEQ ID NO: 195679 - DNA, 3012 bp, synthetic construct
  misc_feature 1..3012: note = Description of Artificial Sequence: Synthetic coding sequence
  source 1..3012: mol_type = other DNA
atgcccagcaagttcagctgccggcagctgcgggaggccggccagtgtttcgagagtttcttggttgtacgtgggctggatatggaaaccgatcgcgagaggcttagaaccatatataaccgcgattttaagatctcctttggcactccggctccaggcttttcaagcatgctctacgggatgaaaattgcgaacctcgcatacgtcactaaaacacgggtcagatttttcagattagatcgctgggcggatgtgagatttcctgagaaacggaggatgaagctaggaagtgacataagtaagcaccacaagagtttgttggctaaaatcttctatgacagagcggaatatctgcatggcaagcacggggtagacgtggaggtacagggtcctcacgaggctagggacgggcagctactcatccgcctggatctcaatcgaaaagaagtgttaaccctgcgcctgaggaatggaggtacccagtccgtgacgctcactcatttgttcccactgtgcagaaccccgcaattcgctttttacaacgaggaccaggagttgccttgcccactaggacctggggaatgctatgaattacacgtccattgcaagacttcgttcgtggggtattttcctgctactgttctgtgggagctgcttgggcctggagagagcggaagcgaaggcgctggcaccttctatatcgccagatttctggccgcggtagcccacagtcctctggcagcccagttaaaacccatgacccccttcaaaaggacgcgtatcacgggcaaccccgttgtcaccaaccgcatcgaagagggcgagagaccagatagagctaagggctacgatctcgagctgagtatggccctcgggacatattatcctcctccccgactgaggcagctgctgcctatgttactgcagggtaccagtatcttcactgctcctaaagaaatcgccgaaataaaggcccagctggagacagcactaaaatggcgcaactacgaggtgaagctgcggcttctcctccatctggaagagctgcagatggaacatgacattcggcattatgacctcgagagtgtacctatgacttgggatccagtcgatcagaacccgcgtctgctgaccctggaggtgccaggagtcaccgagagccggccaagcgtgctcaggggagatcatttatttgcactattaagcagcgaaacccaccaggaggacccaataacatacaaaggcttcgtccataaagtcgaattggaccgggtcaaactgtccttctctatgtctctgttaagccgctttgttgatggactgacctttaaggtgaactttacttttaatagacagcctcttagggtgcagcatagggccctggagttgaccggcaggtggctcttatggcccatgttgtttcctgtggcgcccagggacgtccctcttctccctagtgatgtcaagttaaagctgtacgacagaagcctggagagcaacccagaacaactccaggctatgaggcacatagtgaccggcacaactagacctgctccctatattatcttcgggccccccggcacgggtaaaactgtgactctcgttgaagccataaagcaggtggtgaagcacctgcctaaagcacacatactggcctgcgcaccatctaacagtggggcagaccttctgtgtcagagactgcgcgtccacctgcccagttctatctatcgcctgttggctccttctcgagatatacgcatggtcccggaggatattaagccttgttgcaactgggatgctaaaaaaggggaatatgtgtttcctgccaaaaaaaagctccaggagtatcgggtgctaatcaccacgcttattaccgccggtcgcctcgtctcagcacagttccccatcgatcacttcacacatattttcattgacgaggctggccattgcatggagcccgaatcacttgtagcgatcgcagggctcatggaagtcaaagagactggtgaccctggcgggcagctggttctggccggagaccctcggcagctaggccctgtgcttaggtctcccttgacccaaaaacatggacttggctactcactgttggagcgccttctcacttacaatagtctctataagaagggcccagatggttacgaccctcaattcatcacaaaactgttgcgaaactatcggagccaccccactatcctggacattcctaaccagctgtattatgagggcgagttgcaggcttgcgcagacgtggttgaccgcgagcggttttgtcgctgggcaggcttgcccaggcaggggttcccaatcatcttccatggagtaatgggaaaagatgagcgcgagggaaattcaccaagcttctttaatccagaggaggctgctaccgtaacatcatacctgaagctcctcctggcaccatcctcaaaaaagggaaaggctagactgtcacctcggagcgttggagtcatctctccctatcggaagcaagtagagaaaattaggtactgtatcaccaagctggaccgtgagctaaggggccttgatgacattaaggatctgaaggtaggcagcgtggaagagttccaggggcaggagcgatctgtgatccttattagtacggtgcgctcaagtcagtccttcgtgcagcttgatctcgactttaatctagggtttctgaaaaatcctaaaaggttcaacgttgcggtcacacgagcaaaggctctcctgatcattgtgggtaacccgctccttttggggcacgaccccgactggaaagtctttctcgagttctgcaaggagaatggaggatacacaggatgtccctttccagctaaactggaccttcagcaggggcaaaacctactgcagggactgtccaagctcagtccgagcacctccggacctcacagccacgattatctaccccaggaacgggagggtgaggggggcctgtcactccaggtcgaacctgaatggaggaatgaactgtag

SEQ ID NO: 195680 - DNA, 171 bp, synthetic construct
  misc_feature 1..171: note = Description of Artificial Sequence: Synthetic coding sequence
  source 1..171: mol_type = other DNA
atgcccagcaagttcagctgccggcagctgcgggaggccggccagtgtttcgagtcctttctagttgttaggggcctcgatatggaaacggatcgcgagcgccttaggactatctacaacagggacttcaagatttctctggctagttccaagtcgatcctgcagagttag

SEQ ID NO: 195681 - DNA, 3636 bp, synthetic construct
  misc_feature 1..3636: note = Description of Artificial Sequence: Synthetic coding sequence
  source 1..3636: mol_type = other DNA
atgctgagcctggccgccaagctggtggccttcttctggcggaccgccgacacacccagggaagaggctggccagctggaacccgagctggccgagggagatacgaagctgaagaccgtcagaggtgtggtgacccggtactgctccgactacggaatgattgacgacatgatttactttagctctgacgccgtcacctctagagtgctgctcaatgtgggtcaagaggtcatcgctgtggtggaagaaaataaagtgtccaatggcctaaaggccatcagggtggaagctgtgagtgacaagtgggaggatgactcccgcaaccatgggagtccatctgactgcggccccagagtcttaatcggctgtgtgacatcactggtggaaggcgctgggtgtatctctcaaaccacttacttttcactggaatctgtgtgcgaaggtttcgagccttgcaaaggcgactgggtggaggcagagtaccgcatccgccccggaacatggtcaagcgaggcgacaagtgtaaagcctcttcggtacaagagggttgataaggtgtgcatatctagcctctgtggtcgaaacggagtcctggaagagagcatattctttacgctcgacagtttgaagctgcctgacggttacactccgagaaggggcgacgtggtaaacgcggtggtcgtcgaatccagccagtcatgttacgtgtggcgggcgttatgcatgacgctcgtgaaacgccgggacgcggccccagtccacgaggccacccacttttacggcactattctgctgaaaaacaaaggagatatcgaggtgacacaggttacccacttcggcacactgaaagaggggcgcagcaaaaccatggtgatatggatcgagaataagggggatatacctcagaacctggtgtcttgtaaactggccggctgggacaagtccaagcagttccgcttccagatgctagataaggaccagatgtgtcccgtggtgtcctttgtctctgtgccagaaaaggagaacagctcggatgaaaatatcaattccttgaactcccacacaaagaataaaacttcccagatgagcgagagctcactagtcaacaatcgaggaatctcaccaggcgactgcacgtgcaaaggggaaaatggcgagaaggataacatcctgagccggaaacaaatgaccgagcccgaacccggagggctagtcccccctgggggtaagacatttatagtagtgatttgtgacgggaagaatccgggccgttgcaaagaacttctgctgctgtgtttcagtgacttcctgattggtaggtacctcgaagtcaatgtgatttccggcgaagaaagcctgatcgcagccagggaacccttctcttggaagaagctcaagtcttcacaagctttgacctcagctaagaccacagtagtggtgaccgcacagaaacgaaattcaagaaggcaactccctagcttcctgccgcagtacccaattcctgacaggctgcggaaatgcgtcgaacagaagattgacatcctgacgttccagccactgctcgctgaattgctaaatatgtcaaactacaaggagaaatttagcaccctgctgtggcttgaagagatttacgccgaaatggagctaaaagagtataacatgtctggaattatcttgagaaggaatggcgaccttctcgtgctggaagtccctggcctggctgagggtaggccctccctatatgctggagataagctgattctcaaaactcaggaatacaacggtcatgccatcgagtacatctcatacgtgacagaaattcacgaggaagatgtgaccctcaagattaacccagaattcgagcaagcatacaatttcgagcctatggacgtggaatttacttacaatagaacaaccagtaggcgatgccactttgccctggaacacgtgatccatctcggcgtcaaagtcttgtttcctgaagagattatcttacaatcaccccaagtgaccggcaattggaatcatgctcaggacacaaagtcaagtggtcagtccaccagcaagaaaaatagaaaaactatgacagatcaagcagagcacggcactgaggaaagaagggtgggcgacaaggaccttcctgtgctcgcccctttcaccgcagaaatgtccgactgggtggacgagatacagacgcccaaagcccggaaaatggaattcttcaatcctgtcttgaatgagaaccaaaaactagctgtgaagaggatcctctccggcgactgccggccgttaccctacatcctatttggaccgcctgggacaggtaagacagttaccattatcgaggccgtgcttcaggtgcactttgctctgcctgactcgagaatattagtgtgtgcccctagcaactcagctgctgatttagtttgtctccgcctgcatgagagcaaggtgctccagccagcgacgatggttagagtaaacgccacatgtagattcgaggagatcgttattgatgccgtcaaaccatactgcagggatggagaggatatctggaaggcttccaggtttaggatcattatcaccacttgttcgtcctctggcctgttctatcaaatcggcgtcagagtcggccacttcacccatgtgtttgtcgacgaggcaggtcaggcctctgagcctgagtgcctgatccccctgggcttaatgagcgacatcagtggacagattgtgctggccggtgaccccatgcagctggggcccgtgatcaagtcccggctggccatggcttatggccttaatgtgagctttctggagagactcatgtctaggcccgcctatcagcgggacgagaatgccttcggggcctgtggcgctcacaatcccctgctggtcactaaactggtgaagaactacagatcacatgaagctctgcttatgctgccgagcagactgttctaccaccgcgaactggaagtgtgcgccgatcctaccgtggtcacttccctcctgggatgggagaagctgcccaagaaagggttcccactgatcttccacggcgtcagagggtcagaagcgagggagggaaaatcaccctcatggtttaatcctgccgaggctgtccaagtgctgcgctattgttgcttgctcgcacacagcatcagctctcaggtaagtgccagcgatatcggagtgattactccatacagaaaacaagttgaaaagattcggattctgcttagaaatgtggatctcatggacataaaagtgggaagcgtcgaagaattccagggccaggagtatctcgtgattattatctccaccgtgcggtctaatgaggacaggtttgaggacgacagatacttcctgggcttcctttccaactccaaaagattcaacgtggccatcacacggcccaaagccctcttaatagtgctcggaaatccacacgtgctcgttcgagacccctgtttcggggccttgctcgaatatagcataacaaatggtgtttatatgggctgtgatctgcctcccgccctgcaatccttgcaaaattgcggcgagggcgtagctgacccttcctatccagttgtgcctgaatccacggggcctgagaaacaccaagagcccagctag

SEQ ID NO: 195682 - DNA, 378 bp, synthetic construct
  misc_feature 1..378: note = Description of Artificial Sequence: Synthetic coding sequence
  source 1..378: mol_type = other DNA
atgagcgacatcagcggccaggtgaccaagctggtgaagaactaccgctctcatgaggcattactcatgctgccatcacggttgttttaccacagagaactggaggtgtgcgcagaccctacagtggtgacatcactcctgggctgggagaagctccctaaaaaggggtttccattgatcttccacggtgtacggggtagtgaggccagagagggcaagagcccatcttggtttaatcctgctgaggctgtccaggtactcaggtactgttgtctccttgctcactccatctcaagccaggtgtctgcctccgatatcggggtcatcacaccatatcggaagcaggttcgtcccgcccaagcaagattagttttatag

SEQ ID NO: 195683 - DNA, 378 bp, synthetic construct
  misc_feature 1..378: note = Description of Artificial Sequence: Synthetic coding sequence
  source 1..378: mol_type = other DNA
atgagcgacatcagcggccaggtgaccaagctggtgaagaactacaggtctcatgaggccctcttgatgctgcccagccgtttgttctatcaccgggaattagaagtgtgcgccgatcccacggtcgtcaccagcctgctcgggtgggaaaagttacctaaaaaaggctttcccctcatcttccatggagtgcggggcagcgaagcgcgcgagggcaagtctccaagttggttcaatcctgccgaggcggtccaagtgctaaggtactgctgtcttttagctcacagtatatcctcccaagttagcgcttccgatatcggtgttattacgccttaccgtaaacaagtgaggcccgctcaggcccgccttgtgctgtag

SEQ ID NO: 195684 - DNA, 1017 bp, synthetic construct
  misc_feature 1..1017: note = Description of Artificial Sequence: Synthetic coding sequence
  source 1..1017: mol_type = other DNA
atgttccgggtgggccacttcacccacgtgttcgtggacgaggccggtcaagccagcgagcccgaatgtctaatccccctgggactcatgtccgatataagcgggcagatcgtgcttgctggtgatccaatgcagctgggccccgttattaagtccagattggcaatggcatatggcctcaacgtcagctttctcgaaagactgatgtctaggccagcttaccagcgggacgagaacgcattcggcgcatgcggcgcgcacaacccccttttggttactaaactcgttaagaattaccgatcccatgaagctctgctgatgcttccctctcgcttgttctaccatcgcgagttggaggtttgcgccgatcccacggtggtgacttcattactcggatgggaaaaactgccaaagaaagggttccctttaatctttcacggtgtccgtgggagtgaagcccgtgaagggaaatctccctcatggtttaaccccgccgaggccgtccaggttctccgttattgctgcctcctcgcacactcaatatccagtcaggtttcggcatctgacatcggagtgattaccccttatagaaagcaggttgaaaagattaggatactgctccgcaatgtagacctcatggatatcaaggtcgggtccgtggaagagtttcagggccaagagtacttggtcatcataattagcaccgtgcggtctaatgaagatcgtttcgaagacgaccgatacttcctgggatttctcagtaatagtaaacggttcaacgtcgccatcacccgtcccaaggccctgttaattgtgctgggaaaccctcatgtgcttgtccgcgatccctgttttggtgccctcctggaatactcaatcacaaacggggtatatatgggctgtgacctcccacctgccttgcagtcactgcagaattgcggcgagggggtcgcagatcctagctacccggttgtcccagagtctacaggacctgagaagcatcaggaaccaagttag

SEQ ID NO: 195685 - DNA, 3498 bp, synthetic construct
  misc_feature 1..3498: note = Description of Artificial Sequence: Synthetic coding sequence
  source 1..3498: mol_type = other DNA
atgctgagcctggccgccaagctggtggccttcttctggcggaccgcggatacaccacgcgaggaggccggacagctcgagccggaattggcagagggtgacacaaaacttaaaaccgttagaggggttgtgacgcgctattgctccgattacggcatgattgatgacatgatttacttcagtagtgatgctgtcaccagcagagtcctgttaaatgtgggccaggaagtgattgctgtggtcgaagagaataaagtgtccaatggactgaaggccatccgggtggaagccgtgtctgacaagtgggaagatgactcccgcaaccacggctcaccaagcgactgtggaccacgcgtgcttataggctgtgtgacgtcacttgtcgagggcgctggatgcatcagccagacaacttacttttccttggaaagcgtgtgtgaaggctttgagccctgcaaaggagattgggttgaggccgagtaccgcatcaggccgggaacctggtccagcgaggccacgtccgtgaaacctttgaggtataagcgtgtcgacaaggtctgtatttcgtcactttgcggacggaatggagtgctcgaagagtccattttcttcactctcgatagcttgaaactccctgacggttacacaccgcgtcgaggcgacgtggtgaacgcagtggtggttgaatcttcccagtcgtgctatgtgtggcgagccctctgcatgaccctcgttaaacgcagagatgcagctcctgtgcatgaggccactcacttctacggcaccatcctgctgaagaacaaaggagatattgaggtcacccaggtaacgcacttcggtacattaaaggaaggacgaagcaaaactatggtaatctggatagaaaacaagggggacattccacagaatctggtctcatgtaagctggcaggttgggacaagagcaaacagttccggttccagatgctggacaaagaccagatgtgtcctgtcgtgagtttcgtcagtgtccccgagaaagagaatagtagcgatgagaatattaattccctgaatagtcacacaaaaaataagacctcccagatgagtgaaagctctctggtcaacaatagaggtataagcccaggagactgcacttgcaaaggggagaacggcgagaaggacaatatattgagtcgcaaacagatgacagaaccagagcctggggggctggtcccccccggtggcaaaaccttcatcgtggtcatttgcgacgggaagaatcccggtcgctgcaaagaactgctgctgctttgtttttccgattttttaattggcaggtacctcgaagtaaacgtgatcagcggggaggaatctctgatagctgcacgggagcccttttcttggaagaagctgaagtcgagtcaggctcttacttcagctaaaaccaccgttgtcgttaccgcacaaaagcgaaattctcggagacagctgcccagcttcctgccacaatatccgatcccggacagacttagaaaatgcgtcgaacagaaaatcgacattttgacgttccagcccctcctggcggaactgttgaatatgagcaattacaaggagaaatttagcactcttttgtggttggaggagatctacgctgagatggagctgaaagagtacaatatgtccgggattatcctgagaagaaacggggacttgctagtgttagaagtgcctggcctggctgagggtcggccctccctgtacgcaggagacaagctgatcttgaagacgcaggaatataacgggcatgcgatcgagtacatttcttacgtgactgaaatacacgaggaggatgtgactcttaagataaaccctgagttcgagcaggcttacaattttgaaccaatggacgtggagtttacatacaataggaccacttcaagacggtgccactttgctctggagcatgtaatccacttaggggtgaaagtcctattccccgaggagataattctgcagtcccctcaggtgaccggaaattggaaccatgcacaggatacaaagtcctccggtcaaagcacatccaaaaagaatcgcaaaactatgacagaccaggccgagcatggcaccgaggagcgtcgtgttggcgacaaagacttgcccgttcttgctccttttacagctgagatgagtgactgggtggacgaaatacaaacacccaaagctagaaaaatggagttctttaacccagtgttaaacgaaaatcagaagttagctgttaagcgaatcttgagtggcgattgccggcccctgccctacatcctcttcggtccccccggaactgggaaaacagtcaccattattgaagcagtgcttcaggtgcatttcgcactccccgacagccgtattctggtctgcgcaccatccaacagtgccgccgacttggtgtgtctccggctgcacgagtccaaggtgttgcagccggctaccatggtcagagtgaacgctacttgtcggttcgaggagattgtaatcgacgccgtcaagccctactgccgtgatggggaggatatctggaaggctagccgattccggatcattatcactacttgctcttcaagcgggcttttttatcagatcggcgtcagggtagggcattttacgcacgtgtttgtcgatgaagctggtcaagcatctgagcctgagtgcctgataccgttgggcttgatgagtgatatctccggtcagattgtactcgccggcgaccctatgcagttaggccctgtcatcaaatcacgtctggccatggcctatggccttaatgtgagctttttagagaggctcatgtcacggcccgcgtaccagagggacgagaacgcgttcggggcatgcggggcacataatccactactggtaactaagctggtcaaaaactataggtcacatgaagccttattgatgttacccagcaggctgttttaccacagggagctagaagtatgcgccgacccaacggtggtgacctcactcctcggctgggaaaagctccccaagaagggctttcctttgatctttcacggagttagggggtccgaagcccgtgaaggaaagagcccgagctggttcaaccctgccgaagctgttcaggtcctcaggtactgttgcttgttggcccattcgatttcgtcccaggtgagtgcctccgacattggcgtcattacaccatatcggaaacaggttgaaaaaattagaatcctgctccggaacgtcgatcttatggatatcaaagtaggttccgtggaagagttccagggtcaagagtatcttgtgattatcatttccaccgatccctgtttcggagcactcttagaatattccatcactaacggggtttacatgggctgcgacctaccccccgccctccagagtctgcaaaattgtggggaaggcgtggccgatccgtcctaccccgttgtccctgagagtaccggaccagagaaacaccaggagccaagttag

SEQ ID NO: 195686 - DNA, 636 bp, synthetic construct
  misc_feature 1..636: note = Description of Artificial Sequence: Synthetic coding sequence
  source 1..636: mol_type = other DNA
atgagcttcctgcccgtgcggagcgtgatcggcggcggcgacaccaagctcaaaacagtccgaggggtcgttacaaggtactgctctgactatggcatgatcgacgacatgatatacttctcaagtgacgccgttacctcccgagtgttgcttaatgtgggtcaggaggttatcgccgttgtagaagagaacaaggtctccaacggtctgaaggccattcgtgtggaggctgtgagcgacaagtgggaggatgatagtaggaatcacggaagcccgagcgattgtggccctcgggtgctgatcggatgtgtcacctcgttggttgaaggtgccggctgcatttctcagactacttacttctccttggagtcagtttgtgagggattcgaaccatgtaagggagattgggtagaagcagaataccgcatccgtcccggcacctggtcttcagaggctacgtctgtgaaaccgctgcgctataagagggtggacaaagttgcatgtcggttagtggcccccctgtgtgccagcggccggccagcgatccgtggcaacctccacggtccgggtttttcctgtatgtgttggaagcccgggaagatcaagctctgccacgggcagcgcgagaaaaaatag

SEQ ID NO: 195687 - DNA, 3498 bp, synthetic construct
  misc_feature 1..3498: note = Description of Artificial Sequence: Synthetic coding sequence
  source 1..3498: mol_type = other DNA
atgagcttcctgcccgtgcggagcgtgatcggcggcggcgacaccaagttaaaaacagttcgtggagtcgtgacacggtactgttccgactacggcatgatcgatgatatgatctacttctcgtctgacgcggtgaccagcagagtcctgttgaatgtaggacaggaagtcattgctgtggttgaagagaataaagtgagcaacggcctgaaagcaatcagggtggaggctgtgtccgataaatgggaagatgactcaagaaatcatggaagcccatctgattgtggtccccgggtgctcattggttgtgtgacaagtctcgtggaaggtgccgggtgtatctctcaaactacatacttctccctggaaagcgtttgcgagggttttgaaccttgtaagggcgactgggtggaggctgaatatcggatacgcccgggaacctggtcatcagaggctacgtcagtaaagccactgagatataagcgggtagacaaggtctgtatttcaagcctgtgcgggcgcaatggcgtgttggaagaaagcatcttttttactttggacagtcttaaacttccagatggctacactccaagaagaggcgatgttgtgaatgctgtggtggtggagtcaagtcaaagctgctatgtctggagggccctgtgtatgacattggttaagagaagagatgccgcgccagtccacgaggctactcatttctacggaactatcctgctaaagaataagggagacatcgaagtgacacaggttactcattttggaacgcttaaagagggtaggtctaagactatggtgatttggatcgagaacaagggcgacattccccagaacctcgtgtcatgcaagttagccggatgggacaaaagtaaacagttcaggtttcagatgcttgacaaagatcagatgtgccctgtagtgagttttgtatccgtacccgagaaagagaactcttcggatgagaatatcaattctctgaactcgcacacaaaaaataagacgtcacagatgtcagaatcaagtcttgtgaataacaggggcatttctccgggcgattgcacgtgtaaaggcgaaaatggtgaaaaggacaacatactgtctcgtaagcaaatgacggagccagagcccgggggacttgtgccacccggaggcaagaccttcatcgtggtaatatgtgacgggaagaaccccggaagatgcaaagaactgcttctcctgtgcttttccgacttccttatcggacgttatctcgaggtcaatgtgatttctggcgaggagtctctcatcgctgcacgcgagcccttctcctggaaaaagctcaagagttcccaggcattaacttccgctaaaacaactgtagtggttacagcccagaagaggaacagccgtaggcagctcccttcatttctgccacagtacccaattccagacagactaagaaaatgcgtggagcagaaaattgacatactcacatttcagcccctgctggcagaactgctcaatatgtcaaactacaaggagaaattcagcactctcttgtggttagaagagatttatgcggagatggaactgaaggaatacaacatgagcggcataattctgcgcagaaatggagacctgttggtactagaagtcccaggcttggccgagggacgcccaagtttgtacgccggcgacaaactgatactcaagacccaggagtataacggtcacgcaatagagtacattagttacgtgacggagatccacgaagaagacgttactctcaaaatcaaccctgaattcgagcaggcctacaatttcgagccgatggatgtggaattcacatacaataggacgacctcacggaggtgtcattttgcgctggagcacgttatccatctcggcgtcaaggtcctcttccccgaagagataattcttcagagtccacaagtcacaggcaattggaatcatgcacaagacaccaagtcaagcggccaaagtacctccaaaaagaataggaaaacgatgaccgatcaggctgaacatggcacagaggagaggagggttggagacaaggatttgcctgtgctggcaccgtttacagcagagatgagcgactgggtcgacgaaatccagaccccaaaggcccggaagatggagttttttaatccagttctaaacgaaaatcagaagctagcagttaagagaatattgtctggggactgtcggccgctgccttacatactcttcggccccccaggaactggcaaaacagtgactattattgaggccgtactgcaggtgcactttgcccttcctgactcccgcatcctggtctgtgccccttccaattcggcagccgaccttgtgtgcctgcgcctgcatgaaagcaaggtcctgcagcccgccactatggtgcgagtgaacgcaacttgccgtttcgaagaaattgtgatagacgctgtgaaaccgtactgcagggatggcgaggacatttggaaggcatctcggttccgtatcatcatcactacatgtagctccagcggactgttctatcagatcggagtccgggtgggccactttacacacgtctttgtggatgaggctggccaagcaagcgaaccggaatgtttaattcctctgggtctgatgagtgatatttctggccaaattgttctggcgggcgaccccatgcaactcggtccagttataaagtctcgccttgccatggcatacggcctcaatgtgtctttcctcgagcgcctgatgagccgacctgcatatcagagagacgagaacgcgttcggggcttgcggggcccacaatcctttgttggtcaccaaactcgtcaaaaactatagatctcatgaagccctgcttatgctacctagtaggctgttttaccaccgggaactggaggtgtgtgctgacccaactgtggtgacatctctgctgggctgggagaaattacccaaaaaggggttcccattgatctttcacggcgtccgcggctccgaggcccgggaaggtaagagcccctcatggttcaatccagcagaggcagtccaagtccttaggtactgttgcctgctggcacacagcatcagctcacaagtcagcgccagcgacattggcgttatcaccccttacaggaaacaggtcgagaagatccgaatacttctcaggaacgtggacctgatggacattaaggttggaagtgtggaagaatttcagggccaggagtacctcgtgatcattattagcacagtaagatcaaatgaggatcggttcgaagacgatcgctatttcctagggttcctgtcgaactcaaagcgtttcaatgtggccatcaccagacccaaggctttattgattgtccttggaaatcctcatgtcttagttcggctctggcgcggaggtggaagacccctactaccttcaggcgctcgtatccaccggacccgcgaggcaagtggggcccagctgatctgctccggctag

SEQ ID NO: 195688 - DNA, 3636 bp, synthetic construct
  misc_feature 1..3636: note = Description of Artificial Sequence: Synthetic coding sequence
  source 1..3636: mol_type = other DNA
atgctgagcctggccgccaagctggtggccttcttctggcggaccgccgatacaccaagagaagaggccggccagcttgaacctgagctggctgaaggcgatactaaactaaaaacagtgcggggtgtggtgacaaggtactgctccgattacggcatgattgacgacatgatatacttttcctctgacgccgtcacgtcccgggtgttgctgaacgtaggacaagaggttatagcggtcgtcgaagagaacaaggtctcaaatggcttaaaggcgattcgggttgaggcagtttcagacaagtgggaggatgattctcgtaatcatggttcaccctccgactgtggtccgcgggtgctgattggctgcgtcacctccctagtggagggagcggggtgcattagccagaccacgtacttttcactggagagtgtatgcgaggggtttgagccatgcaaaggggactgggttgaagctgagtaccgtatccgtccgggaacgtggagtagtgaagctacttccgtcaaacctctgcgttataagcgggtcgacaaggtgtgcatatcttcgctgtgcgggaggaatggggtgctagaagagagtatattttttaccctggattccctcaagctgccggatgggtacacaccaagacggggagatgtggtgaatgcagtggtggtggaatcctcccagtcctgttatgtgtggcgcgccctgtgcatgaccctcgtgaagaggagagacgccgcaccagtgcacgaggccacacacttctacggcactatactgctcaagaacaagggcgacattgaggtgacacaggtgacccacttcggtaccctgaaagagggaaggagcaagaccatggtcatttggatagagaacaagggagacattccacagaacctggtgagctgtaagcttgctggctgggataagtccaaacagttcagatttcaaatgctcgacaaagatcaaatgtgtccggtagtctcctttgtctccgtacctgagaaggagaacagtagtgatgaaaatattaatagcctgaactctcataccaaaaataagacaagccagatgagtgaatcaagcctggtgaacaacaggggaatctcccctggagactgtacctgcaagggagaaaatggggaaaaagacaacatcttgtctagaaagcaaatgacggaacccgaaccaggcggtctggtacctccaggaggcaagacctttattgttgtgatatgtgatgggaaaaatcctggccgttgcaaagaactgttacttctgtgttttagcgatttcctgattgggcgatacctggaggtcaacgtgattagcggcgaggaatctttaattgccgcgagggagcctttcagctggaaaaagctgaaatcatcacaggcattgacttccgccaagaccaccgttgttgtgaccgcacaaaaaaggaactctagaaggcagttaccttcattcctgccgcagtatccaatccctgaccggctgcggaaatgcgtagaacagaaaatagacatcctcacgtttcagccgctccttgccgagttgctcaacatgtccaactacaaagaaaagttcagcactctgctatggctcgaggagatttatgctgagatggaattaaaggaatataatatgagcggaattattttgcggcgaaacggcgatttgctggtgctggaggttcccgggctggccgagggacgcccttcgctgtatgccggtgacaagctaattctgaagacacaggaatataacggacatgccatagagtacattagttacgtgacagaaatccatgaggaggacgttactctgaaaattaatccggaatttgagcaggcttacaattttgaaccaatggatgtcgagttcacctacaacaggacgacctccaggagatgccacttcgcgctcgaacacgtgatccatctgggtgtgaaagtgctcttcccagaggaaattattctgcaaagtcctcaggtcactggcaactggaaccatgcacaagacaccaagtctagtggtcaatcaaccagcaagaagaaccggaaaacaatgaccgaccaggcggaacacgggacagaagagcgccgggtaggtgataaagatctcccagtcctggccccctttaccgcagaaatgagtgattgggtggacgagattcagaccccgaaagcacgtaaaatggaattcttcaatccggtgctcaatgagaatcagaagctcgctgtcaagcgcattttgtctggagactgccgaccactgccatatattttatttggccctcccgggactggcaagaccgttaccataatcgaggctgtgttgcaggtgcatttcgccctgccagactcacgaatcctggtgtgtgccccatccaattccgccgcggacttagtgtgcctcagactccacgaatctaaagtgttgcaaccagcaactatggtcagagtgaacgccacttgtcggtttgaagaaatcgtaattgatgccgtcaaaccctactgccgggacggggaggacatatggaaggcttctagatttcgcataatcatcacaacatgttctagtagcgggctgttctatcaaattggggttagggtcggccactttacccacgtcttcgtggacgaagccgggcaggccagcgagcctgagtgcctcattcccctggggctgatgtcagatatttccggccagattgtgctggcaggtgatcctatgcagctgggacccgtgatcaagtccaggctggctatggcatacggcctcaatgtgtcttttctagagaggctgatgtctcggcctgcatatcagcgggatgagaacgcctttggagcgtgcggcgcacacaaccctctattggtaaccaaactggttaagaattacaggtctcacgaagctctgttgatgttaccatctaggctgttctaccatcgagagctagaggtttgtgctgatcccacagttgtaacatccctcctaggatgggaaaaactgcccaagaagggattcccactcatcttccatggggtgaggggctccgaagcaagagaaggcaaaagtccatcctggttcaatccagccgaggccgtgcaggtgctgcgttactgttgcctcctcgcccactccatctcgtcccaggtgtctgcctctgacattggggtgattactccctaccgcaaacaggtagaaaaaattaggattctgctgcggaacgtggatctcatggacataaaagtgggatctgtcgaggaatttcaggggcaggagtaccttgttattataatatcaacagtcagaagcaatgaggaccggtttgaggatgaccgctatttccttggtttcctgagcaactccaagcggtttaatgtcgcaattacacgccccaaggcccttctgattgtcctcggcaatccccatgtgcttgttcgggatccatgttttggtgctttattggagtactctattacaaatggtgtatacatggggtgtgatctcccacctgctctccagtcattgcagaactgcggagagggtgttgcagacccatcctatcccgtggttcccgaaagtaccgggccagaaaagcaccaggaaccttcctag

SEQ ID NO: 195689 - DNA, 483 bp, synthetic construct
  misc_feature 1..483: note = Description of Artificial Sequence: Synthetic coding sequence
  source 1..483: mol_type = other DNA
atggccgccgagcggaagacccggctgagcaagaacctgctgcggatgaaattcatgcagagaggactagatagcgaaactaaaaagcagctcgaggaagaagagaagaagataatttccgaggaacattggtatttggatctcccagagctaaaggagaaggagtcattcattattgaggagcagagctttctcctgtgcgaggacctgctctatgggcggatgtcatttcgggggttcaaccccgaagttgagaaactcatgctgcagatgaatgccaagcacaaagcggaggaagtcgaagatgagacagtggagctagacgtctcggacgaggagatggctcgtcgctatgagactctggtcggaacgatcgggaaaaagtttgcccgcaagcgggatcacgccaactacgaggaagatgaaaatggtgacattaccccaataaaagcgaaaaagatgttcctgaaaccacaagactag

SEQ ID NO: 195690 - DNA, 627 bp, synthetic construct
  misc_feature 1..627: note = Description of Artificial Sequence: Synthetic coding sequence
  source 1..627: mol_type = other DNA
atgaaggcctgcaagcggggcaacagcgacatcgtgcggctggtgatagagtgcggcgcagattgcaacatcttgagcaaacaccagaatagtgccctgcacttcgccaaacaatccaataatgtcctggtgtacgacctcttaaagaatcacctggaaactctcagtagagtcgcggaagagaccatcaaggactactttgaggcccgccttgccctgcttgagccagtctttcctattgcatgccatagattgtgtgagggacccgatttttctaccgatttcaactacaagcccccccagaacatcccagagggctctggcatactgctgttcatctttcatgcaaatttcctgggcaaggaggttatcgcaaggctctgcgggccatgtagcgtccaagcggtcgtgcttaacgataaattccagctccccgtcttcttgaccggatctcgaagcgtggtgcaagcgggcgttcagtggcgcggcctgcagctgacgggagtccttacttcgcaagctcaggcaattttgcccccacagcctccgaactacctagggctcaagatgaccgtgatactgttcacccattcagctttgctccaggtgccgatcaactcgagctag

SEQ ID NO: 195691 - DNA, 2583 bp, synthetic construct
  misc_feature 1..2583: note = Description of Artificial Sequence: Synthetic coding sequence
  source 1..2583: mol_type = other DNA
atggagcaggtggccgagggcgcccgggtgaccgccgtgcccgtgagcgccgcggatagtactgaggagctggccgaggttgaggaaggggtgggggttgtgggggaggataacgatgcggccgctcgcggagccgaagccttcggagatagcgaggaggatggtgaagatgtattcgaggtggagaaaatcctagatatgaaaacagagggaggcaaggtgctttacaaggtgcgttggaagggctacactagcgacgacgacacctgggagcccgaaatccatctagaggattgcaaggaggtgttgcttgagttcagaaagaagatcgccgagaataaagccaaagccgtcagaaaagatattcagagactcagcctcaacaacgacatcttcgaggcgaactctgattcagatcagcagagcgagacaaaagaggacacctctccaaaaaaaaagaagaagaaactgcggcagagagaggagaaatccccggatgatcttaaaaagaagaaagctaaagccggcaagttaaaggacaaatctaagccagatctggagtcgtccttggagtctctagtcttcgatttacggacgaaaaaacgcatttccgaggccaaggaggagcttaaggagagcaagaaaccaaagaaagacgaggtgaaggaaaccaaagagttgaaaaaggtaaagaagggcgaaattcgggatctgaaaaccaagactcgggaagaccctaaagaaaatagaaaaactaagaaagagaagtttgttgagtcgcaggttgagtctgagtccagcgtgctcaacgattctccctttccagaggatgactccgagggactgcattctgacagcagggaggagaagcagaataccaagtccgcccgggaaagggccgggcaggatatggggcttgagcacggatttgaaaaaccacttgacagtgccatgagcgccgaagaagataccgatgtacgaggaaggaggaaaaagaaaacaccaagaaaagccgaggatacccgagaaaatcgaaaactcgagaataaaaatgcatttttagagaagaaaaccgtgccaaaaaagcaacgcaaccaagaccggagcaagagtgctgcggaattggaaaagctaatgcccgtctccgcccagacccccaaaggccgcagactctcgggtgaagagagagggctctggtccactgattccgccgaagaagacaaagaaaccaagcggaacgagtcaaaagagaagtaccagaaaagacacgacagcgataaggaagagaaggggagaaaagaaccaaaagggctcaaaactttaaaggagataaggaacgcctttgacttgtttaagcttacacccgaagagaagaacgatgtctctgagaacaacagaaaacgcgaagaaattcccctggattttaaaacgatcgatgaccacaaaacaaaagagaataagcaatctctgaaggagcgaagaaatacaagagatgaaaccgatacttgggcctatatcgccgcggaaggggaccaggaggtgctggatagtgtttgccaggccgatgaaaattcagacgggaggcagcaaattctgtctctgggaatggatctgcagctggaatggatgaaactcgaagacttccaaaagcatctcgatggcaaagatgagaatttcgccgccaccgacgccatcccaagtaatgttctccgggatgcagtgaagaatggcgactatataacagttaaagtcgccctcaattccaacgaggagtataatctcgatcaagaagacagctcaggtatgaccctggtaatgctagcggctgcgggagggcaggacgatctactgcgcctcctcattactaaaggagctaaggttaacggtcgccaaaagaacggaacaaccgccttaatccatgcagcagaaaagaatttcctaactactgtagctatcttgttggaggcaggagccttcgtcaacgtccagcagagtaatggtgagacagcactgatgaaagcttgtaagcgagggaatagtgatatagttcggctggtgatcgagtgcggcgctgattgcaatatactctccaagcaccagaattccgccttgcacttcgccaaacagtctaacaacgtcctggtgtatgatcttcttaagaatcacctggagacgctttcgagagtcgcagaagagacgattaaagattacttcgaagcgcgcttggcacttctggagccggtcttcccaatcgcttgtcatcgactctgtgaaggtcccgatttcagcactgacttcaattataaacctccacagaacatccccgaaggatccggtattctgctttttattttccatgccaacttcttaggtaaggaggtaattgcccgcctgtgcggaccatgcagcgtgcaggctgtggttctaaacgataaatttcagctccccgtttttctggatagtcactttgtgtacagcttctcgccagtagctgggccaaacaagctgttcatcagattaaccgaggccccttctgctaaggttaagctgctgatcggagcctaccgagtccagttgcagtag

SEQ ID NO: 195692 - DNA, 2604 bp, synthetic construct
  misc_feature 1..2604: note = Description of Artificial Sequence: Synthetic coding sequence
  source 1..2604: mol_type = other DNA
atggagcaggtggccgagggcgcccgggtgaccgccgtgcccgtgagtgcggctgactctacagaagagctcgctgaggttgaggaaggggttggagttgtcggtgaggacaacgacgctgctgcaaggggagccgaggccttcggcgatagcgaggaagatggtgaagatgtgttcgaagtggagaaaattctggatatgaagaccgaaggcggtaaggtgctgtacaaagtccgctggaaggggtacacaagtgacgacgacacctgggaaccagagatccacctggaggattgcaaagaggttctgctggagtttcgaaaaaaaatcgcagagaacaaagcgaaggcggtccgtaaggatatccagaggctgagtcttaataacgacatttttgaggctaactctgactcggatcagcagtctgagaccaaggaagacacaagccccaaaaaaaagaaaaagaaacttaggcagcgggaagagaaatcccctgacgacttgaaaaagaaaaaggccaaggccggcaaactaaaagacaagtcaaaaccggatctggaaagtagtctagaatcactcgttttcgacctgcggacaaaaaagcggatcagtgaagccaaagaggagttgaaagagtcaaaaaaacccaaaaaggatgaagtgaaagagactaaggaattgaaaaaggtgaagaaaggcgaaatcagggacctgaaaactaaaacgcgggaggaccccaaggagaataggaagactaaaaaggaaaaattcgtcgagagtcaagtggagtccgagtcctccgtgctgaacgacagtccctttcctgaggacgatagcgaaggcttgcatagtgattccagagaagagaaacagaatacgaaatccgcccgggagagggcggggcaagacatgggattagaacacgggttcgagaaacctttagacagcgccatgtccgctgaggaggacaccgacgtacggggacgccgaaaaaaaaagacacccaggaaggctgaagatacgcgcgagaatcgtaaattggaaaataaaaacgcttttctggagaaaaagactgttcccaagaagcagagaaatcaggaccggtccaagtccgccgctgagctggaaaaattgatgcccgttagcgcacagaccccaaaggggaggaggctgagcggcgaagagcgcggattatggtctactgactccgcggaagaggacaaggagacaaaaaggaacgagagcaaggagaagtatcagaaacggcatgattctgacaaggaagagaagggtaggaaagaaccgaagggcttgaaaacccttaaagaaatacggaacgctttcgacctgttcaagttaacccctgaggagaaaaatgacgtgagcgagaacaacagaaaacgggaggagatacctctcgatttcaagacaatcgacgatcacaagactaaagagaacaagcaatccctgaaggaacggaggaacacacgggacgagactgacacctgggcttatatcgcagctgagggagatcaagaggtcctggatagcgtgtgccaggcagacgagaatagcgatggcaggcagcagatactgtcactaggaatggaccttcagttggaatggatgaaattggaggacttccaaaaacacctggacggaaaggacgagaacttcgccgccacagatgccataccaagcaatgtgctacgcgacgcagtcaagaacggtgattatatcaccgttaaagtagctctgaactctaacgaagagtataacctcgatcaggaagacagtagcggaatgacactggtgatgctagccgcagcaggcgggcaggatgacctccttcggctgctgatcactaaaggcgctaaggtgaacgggcggcagaaaaatggaacgaccgctctcatacatgctgcggagaagaattttcttaccacagtggccattctcctggaggccggggcctttgtgaatgtccagcagagtaacggagagaccgctctgatgaaagcctgcaaacgagggaatagcgacatcgttaggctggtgatcgagtgtggtgccgactgcaacattttaagcaaacaccaaaacagcgctcttcactttgctaagcagagcaataatgtgctagtatacgacctgctgaagaaccatctggagaccctttcccgagtggcagaagagactataaaggactacttcgaagctcgacttgccttgctggagcctgtctttccaattgcttgtcaccgcctttgtgagggcccagacttcagtaccgacttcaattataagccaccgcagaatattcccgagggaagcggaatcttgctgtttatcttccatgccaacttccttggtaaggaagtgatcgcacgtctctgcggcccttgttcagtgcaggctgttgtgctcaatgataaattccagctgccagtttttcttacaggctctcggagcgttgtccaggctggggtgcagtggcgtgggcttcaactgacaggagtgcttacctcccaggctcaggccatccttcctccacagcctcctaactatctgggattgaagatgcacgctaccaccagcggatag

SEQ ID NO: 195693 - DNA, 1812 bp, synthetic construct
  misc_feature 1..1812: note = Description of Artificial Sequence: Synthetic coding sequence
  source 1..1812: mol_type = other DNA
atggagcaggtggccgagggcgcccgggtgaccgccgtgcccgtgagcgctgccgattccactgaggaattggctgaggttgaagagggcgttggcgtggtgggagaagataatgacgccgctgccagaggggccgaagcttttggggactctgaggaggacggagaagacgtgttcgaggtggagaagatcctggacatgaagaccgaaggcggaaaagtgttgtataaggtgcggtggaagggctatacatccgacgatgacacctgggagccagagattcatctcgaagactgcaaagaggtgctgctcgagttccgtaagaagatcgccgaaaacaaggccaaggcagtgaggaaggatattcagcgactatcactgaataatgacatttttgaggccaactcggactctgatcagcagtccgaaaccaaggaagacacttcccccaagaaaaaaaagaagaagctcagacagagagaggaaaagtctccagacgacctaaaaaagaagaaggcaaaggcaggcaagctgaaggataagtccaaacccgacctggagagttccctggaatctttagtttttgacttacgaaccaagaagcgcatttcagaggcaaaggaagaacttaaagagtcgaagaaaccgaaaaaggacgaggtgaaagagactaaggagttgaaaaaggttaagaaaggcgaaatcagggatctgaaaaccaagactcgcgaggacccaaaggagaatagaaagacaaaaaaggagaaattcgttgaatcccaagtagagagcgaatcctctgtcctgaacgacagcccctttccagaagacgacagcgaaggccttcatagcgattcacgggaggagaaacagaacaccaagtccgctcgcgagcgggccgggcaggacatgggcctggagcatggcttcgagaagcccttggattccgccatgagtgccgaagaagacacagatgtgcgaggcaggcgaaaaaagaagacacctcgtaaggcagaggacactcgcgagaacagaaagcttgaaaataaaaacgcgtttctggaaaagaaaacagttcccaagaagcagcgcaatcaggacagatccaaatctgcagctgaactcgagaagctgatgcctgtgtccgctcaaacccctaaggggagaaggctctcgggcgaagaaaggggactttggtctactgacagcgcagaggaggataaggaaactaaaaggaatgaatctaaagagaagtaccagaaacgccacgattcggataaagaggagaaggggcgaaaagagccaaagggactgaagacattgaaagagatccgcaatgcattcgatctctttaaactgaccccggaggagaagaatgacgtgagtgaaaacaatcggaagcgcgaagagatcccactcgactttaagaccatcgacgaccacaaaaccaaggagaataagcaaagtttaaaggaacgtcgcaatacaagggacgaaaccgatacttgggcttacatcgcagctgagggcgaccaagaggtgctcgattccgtctgccaggcagatgagaactccgacgggcggcagcaaattttaagcctcggcatggatctccagctggaatggatgaagttggaagacttccagaagcatttagatggtaaggacgagaactttgctgctacggacgccatccccagtaacgttctccgcgacgcggtgaagaagaaaaaaaagaagaagtttctagggacatatacgttctttttattctttttctttgagaaaccggacttagttcctctgttctag

SEQ ID NO: 195694 - DNA, 3087 bp, synthetic construct
  misc_feature 1..3087: note = Description of Artificial Sequence: Synthetic coding sequence
  source 1..3087: mol_type = other DNA
atgggcttcttcagcctgagcagcgagcggaacgagagcgtgatccactatccagagtccacagagcccgaaattcaacaggaaatgagcacttcgcagcctgattgcaatgtcgattcttgctccgtgtcctctggttacgggactttttgcatctccgagctaaacctctataaatctaaggatccaaaagagttcatggagcacatcgacgtcccaaaagggcagtatgtcgccccagctgtacccgcagaaagcctagtggatggagtgaagaatgagaatttctacatccagacccccgaagagtgtcatgtttctctcaaggaggacgtgagcatttctcccggcgaatttgagcataactttttaggagaaaataaagttagtgaagtgtattccggcaaaacaaactcaaatgccattacaagttgggcccagaaacttaaacagaaccagcccaagcgggcacatgttgaagacggaggctctcgctccaaacagggcaacgagcagtccaagaaaacaccaattgagaagagtgatttcgccgccgccacacatccaagggctttctacctaagtaagcctgatgaaactcctaatgcatggatgtctgacagtgggaccgggttgacatattggaagctggaagaaaaggacatgcatcactcactgcctgagactctggaaaaaacctttatcagtttaagttccacagacgtgtccccaaatcagagcaatacgagcaacgagatgaagctgccaagcctgaaagatatttactataagaagcaaagggaaaataagcagctgcctgagcgcaacctcacctcagcctctaatccaaatcatcctcctgaggtgctcaccctggacccaaccctacacatgaagcctaagcagcaaatatcaggaatccagccccacgggctgccaaatgcacttgatgatcgcatcagtttttcccccgattctgtgttggaacccagcatgtccagcccatcagacatcgactccttcagccaggcttccaatgtgacctcacagttgcccggttttcctaaatatccgtcacacaccaaagctagtccagttgattcgtggaagaatcagacttttcagaatgagagtcggacaagtagcacattcccaagcgtttacacgattacgtctaacgatatcagcgtaaatactgtcgacgaggagaatacagtcatggtcgcctctgcctctgtgtcacagagtcagctccctgggacagccaattctgttcccgaatgcattagcctgacatcgttagaagatcccgtgatcctttctaaaataagacagaacctgaaagaaaaacatgcaaggcacatcgctgatctgcgggcctattatgaaagcgaaattaattctttgaaacagaagctggaggccaaagaaatcagcggcgtagaagattggaagattactaaccagatccttgtggatcgatgcggacaactcgatagcgctcttcatgaggcgacttccagagtgagaacactggagaataagaataacttgctggaaatcgaagtaaacgacctgcgcgagaggttctccgcagcctcctccgcatccaagattctgcaggagcgtatagaggaaatgagaaccagttccaaggaaaaagacaacactattatacgccttaagagtcgtctgcaggaccttgaggaggcttttgagaatgcctacaagctgtctgacgacaaagaagcccagctgaaacaggagaacaaaatgtttcaagatttgcttggagagtatgagtcactcggcaaggagcaccgaagggtgaaagatgccctcaacaccacagagaataaattgcttgacgcatatacccagattagcgacctgaaacggatgatatccaaattagaggcccaagttaagcaggttgagcacgagaatatgctgtctctgcggcataattcccgcattcatgttcgccccagtagggcgaacacactggccacgtccgatgtctctcgtcgaaaatggcttattccaggtgccgagtactcaattttcaccggtcaaccacttgatacacaggactctaatgtggacaaccaactggaagagacatgcagcttgggccataggtctcctctggaaaaggactcctcccctgggtcatccagcacaagtctgctgattaagaaacagcgggagaccagtgacactcccattatgagagctctcaaggagctggatgaggggaagattttcaagaattggggcacccaaactgaaaaggaggacacctctaacatcaatccgcggcagacagagacatccgtgaatgcctctcgtagccccgagaagtgtgcacagcagcgccagaagcgattaaactcggccagccaaagatcgtcgtcgttgcctccatccaacagaaagagcagtacgcctaccaaacgcgaaatcatgttaactccagttaccgtggcttactccccaaagcggagccccaaagaaaatctgagtcccgggttttcccacctcttatctaaaaacgaaagtagtcccattagattcgatatcctgttagacgatctcgacaccgtgccagtgtccactctgcagcggacaaacccgaggaaacagttgcagtttcttccactagatgattctgaggagaaaacctactcagaaaaggctacagataaccacgtgaatcatagttcatgtcctgaaccggttcctaacggagttaaaaaggtttctgtgaggacagcctgggagaaaaataaatcggtaagctatgaacaatgcaaacctgtttctgtcactccccagggaaatgatttcgagtatacagccaagatccggaccctggccgagaccgaacgcttctttgatgaactgaccaaggaaaaagatcaaatagaggccgccttatccagaatgccctcacccggcggccgcatcacgctccaaactaggctgaatcaaaccccgcagatctgcgaggagtccagtcataagtgtgcgttcgcgggacattatgtgccatgccatctgtacgattatcgcttccaaggctag

SEQ ID NO: 195695 - DNA, 3096 bp, synthetic construct
  misc_feature 1..3096: note = Description of Artificial Sequence: Synthetic coding sequence
  source 1..3096: mol_type = other DNA
atgggcttcttcagcctgagcagcgagcggaacgagagcgtgatccactatccagagtccaccgagccagaaatacagcaggagatgtccaccagtcaaccggactgcaatgtagacagctgttcggtctcttctggctatggcacattctgcatcagcgagctgaatctttataaatctaaagaccctaaggagtttatggagcacatcgatgtgccaaaggggcagtatgtcgccccagccgtgccagcagagagcctggtcgatggagttaaaaacgagaatttttacatccagactcctgaagaatgccacgtatcgctgaaagaagacgtgagcatcagtcctggtgagttcgagcacaatttcctgggagagaacaaggtctccgaggtttactcgggaaaaacaaacagcaacgccataaccagctgggcccagaagttaaaacagaaccaaccaaaaagagcccatgtagaagacggcggcagtagatccaagcagggcaatgagcagagcaaaaagacccctattgagaagtcggactttgcggcggcgacacatcccagagctttttacctgtcgaagcccgacgagaccccaaatgcttggatgtcagacagcgggactgggctgacttattggaagcttgaggaaaaagacatgcaccacagcctgcccgagactctggagaagacttttatctccctgtcatcgacagatgtgtccccaaatcagagtaacacaagtaatgagatgaagctccccagcctgaaggatatctactataagaaacagcgtgagaacaaacagttgcccgaacgcaatctcacatctgccagcaacccaaaccacccgccggaggtactgactctggacccaactctgcacatgaaaccgaaacaacaaatctccggcattcagcctcacggactgcctaatgcccttgacgatcgaattagcttttcaccagattccgtgttggaaccctcaatgagctccccctccgatatcgacagtttctcacaggcatctaatgtgacatctcagttgcctggtttcccaaaatacccttcgcacaccaaggcctccccagtcgatagctggaaaaaccaaaccttccagaatgaaagtcgaacgagctccaccttccctagcgtgtacactataacttccaatgacatttctgttaacactgtcgatgaggagaacacggtcatggtggccagcgccagtgtttctcagagccaacttcctgggacagctaacagcgtcccagaatgcatctcactgacctccctggaagatccagtgatacttagtaagatcagacagaacttgaaggagaagcacgcaaggcatattgctgatctcagggcttattatgaatccgaaatcaactctttgaagcagaagctagaggcaaaagagatatcaggggtggaagattggaaaattaccaatcagatcctcgtggatagatgtggccagctggactctgctctgcacgaagcaaccagtcgcgtgcgtacactcgagaataagaacaatctgctggagatagaagttaatgaccttagagagagatttagcgctgcctctagtgctagcaaaattctccaggagcgaattgaagaaatgagaacgagctccaaggaaaaggacaatacgatcatacggctcaaaagtcgtctgcaggacctcgaagaggcttttgagaacgcctataagctcagtgacgataaggaggcccaactgaaacaggagaacaagatgttccaagacctccttggggaatacgagagcctcggaaaggaacaccggcgggttaaggatgcgttaaacacaactgaaaataagctgctggatgcttacacccaaatcagcgaccttaaacgtatgataagcaaacttgaggcgcaggttaagcaggttgaacacgaaaacatgctaagtttacggcacaacagtcgcattcatgtaaggcccagcagagccaacacccttgccaccagcgacgttagtagacggaagtggttgatcccaggcgcggagtactcaattttcactgggcagccactcgacacccaggattccaatgtcgataaccagttggaggaaacttgtagtctgggacaccggagccccctggagaaggactccagtcccggtagtagtagtactagcctgctgatcaagaaacagcgcgagacaagtgacaccccaattatgcgggcacttaaagaacttgacgaggggaaaatcttcaagaattggggcactcagactgaaaaagaggataccagcaatataaacccccgtcaaaccgagacgagcgtcaacgcaagccgatctcccgagaagtgcgcccagcagcgacagaaacggctgaactccgcgtcccagaggtcctcttctctgccgccctctaaccggaaatcgagcacccctaccaaacgggagataatgctgacacccgttacagtcgcatacagccctaagcgctcacctaaagagaacttatctcctgggttcagtcatctgctgtctaaaaacgagtcatcccctatcagatttgatatcctgctagacgatctcgacaccgtgccagtttcaaccctgcagcggaccaatcctagaaagcagttgcagtttctgccgctggacgacagcgaagagaagacttactcagaaaaggctactgacaaccacgtcaatcactcttcctgtcccgaaccagtcccaaatggagtcaaaaaggttagcgttcggactgcttgggaaaaaaacaagtctgtctcatacgaacagtgtaagcccgtgtcagttactcctcagggaaatgactttgagtatactgctaaaattaggactttggctgagactgaacgattctttgacgaactcacaaaggaaaaggatcagatcgaggctgctttgtcgaggatgccgtccccaggcgggagaatcacattacagacgcgattgaatcaggaggcgttggaggaccgcttagagcggatcaaccgcgagctcgggtctgtacggatgactttaaaaaagttccatgttctgagaacatccgccaacctgtag

SEQ ID NO: 195696 - DNA, 1167 bp, synthetic construct
  misc_feature 1..1167: note = Description of Artificial Sequence: Synthetic coding sequence
  source 1..1167: mol_type = other DNA
atggagcccagccccgccgccggcggcctggagaccacccggctggtgtctccgcgcgaccggggtggggcggggggtagcctcagactgaagagcttattcactgagccaagtgaacccctccctgaagaaagcaagccagtcgagatgccgttccatcactgtcatagagaccccctgcccccaccagggctgacacctgagcgcctccacgcccggagacaactgtacgctgcgtgtgccgtgtgctttgtgttcatggctggtgaggttgtaggggggtatctggctcactccctcgctattatgactgatgcggcacacctgctggcggacgttggttctatgatgggatcacttttctccctgtggcttagcacccgtcccgctacccgtaccatgacctttgggtggcaccggtcagaaactctcggggccctcgcatctgtcgtctctctgtggatggtgactgggatcctgttatatctcgcttttgttcggctcctgcactccgattaccatatcgagggaggagccatgttgttaacggcaagcattgcggtttgtgcaaacctgcttatggcgtttgtcctccatcaagccgggccaccacacagtcacggctcccgtggagctgagtacgcgcctctggaggaagggcctgaagaaccattgccccttggcaatactagcgtccgggccgcattcgtgcacgtactgggggacctgcttcagtccttcggcgtgctcgccgcttccatattgatttactttaagcctcagtataaagccgctgatccaatctctacatttctgttcagcatctgtgcattagggtcaaccgcccccactttgcgcgatgtgctaaggattctgatggagggcacaccccggaacgtgggatttgaacctgttcgtgacaccctactgagcgtgccaggggtcagggccactcatgaactgcacctgtgggcacttacactcacctaccacgtggcatcagcacacctcgctatcgatagcacagccgaccctgaggctgtgttagcagaagcgtcaagtcgcctctatagcaggttcgggttttcctcatgcacactacaggtagaacaataccagcccgagatggcccagtgtctacgctgccaggaaccaccacaagcctag

SEQ ID NO: 195697 - DNA, 363 bp, synthetic construct
  misc_feature 1..363: note = Description of Artificial Sequence: Synthetic coding sequence
  source 1..363: mol_type = other DNA
atgtgccacctgtacgagggccccgtggtgggcggctggtacaaggtgctggaccgtttcattcctggcacaaccaaagtggacgcgttaaagaagatgctgcttgaccagggtggctttgccccgtgctttctcggctgttttcttcccttagtgggcgccctgaatgggctgagtgctcaggataattgggccaaactgcaaagggattatcccgacgcacttatcaccaattattacctttggcctgcagtccagttggccaatttctatttagttccccttcactatagactggccgttgttcagtgtgtggcggtgatctggaactcttacctgtcttggaaagcccatcggctttag

SEQ ID NO: 195698 - DNA, 531 bp, synthetic construct
  misc_feature 1..531: note = Description of Artificial Sequence: Synthetic coding sequence
  source 1..531: mol_type = other DNA
atggccctgtggcgggcctaccagcgggccctggccgcccacccctggaaagtgcaggttctaacggcggggtcgctgatgggactcggcgatattattagccagcagttagtggaaaggcgaggtctgcaggagcaccagcgcggtagaaccctgacaatggtcagtttaggctgcggctttgttggacccgtggtgggaggatggtacaaggtgttagacaggttcattcctggcacaactaaagtggacgccttgaagaaaatgctcctggaccagggaggctttgcgccatgtttcctgggatgcttcctgccattggtgggcgccctcaatggcctaagcgcccaggacaattgggctaagttacagagggattaccccgacgctctgataaccaattactacctctggccagcagtgcagctggccaatttctatttagtacccctgcactacagactggccgttgtgcagtgtgtggctgttatatggaactcctatttgagctggaaagcgcaccgcctctag

SEQ ID NO: 195699 - DNA, 513 bp, synthetic construct
  misc_feature 1..513: note = Description of Artificial Sequence: Synthetic coding sequence
  source 1..513: mol_type = other DNA
atggccctgtggcgggcctaccagcgggccctggccgcccacccctggaaggtgcaggttctgacagcaggttccttaatgggacttggtgatataatctcacaacagttggtcgaacgacgcggtcttcaagagcatcagagaggccggacacttacaatggtatctcttggatgcggcttcgtgggccccgtggtgggtggatggtataaagttctggaccggttcatcccagggacaacaaaagtggacgctcttaaaaagatgctgctggaccagggtggctttgctccgtgtttcctgggctgtttcctgccgctggtgggcgcactcaacgggctgagcgcccaggataattgggctaagctgcaaagggattacccagatgcccttatcactaactattatgtgggcaggtgccccatgtgttgctgttacctcgagcttttgcctgtcctggaagggacatccgctttgtcactcccccatagtatcgtgagtactcttcagtag

SEQ ID NO: 195700 - DNA, 342 bp, synthetic construct
  misc_feature 1..342: note = Description of Artificial Sequence: Synthetic coding sequence
  source 1..342: mol_type = other DNA
atggccctgtggcgggcctaccagcgggccctggccgcccacccctggaaggtgcaggttctcacagctgggtcactgatgggtttgggagacataatttcacagcaactggtggaaaggaggggtctacaagagcaccaaaggggacgcaccctcacaatggtcagcttaggatgcggcttcgtagactacccagatgccctgatcaccaactactacctgtggccagcagttcagctggctaacttctatctcgtgcctctgcattatcggcttgccgtggtccagtgcgtggctgtaatctggaatagctatctgagttggaaagcgcaccgactatag

SEQ ID NO: 195701 - DNA, 576 bp, synthetic construct
  misc_feature 1..576: note = Description of Artificial Sequence: Synthetic coding sequence
  source 1..576: mol_type = other DNA
atggccctgtggcgggcctaccagcgggccctggccgcccacccctggaaggtgcaggtcttgactgccgcccacccaagacgatgccccgataatacatgcgtaccctgcattggaagtcttatggggctgggagacattattagtcagcagctcgtggagagacgtgggctgcaagagcatcagcgcggccggaccctgaccatggttagtctgggttgtggatttgtcggccccgtcgtgggaggttggtacaaagtactcgatcggttcatcccaggtacaaccaaggtagatgccttgaaaaagatgttactcgatcagggcggcttcgccccgtgttttttaggatgctttctcccactggtaggggccctcaatggcctgagcgcacaggacaattgggccaaattacagagggactatcccgatgcacttatcaccaactattatctatggcccgcagtgcagctggctaatttctacttggtgcctctccactatagactggctgttgtccagtgcgtcgcggtgatttggaacagttacctttcctggaaagcccaccggttgtag

SEQ ID NO: 195702 - DNA, 348 bp, synthetic construct
  misc_feature 1..348: note = Description of Artificial Sequence: Synthetic coding sequence
  source 1..348: mol_type = other DNA
atgggcctgggcgacatcatcagccagcagctggtggagcggcggggcctccaagaacatcaacgcggacggactctcacaatggtttcacttgggtgtggtttcgtcggacccgtggttggcggatggtacaaggtgttagatcgttttatccctggtacgaccaaggtcgatgccctgaagaagatgcttctagatcaaggaggattcgccccttgctttctcggctgtttcctgccactagtaggcgccttgaacggactgtccgcacaagataactgggccaaactacagagggattatcctgatgccctgataaccaattactatctttggccagccgtgtag

SEQ ID NO: 195703 - DNA, 366 bp, synthetic construct
  misc_feature 1..366: note = Description of Artificial Sequence: Synthetic coding sequence
  source 1..366: mol_type = other DNA
tgaagcctgatgggcctgggcgacatcatcagccagcagctggtggaacgacgcggcttgcaggaacaccagcgggggaggacgttaaccatggtgtctctcgggtgtggttttgttggaccggtggtcggcgggtggtataaggtcttggacagatttatcccagggacaactaaagtggacgctctgaagaaaatgctacttgatcaagactacccagatgctttaataaccaactactacttgtggcccgccgtgcaactggctaatttctatcttgtaccgctgcactatcgcctggccgtggttcagtgcgtggcagtaatctggaactcttatttgtcctggaaagcccatagactctag

SEQ ID NO: 195704 - DNA, 204 bp, synthetic construct
  misc_feature 1..204: note = Description of Artificial Sequence: Synthetic coding sequence
  source 1..204: mol_type = other DNA
tgagacagccagggcaagaagaccggcttcaccggcatcaagaagggtgactaccctgatgctctgattactaactactatctgtggcccgcagtgcaactggcaaatttctatctggttcccctgcattaccggttagccgtagtccagtgcgtcgccgtaatctggaactcctacctgagctggaaggcccatcgtctgtag

SEQ ID NO: 195705 - DNA, 912 bp, synthetic construct
  misc_feature 1..912: note = Description of Artificial Sequence: Synthetic coding sequence
  source 1..912: mol_type = other DNA
atggcccccgccgccgacatgaccagcctgcccctgggcgtgaaggtcgaggatagtgccttcggaaagccagccggaggtggggcgggacaagcaccttccgccgctgctgctactgctgccgccatgggcgcagatgaggaaggtgctaagcccaaggttagcccaagccttctgcccttctccgttgaggcgctgatggcagatcaccggaaaccaggggcgaaggaaagcgccctggccccgtctgaaggtgtgcaagctgcaggcgggtctgctcagccactcggtgtccccccagggtccctgggcgctccagatgcgccatcctccccacggcccctgggacatttttccgtgggcggcctactcaagttaccagaggatgcactggtcaaggccgaatcgcccgaaaaacccgagcggacaccctggatgcaatcccctcgattttccccccctcctgccagacgcctgtcacccccggcttgcactctacgcaagcacaaaactaatcgaaaaccccgaacaccctttactacggcgcagcttctcgctctggagcggaagtttcgacagaagcagtatctgtccattgctgagcgagctgagtttagttcatcactaagtctaaccgaaacccaggtcaagatttggttccagaatagacgcgccaaggcaaagaggctacaggaggcagaactggaaaaactgaaaatggctgcgaaacctatgctgccacccgccgcattcggtctatccttcccacttggaggccctgccgcagtcgccgccgcagcaggcgcgtctttatacggggcaagtggccctttccagcgcgccgcgctgcccgtcgctcccgtggggctctacacggcccacgtgggctattcaatgtatcatctgacttag

SEQ ID NO: 195706 - DNA, 804 bp, synthetic construct
  misc_feature 1..804: note = Description of Artificial Sequence: Synthetic coding sequence
  source 1..804: mol_type = other DNA
atggccagccccagcaagggcaacgacctgttcagccccgacgaggagggaccagcagttgtggcgggacccggccctggaccagggggtgctgagggtgccgctgaagaaagacgggtcaaggtgtcgagccttccatttagcgtcgaagcccttatgagtgacaagaagccccctaaagaggcgtcgccactgccggccgagtcagcgtccgcgggcgctactctgaggccattgctgctgtctgggcacggggctcgggaagcccactcacccgggccactcgtgaagccgttcgagacagcctccgtgaaaagcgaaaatagcgaagacggagctgcttggatgcaggagccaggaagatactccccaccccctaggcatatgagtcccaccacttgcactctgcggaaacataagaccaatcgcaagccacgaactccgtttacaacatcacagttgttagctctcgaaaggaagttccgccaaaagcagtacctgagcatagccgagagagctgagttcagttcttccctaaaccttaccgagacacaggtgaagatatggttccagaatcgccgtgccaaagcaaagaggctgcaggaagcagaattggagaaacttaagatggctgcaaaacctatgctgcccagcagctttagcctgccctttcccatctcttcgccactccaggcggcctcaatctatggtgcatcatatccctttcaccgccccgtgctcccaatccccccagtggggctgtatgctactccggtagggtacggcatgtatcacctgagctag

SEQ ID NO: 195707 - DNA, 981 bp, synthetic construct
  misc_feature 1..981: note = Description of Artificial Sequence: Synthetic coding sequence
  source 1..981: mol_type = other DNA
atgaacaccagccccggcaccgtgggcagcgaccccgtgatcctggccacagcgggctatgatcacaccgtgagattctggcaggcacatagcgggatctgcacaagaaccgtgcagcatcaggacagtcaggtcaacgctctagaggttaccccagaccggagtatgatcgccgctgccggctaccagcacataagaatgtatgatctgaatagcaataatcccaaccccataatttcatacgacggcgtcaacaagaacattgctagcgtcggattccacgaagatggaagatggatgtacaccggcggagaagactgcaccgcaagaatatgggatttgcgaagtcggaatctccaatgtcaacgaatcttccaggtgaatgcgcctatcaactgcgtgtgtctgcaccctaaccaggccgaactaatagtcggcgatcagtctggcgcaatccatatttgggatctcaaaacagaccataatgaacaactcattccagaacccgaggtatctatcacaagtgctcatatagatcctgacgcaagctatatggctgcagtgaattctaccgggaactgctatgtgtggaacctaacagggggaattggagatgaagttactcagcttattcctaagactaagatccccgcgcacacccgatatgcccttcagtgcagattttctccggacagtactctgctggctacctgttctgccgatcaaacctgtaagatctggcggacctctaattttagcctgatgacagagctcagcattaaatccggcaacccgggggaatcgagcagggggtggatgtggggttgtgcgttctccggtgactctcagtacatagtgacggcctcgtcagacaacctggctaggctctggtgtgtcgagaccggagagattaaacgcgagtatggggggcaccaaaaagccgtggtgtgcctggctttcaacgactccgtcctgggttag

SEQ ID NO: 195708 - DNA, 981 bp, synthetic construct
  misc_feature 1..981: note = Description of Artificial Sequence: Synthetic coding sequence
  source 1..981: mol_type = other DNA
atgaacaccagccccggcaccgtgggcagcgaccccgtgatcctggccactgccgggtatgatcatacagtgcgattctggcaggcacacagtggcatatgcacacggactgtgcaacatcaggatagccaagttaatgctctggaggttactcctgatcgctcgatgatcgctgcagcgggttaccaacatattcgtatgtacgacttgaatagtaacaacccaaatcccattatctcctacgacggtgtcaataaaaacatagcctccgtgggcttccatgaagacggtcggtggatgtacacgggtggggaggactgcacggctagaatctgggacttgaggtcaaggaacctccagtgccagcggattttccaggtgaacgcgcctatcaactgcgtttgcctgcaccctaatcaggcggaattgatcgtcggtgaccaatccggagcaattcacatatgggatcttaagacagatcataatgagcaattaatccccgagccggaagtcagcatcaccagtgctcatattgacccagacgccagctatatggccgccgttaattctaccggaaactgctacgtgtggaatctaacaggaggcattggcgacgaagtgacacagttgattcccaaaaccaaaattcctgctcatactcggtatgctctgcaatgtagatttagcccagattcaactctgctagccacctgttcagccgaccaaacatgtaaaatctggcgaaccagtaactttagcctcatgaccgagctgagcattaagtccggaaatcctggagagagctccagaggttggatgtggggatgtgcctttagcggtgacagccaatacattgtgactgcaagctccgataacctcgccaggctttggtgcgtcgagactggtgagatcaagcgcgagtacgggggtcaccagaaagcagtggtgtgtctggcttttaacgatagcgtcctgggatag

SEQ ID NO: 195709 - DNA, 984 bp, synthetic construct
  misc_feature 1..984: note = Description of Artificial Sequence: Synthetic coding sequence
  source 1..984: mol_type = other DNA
atgaacaccagccccggcaccgtgggcagcgaccccgtgatcctggcaacggccgggtatgatcacacagtcaggttttggcaagcccattccggcatctgtaccagaaccgtgcagcaccaagattctcaggtcaatgcattggaagttactcctgacagatcaatgatcgccgccgccggatatcaacatattcgcatgtacgaccttaatagcaataatccgaaccccatcatctcttacgacggagtaaacaaaaacatagcctcagtgggttttcacgaggacggccggtggatgtacactgggggggaagactgcacagcccgaatctgggatttgcgctctcgcaacttgcagtgccagagaatcttccaggttaatgcccccatcaattgtgtgtgcttgcaccctaaccaggccgaactgattgtcggcgaccagagtggtgctatacacatctgggacttaaagaccgatcacaacgaacagctgatacccgagcctgaggtctcaataacaagcgctcatatcgatcccgatgctagttacatggcagctgtaaatagcacagggaattgctacgtttggaatctaactggagggatcggagatgaggtcacgcagctcatccccaaaaccaaaatccctgcacacacgcggtatgccctccagtgcagattcagccctgatagcaccctacttgccacatgttccgccgaccagacgtgcaagatctggagaacttcgaattttagtttgatgacagaactgtccatcaaatcaggcaacccaggagaatcatcccgcgggtggatgtggggatgcgccttttcaggtgattctcagtacattgtaaccggcgagccgaggccaggactgcctcacccctggccacctgctcttgcttctcgcgcatcaccacccagactgcaattgccgctctgttggggccgcttgttagggttgcatctccgatcttag

SEQ ID NO: 195710 - DNA, 654 bp, synthetic construct
  misc_feature 1..654: note = Description of Artificial Sequence: Synthetic coding sequence
  source 1..654: mol_type = other DNA
atggagcacgccccctggagccccggcgccagcagccgggcccgggccgggcacaccatgaatacctccccaggcacagtggggagcgacccagtgatcttggccactgccgggtatgatcacacagtgcgtttttggcaggcccactctgggatttgcaccagaaccgttcaacatcaggattcccaagtcaacgccctggaggtgactccagatcgttccatgattgccgcagccggttaccaacacatcagaatgtatgaccttaatagcaacaatccaaatcctatcatatcctacgacggcgtgaacaagaatatcgctagtgtgggcttccatgaagatggcagatggatgtacacagggggagaagattgcacggcaaggatctgggacctgcggagtcgcaacctgcagtgtcagcggatctttcaggtgaatgctccgattaactgtgtctgcttgcatcctaaccaggcggagctcattgtgggcgatcagtcaggagccatccatatctgggacctcaaaacagaccacaacgaacagctgatccccgagcccgaagtcagtattaccagcgcccatattgacccggacgccagctacatggccgctgtgaattccaccgcccccaggcacctcctgggttag

SEQ ID NO: 195711 - DNA, 981 bp, synthetic construct
  misc_feature 1..981: note = Description of Artificial Sequence: Synthetic coding sequence
  source 1..981: mol_type = other DNA
atgaacaccagccccggcaccgtgggcagcgaccccgtgatcctggccacagcagggtacgatcataccgtgcggttttggcaagcgcacagcggcatatgtactaggacagttcagcatcaggatagccaagtgaacgctttagaggtgaccccagaccgcagcatgattgccgcggcaggatatcaacatattcggatgtacgatcttaactctaacaatccgaatcccattatctcatatgacggggtcaacaagaatatagcttcagtgggcttccatgaagatgggcgctggatgtacacaggaggtgaggactgcaccgccagaatctgggatcttcgctctagaaacctgcagtgtcaacgaatttttcaagtcaatgccccgattaattgcgtgtgcctgcacccaaaccaggcagaattaatcgtgggtgatcaaagtggggctatccatatatgggacctaaagaccgaccataatgaacagcttatcccggaacctgaggttagcatcacctcagcccacattgaccccgatgcctcttatatggcagctgtgaattctacaggcaactgctatgtgtggaacttgactgggggcataggagacgaggttacccagctcattcccaaaactaagattcctgcacacactcgatacgcgctgcagtgtcgcttttcccccgactctacccttctcgcaacttgtagcgctgatcagacatgcaagatctggaggaccagcaatttcagcctcatgacagaactctctatcaagtctggtaacccaggcgaaagcagccgtgggtggatgtggggttgtgccttttcaggggacagccagtatatcgtgacagcgtcaagcgacaacctggctaggttgtggtgtgtggaaacaggggagatcaagagagagtacgggggacatcagaaagcagttgtatgcttagcattcaatgactccgttctgggatag

SEQ ID NO: 195712 - DNA, 981 bp, synthetic construct
  misc_feature 1..981: note = Description of Artificial Sequence: Synthetic coding sequence
  source 1..981: mol_type = other DNA
atgaacaccagccccggcaccgtgggcagcgaccccgtgatcctggcaaccgcgggctatgaccacactgtgcgtttttggcaggcccactccgggatatgcacccgcactgttcagcaccaagattctcaggtcaacgccctcgaggtgaccccggatcgctctatgatcgctgcggcgggatatcagcatatcaggatgtatgaccttaactcaaacaaccccaacccaattatatcctatgacggcgtgaataaaaatatcgcgagtgttgggtttcacgaggatggccgctggatgtacaccggcggagaggattgtaccgctaggatatgggatctgcgctctagaaacctccagtgccagcgaattttccaggtcaatgccccaataaactgtgtgtgcctccatcccaatcaggctgaactgatcgtgggtgaccagtcaggcgcaattcacatctgggacctgaagacagatcacaacgagcagctaatcccggagcccgaggtgagcatcacttccgctcacatagacccggacgcctcttacatggccgccgtgaatagcaccggcaactgctacgtttggaatttgacggggggcattggtgatgaggtgacacagctaattcccaagacaaagattccagcccatacccgctacgcccttcagtgccgcttctcacccgatagcactttactggcgacttgtagcgcagaccagacttgtaaaatttggcgaacgtcaaactttagtctgatgacggaactctccatcaaatcgggcaatcccggagaaagcagccgcgggtggatgtgggggtgcgccttctcgggagattctcagtacatcgtcactgcctcaagtgacaacttggccaggttgtggtgcgtggagacgggggaaatcaagagagagtacgggggacaccagaaagcggtagtgtgcctggcctttaatgacagcgtgctgggatag

SEQ ID NO: 195713 - DNA, 1473 bp, synthetic construct
  misc_feature 1..1473: note = Description of Artificial Sequence: Synthetic coding sequence
  source 1..1473: mol_type = other DNA
atggcccagcgggccgtgtggctgatcagccacgagcccggcacccccctgtgtggcacggttagattctccagacggtaccccaccgtcgagaagagagctagagtcttcaacggagcctcatacgtcccagtcccggaagacgggcctttcttgaaagccctcctctttgaactgcgtctcctagatgacgacaaggactttgtcgagagtcgtgactcctgtagccgtatcaacaaaacaagcatctacggcctactgattggtggcgaggagttatggcccgtggttgctttcctaaaaaatgatatgatttacgcttgtgtgcccttagtcgagcagactctgagtccccggcctcctctgatttcagtgtccggcgtttcacaggggtttgagtttttatttggtattcaggatttcctgtattcgggtcagaagaatgattccgaactcaacaccaagctctcccagctgccagacctactcctgcaggcgtgccctttcggcacactgctagatgctaatctgcagaactcactggacaatacaaactttgctagcgtcacccagccacagaagcagccggcgtggaagacaggaacctacaaggggaaacctcaggtttccatttctattacggagaaggtgaagtcaatgcagtacgacaagcagggaatcgctgacacctggcaggtggtaggcactgtgacctgtaagtgcgacctggagggcattatgcctaatgtgaccatctcactttcactgccgactaatggcagccccctgcaggacatccttgtccacccatgtgtgacttccctggactccgccattctaacctcttcttctatcgatgctatggatgattctgcgtttagcgggccttataagtttccattcacaccgcctttggaaagttttaacttgtgcttttacacatcccaggtgccggtccccccaattctggggttctatcagatgaaggaggaggaggtccagctgcgtattacgattaatttgaagttgcacgaatcagtcaagaacaatttcgagttttgtgaggcacacattcccttctataataggggcccaattacccatttggagtacaagacaagtttcggccagctcgaggtcttcagagaaaagagtctgctcatttggatcattggacagaaattccccaagagtatggagatatccctctctggaaccgtgacattcggcgctaaatcacacgaaaaacagccattcgaccccatctgtaccggagagaccgcatacctgaaattacactttcgtatcctcgactacacgctgacaggttgttacgcagaccagcacagcgtacaggtgttcgccagtggcaaacctaaaatctccgcacatagaaagcttatctcaagcgactactatatctggaactctaaagcacccgcacccgtgacatacggctcactgctgctgtag

SEQ ID NO: 195714 - DNA, 16437 bp, synthetic construct
  misc_feature 1..16437: note = Description of Artificial Sequence: Synthetic coding sequence
  source 1..16437: mol_type = other DNA
atgctggtgatctggatcctgaccctggccctgcggctgtgcgccagcgtgacaaccgtgactcctgagggcagcgccgtacataaggctattagtcaacagggcactctctggacaggggaagtgctggaaaaacagaccgtggaacagggcaagtctacattacggcggcagaagaaccactttcaccgctctgccggggaactgcgatgtaggaacgccctcaaggatgagggtgcgtcagctggatggtctgtgatgtttgccggggaatcagttgtggtcctagtccatctgtggatgacaggcgccagggttaagaacttgggactggtagagttcgcctcccccggtgatgacggcgatggccgagcggaaggattcagcttgggtctgccactgtcagagcaggcgcgcgctgctggcgcacgagagaaggaaaggcaggaaaccgtcatcaaccacagtaccttcagtgggttctcacagatcaccggtagcacagtgaacacctcaatcggcggcaatacaacttcagcgagcacccccagcagtagtgatccgttcacaactttttcagattatggtgtgagcgtgacgttcataacagggagtacagccacgaagcactttctcgattcctcgaccaacagcggtcatagcgaggagagcacggtgtctcattctgggcctggggcaactggcactaccttgttcccgtcccacagtgccaccagcgtctttgttggcgaacccaagacatcaccaataaccagcgcatccatggagaccaccgcccttcccggctccaccaccacagccgggctgtcagagaagtctactacattctactcttcccctcgcagccctgatcgaactttgagtccagcaaggacaacgagctcaggggtgtcggagaagtcaaccactagccactctagacccggaccaacgcacacaattgcctttccagatagtacaactatgcctggtgtctcgcaggagtcgaccgcgtcacactctattccaggaagcaccgatactaccctatctcctggtacaacaacaccctcttctctcggcccagaatccactaccttccacagcagtcccggctacacaaaaactactaggctgccagacaacacaaccacatctgggctgcttgaggcctcgacacccgtgcatagtagcacaggttcacctcatactaccctgagcccttcgagttctacgacacatgagggcgaacctaccacctttcagagttggccatccagtaaggacacctcacccgcacctagtggcacaacatctgcattcgttaagctgtcaaccacctaccacagttctccaagcagtactcccaccacacacttcagtgcatcttccaccactctcggccattcagaggagtccactccagtgcactcatccccagtcgctacggcaaccacaccacctccggccaggagcgccaccagcgggcacgttgaagaatcaacggcgtatcacagaagccctggtagtacccagactatgcattttcctgagagctccaccacatctggccactccgaggagtctgcaacatttcatgggtccacaactcacaccaagagctctacaccttccactaccgccgctcttgcccacacctcctaccatagcagccttgggtctaccgagacaacccactttcgggactcttctacgattagcgggcgcagtgaggagtccaaggcatcccattcttctcctgacgctatggccacaacggtcctgcctgctgggagtacaccttcagtccttgtaggggatagcacacccagtccaatttcctcaggttccatggagaccactgcgctaccaggcagcaccactaagcctggattgtccgagaagtctactacattctactcaagtccgaggagccctgatactacacatctcccggcatccatgacgtcaagcggagttagcgaagagagtacgacctcacattcacgccctgggagtacacacacaacagcctttcccgggtctacaacaatgcctggcctgagccaggagtcaaccgcctctcactcctctcctggtcctacggacacgacgctcagccctggttctacaaccgcatcaagcctgggcccagagtataccacttttcactctcgccccgggtcaaccgagacaacacttctcccagacaatactactgcatcaggtctgctagaggcctccatgcccgtccatagcagtacaaggtcaccccacaccaccctgagcccagctggaagcaccactcgtcagggcgaatctactacttttcactcttggccttctagtaaggacactagacccgcccctcctacaactacatctgcctttgtggagcctagtacaacatctcacgggtcacccagcagcattccaactacccatattagtgccaggtcaacaacttccggtttggtggaagaatccaccacttaccactcctcaccaggttctacccagacgatgcacttccccgagtctgacaccaccagcggaagaggcgaagaaagtaccacatctcactcttccacgactcatactatcagctctgccccttctacaacaagtgcattggtggaggaaccgactagctaccatagctcaccagggtcgaccgccactacccacttcccagatagcagtactacaagtgggcgatcggaggaatcaacagctagtcacagcagccaggatgcaactgggaccatcgtactccctgcgcgttccacaacaagcgtgctcctcggcgaatccacaacttccccaatctcgtccgggagcatggaaaccaccgccctgccaggatcaaccactacccccggcttatctgagcgttctaccaccttccatagctcccccaggtcgcctgctactacgctgagcccagcatccactactagctctggggtgtccgaggaatcgaccaccagccgttcccgacctggatctacacatacaaccgccttccccgactcaacaaccacgcctgggctctctaggcactcaactaccagccactcttcgcccgggtccactgataccactctactgcccgcttccaccaccaccagtggcccgtctcaggaatcaactaccagccattcatcttccggcagcaccgacactgcactgtctccggggagcaccactgcactgagcttcgggcaggagagcacaacattccatagcaacccaggtagcacccacacaacactcttcccagatagtactacaagcagtgggattgtggaagcctccacaagggttcacagctcaactggatccccgaggaccaccctatctcctgcctcgtccacatcccctgggttgcagggggagagtaccgcattccagacccatccagcctcaacacacactacaccttccccacccagtacagccactgctccggtggaggagagtaccacgtaccatagaagtccgggctccactccaacaactcactttccggcaagctcgactaccagtggacactcggagaagagtacaattttccacagttctcccgatgcaagcggcactactccaagtagcgctcactccacgacatccgggcgcggcgagagcacaacaagcaggatcagtcctggctctacagagatcacaaccctgcctggcagtaccacaactccggggctgagcgaggcttctacaacattttactcttccccacgctcccccactactacactgtcgcctgcctcaatgacgtcgctgggagtgggcgaggaatccactacctcccgttctcagccaggcagcactcactcgaccgtctcccctgcctccactactactcctggcctctctgaagaatctaccaccgtttatagtagcagcagaggatcaaccgaaacaacagtgtttccccatagcacaaccacctcagttcatggagaggagcccacaacgttccatagccggccagcttctacccacaccacacttttcaccgaggattcaactacatctggactgacagaggagtcaacggccttccccggttctccagcatcaacccagactggcctgcccgccactctgacgactgccgacctgggagaagaatctaccaccttcccaagctcctcaggctcaaccggcacaaagctgagccccgctcggtcaactacctctggactggtgggagaatctacaccctctaggttaagccccagttcgacagagactacaaccctcccaggctccccaacaacgccttctttaagcgagaagagcacaaccttctatacctccccacgaagcccagatgcaacccttagccctgcgaccactacaagttctggcgtcagcgaagagtcatcaacttcacattcccagcccgggagtacccacactaccgcgttcccagattctacaactacttccgaccttagtcaagaacctaccacctcccactcttcacagggatccacagaggctaccctctcacctggttctacaactgccagttccttgggtcagcagagcacgacattccacagcagtcccggtgacaccgagaccacactgctacccgatgataccatcacttctgggttagtggaagcttctactcccactcactcatctacaggtagcctgcacacaacactgacccccgcaagcagcacctctgccggcctacaggaagaaagtacaaccttccagtcctggcctagtagctcagataccacacccagtccacctgggaccacagccgcccctgtagaagtttctactacctaccactcacgcccatctagcacacccactacccatttcagtgcttccagcactacactgggtcgcagcgaagagtccacaaccgtgcatagctcccccggcgccacaggtactgctttgtttcctaccaggagcgctacctctgtcttggtcggcgagcccacgacctcacccatttcttctgggtctacagagacgacggcgctaccagggtccactacgactgcggggttgagtgagaagtccactactttctactcctctcccagatcccccgataccactctgagtcccgcctctactacatcgtctggcgtttcagaggagtctacaaccagccactctagacccgggagcacacacaccacagcattccctgggtctacaacaatgcctggggtgtcacaggagtccacggctagtcattctagccctggcagcacggataccaccttgagtcccggtagcactacagcctcatccctgggccctgaatctacaacttttcattcatcccccgggagcaccgaaacgacgctgctgccggacaacacaaccgccagcgggctgctcgaagcatccaccccggtgcattccagcaccgggtccccacatacgaccttgagccccgccggttccacaacgcggcagggggaaagcaccacctttcaatcctggccctccagcaaggatactatgccggcgcctcccaccacaacatctgcctttgtagagcttagtactacatcccacggatcacccagttccactccgaccacccacttctctgcctcttccacaaccctggggcgctctgaagagtccaccaccgttcacagttctccggtggccaccgcgaccaccccttctccggcaaggagtactacctccggactggttgaagaaagtaccgcctaccactcctcccctggcagtacccagacgatgcactttccagaatcttctaccgcttcagggagatccgaggagtctcgaacttcacatagttcaacaacgcacactataagctctccgccgtccaccacctccgccctggtagaggagcccacatcctaccattcgtcgcctggttcaaccgctacaacccatttcccagatagtagcaccacctcaggcagatcggaggagagtactgcatctcattcatcacaggatgctaccggaacgatagtccttcctgctcgatctactaccagcgtgttgctgggggaatctacaacctcccccattagctccggttctatggaaacgacagcattacctgggagtaccactacgccaggcctgagtgagaaatctactaccttccactctagcccccggtcccccgcgactacactctctccagcttccacaacatcaagcggagtctccgaagaaagcaccacttcccatagtagacccgggtcgacacacaccacagcatttccagattcaaccaccacaccaggactgtcacgccactctacaacaagtcattcttcacctggcagcaccgatactacattattacccgcatcgactacgacctcgggtccatcacaggaatcaacaacatcccactcatcacctggttcgaccgacaccgccttgagccccggaagtacgacagccttaagctttggacaggagtccacaacttttcatagctctccgggcagcacccataccacattattccctgactctaccacttccagcggtatcgtcgaggctagcacgagggtccacagcagcactggttctccaaggacaaccctatccccagccagttctactagccctggactacaaggggagtctacagctttccaaacccatccggctagcacacatactactccctcacccccatcaaccgcaaccgctcccgtggaggagtcaacaacttaccataggagcccagggagcactcccactacacactttccagccagcagtaccacaagcggccactccgaaaaatctaccatattccatagtagccctgacgcaagtgggacaactccctcatctgcacattccactaccagcggacggggagagtccacaacatctaggatttcgcccggcagcactgagattaccaccctgcccggatccaccaccactcccgggttatctgaagcttcaacaacattttacagtagcccaagaagcccaaccactaccctctcccccgcctccatgacaagcctgggggtcggcgaagaaagcactacctcccgatcgcagccagggtctacccacagcactgtctctcccgcctccacaaccacacctggacttagcgaagagtccacaaccgtatatagttccagtcctggttcaaccgagactacggtgtttcccagaactccaactaccagcgtcaggggcgaggagccaaccacctttcattctagacctgctagcacccacaccacccttttcacagaggactcaactacgtccgggttgaccgaagaaagcacggcatttcccgggagtcccgccagcacacagactggattgcctgccactctgaccaccgccgacctcggcgaggaatctactacctttccctccagtagcgggtcaacaggcaccaccctgtcacctgccagatccaccacaagcgggttggttggggagagcaccccgtctagactctcccccagctcaacagagacaactactctgcctggatctcctaccacccctagtctatcagagaaaagtaccacattttacacctcgccccgctccccagatgctaccctatctcctgccacaacaacttcatccggagtctcggaggagtctagcacaagccattctcagcccgggtctacacacaccacggcttttcctgactccacgacaacacccgggctgtcacgacatagcaccacttcacatagtagcccagggagcaccgacaccactcttcttccagcttctacgaccacttctggtccatctcaggagtctacaacctcacattcttccccgggatccactgatacagcgctgagccccggatcgacaactgccctctctttcgggcaggagtctactacattccactccagccccggatcaacccatacaaccctgtttcccgattcaaccacttcctctggcatcgtggaagccagtactcgagtgcactcgtctacgggctccccacggactactctcagcccagcctcaagtacaagtccaggtctgcaaggggaaagcacgacctttcagacacatccagcatcgacccacacaaccccgtctcctccaagcacagcaaccgctcctgttgaagagagtaccacctaccacagatctcctggttcgacaccaaccacccattttcccgccagctcaactacatcaggccatagcgagaagtcaacaatattccacagcagccctgatgcctccgggactacgccatcgagcgcccatagtacgacgtcaggacggggcgaatcaactacctccagaatatcacctggctccacggaaattacaacactgcctggtagcacaacaacacctggccttagtgaagcatcaacaacattttactcctccccccgtagcccaacaactacgctctctcctgcatctatgacaagcctgggagttggcgaggagtctactacgtctcgatcacagcctgggagcacacactctacagtgagcccagcctccaccaccacccctgggctctccgaggaaagtaccacggtttatagctcatctcctggcagtacagagactactgtgttccctcgctctaccaccacaagcgtaagaggcgaggagcctaccacgtttcactcacggccagcttctacacatacaacactgtttaccgaggatagcacgacttccggactgaccgaggagtcaacggcttttccgggtagcccagcaagcacccagaccgggttgccggccacactgacaacagctgatctcggggaagagagcacgacttttccaagctccagcggctcaaccgggactactctctccccagcccgctcaacaactagtggactggttggggagtccacacctagcaggcttagcccctcctcaactgagactactaccctgccaggcagtcccaccacacctagtttaagtgagaagtcgactacgttctacacctctcctagaagcccagacgctacgctgagccccgccaccaccactagctccggcgtcagcgaagagtcctcaacatcacactcgcagcccggatctacccatactacagcgtttcccgacagcaccacgacttctggtctatcacaagaacccacagcaagtcacagctcacagggttcaactgaggcgaccttgagcccaggaagcactaccgctagcagtcttggccagcaatccactacctttcattcctctcctggcgatacagagactacactccttcccgatgataccatcacgtcgggactggtggaagcctctactccgacccattcctctaccggctctctgcacacgacgctgacccctgcctcatctacatctgctgggctgcaggaggagagcaccacgtttcagtcatggccttcctcatctgatacaacaccgtccccaccggggactacagccgccccagttgaagtgtctacaacatatcacagccgtccaagttccacgcccactacccacttctcagcgagtagtactactttgggccgctctgaggagagtaccacagttcacagctctcccggagcaaccgggacggctttgttccctacaagaagtgccacatcagtgcttgtgggcgaaccaacaacttcacctatatcatcgggatctaccgagacaactgctctgcctggctctaccactaccgcgggtctctccgaaaagtccaccactttttacagctcccctcggagtccggacaccactctgtctcctgcttccaccacttccagcggggtgtctgaagagtcaaccacttcccactccaggcctggtagtacacacaccacagcatttcctgggagtaccactatgccaggcgtcagccaggaatctacagcatcacactcctcaccggggtctactgataccactctcagcccgggttctaccaccgcgtcctcactaggaccggaatcgaccacttttcacagtggtcccggcagcaccgaaacaaccctgctgcctgataacaccacagccagcggcctgctggaagcttctacccccgtgcacagctcgaccggatctccccataccaccctatcacctgcaggctcaaccactcggcaaggagaatccaccacattccagtcttggccaaattccaaagatacaactcccgcacccccaactaccacatctgccttcgtggagttatcaactacttcccacggctcacccagctctactccaacaactcactttagcgcctcttcaacaaccctcgggaggtctgaggaatccacaaccgttcactcgagtccggtggctacagcaaccaccccctcccctgccagaagtaccacatctgggttagtggaagaatccacaacatatcacagcagcccaggcagtacacagaccatgcactttccggagagcgacaccacctccggccgcggggaagagtctacgacaagccattcttcaacaacccacaccatctcctcagcaccatcaaccacttccgccctggtggaggagcctacctcctaccatagttcccctggatcaaccgccacgacgcattttcctgattcaagtactacctcagggagatctgaggagtccactgcctcgcacagtagccaggatgccaccggcaccatcgtactacccgcccgaagtacgacctcagttctgttaggtgagtctactacctcacccatttctagcgggtccatggaaaccaccgccctccctggaagcacaaccacacctggactgtccgagaagtcgaccacgtttcactcttccccgcgctctccggcaacaactctcagtccagcttctactaccagtagcggcgtgtcggaagagtcgactacctcacacagtagaccaggaagcacacatacaactgccttcccagactcaaccactactccaggactctcacgccactctacgacatcccactcaagcccaggttctacagatactaccctcctccccgcttccaccactacaagcggttcttctcaggaatcaactacctcgcattcctcttctggttctaccgataccgccctgtcacctgggagcactactgcgctgtcattcggccaggaaagtacgaccttccactcctcgcccgggtcaactcacactacgttgtttcctgattctacaacatctagcgggatagtggaagccagtacaagagtccactcctccactggatcccccagaaccaccctgagcccagcatctagcacctcaccaggattgcagggcgagtccaccgcctttcaaacccatccagcgtcaacacatactaccccgtcacccccctccaccgcgacggctccagtcgaagaaagcactacctatcataggtcgcctggatccactcccactacccacttcccggcctcaagcacaacctccgggcattcggaaaaatccacaatcttccatagctccccagacgcttcgggcacaacacccagcagcgcccactcgacaacatctggccggggagagtccaccaccagccgcatatctcctggctccacagagattactactctcccaggaagtaccacaacgccaggattgtccgaagcttcgaccactttttatagcagccctaggagtccaacaacaacgctgtcccccgccagcatgacttctcttggagtgggagaggagagcactaccagtcggagtcagcctggcagtacccatagcaccgtgtctcccgccagcactacgacaccagggctgagtgaggagtctacaacagtctatagcagctcacctggctctaccgaaaccaccgtgtttcctcggtctaccactacatcagtaaggagggaagagcccacaacctttcacagtcggcccgccagcacccacaccacactgttcaccgaagacagcacaacctcaggcctgaccgaagagtctaccgcctttccggggtcacccgcctcaactcagacagggctgccagccacactcacaaccgcagacctgggggaagaatctacaaccttcccctcgtcatcaggctccacaggcaccaagctctcccctgcaagaagtaccaccagcgggctcgtaggagaatccaccccatctcggttatcccctagtagcacagagaccaccacactgccgggcagcccgaccacaccttcattgtctgagaagtcaacaaccttctatacctccccgaggtcccctgacgctaccctgagccccgcgaccaccacctcaagtggcgtctccgaagagtccagtacgtcccattcccaacctggcagcacacatacaactgctttccccgactctactactacctctggcttatcccaagagccaaccacctcgcattcgagtcaagggtcaactgaggccacgctgtcacctggatctaccactgccagtagcttaggccagcagtccactacttttcacagcagccccggtgacactgaaaccacgctgcttcctgatgataccattactagtggcctggtcgaggcttcaacccccactcattctagcactgggagcctgcataccacactgactccagcaagctccaccagtacaggcctacaggaggagtccaccacatttcagagctggccgtctagctcagacaccacacctagtcctccttccaccaccgccgttccagtcgaagtgtcaacaacctatcacagccggccatccagcactccgacaacacacttctccgcctcttccacgaccttagggcgcagtgaagaatctaccacggtacacagctcaccgggcgcaactggaacagcccttttccctacacgcagcgctacaagtgtgttagtgggagagcccactacttcccctatctcttcaggctccactgagacaacggccctgccaggatcgacaactacggcaggcttgagcgagaagtctactacattctatagttcaccaagatctcctgacacaaccttgtctcctgcctctaccaccagctctggcgtttccgaagaatccacgacaagtcattctcgaccaggatccatgcatactactgcttttcccagtagcaccaccatgcctggggtatcacaagaatcaactgcgtcacatagctccccaggatctactgacacaactttgtcaccgggctctacaactgcaagctcactcggaccagagtcaaccacctttcactccagccctggttccactgaaacgactttattgccagataacactacggctagcggtctgctggaggccagcaccccggttcattcaagcaccgggtcgccacatacaacactcagcccagccggaagcaccacacggcagggggagagtacaacgttccagtcgtggccaaattccaaagatacgacccctgctccccccaccaccacctctgcctttgtggaactgagcaccaccagtcacggtagcccatctagcaccccgaccactcacttttccgcctcttcgacaactcttgggagaagcgaggaatcaaccaccgttcattcctctccagtcgccaccgcaactacgcccagccccgcccgctctactacatctggcttagtcgaggagagtacgacctatcactcatctcccggatctacccagaccatgcattttcccgagagcaatacaacctccggaagaggcgaggaatcgaccacatcccatagtagcaccactcatactatttcttcagccccttccaccactagtgccctggtagaggagccgacttcttatcactcaagtcctggcagtacagcaacaacgcactttcccgacagttccactacgtccgggcgcagcgaagagagcacggcaagtcattcatctcaggacgctacaggaactattgtactcccggccagaagcactacctcagtactcctcggcgaaagtacaaccagccctatatcctctggttcaatggagaccaccgcattgcccggctccaccactacccccgggttgtcagaaaaaagcacaacgttccactcatcacctagctccactccaacaacccacttcagcgcctcctctaccacactgggccgaagtgaggagagtactaccgtccattctagtccggtagccacggcaaccactcctagcccagcccgcagcacaactagtgggttagtggaagagagcactgcttatcactcctccccgggctcaacacaaacaatgcacttccccgagtcttcgaccgccagtgggcggagtgaggaaagtagaacctctcatagcagcaccacccataccatcagctcaccccccagcacaaccagtgcgctggtcgaggagcccaccagctatcactctagccccggctctattgctacgacacatttccctgagtcttccactaccagtggcaggtccgaggagtctacggcctcccatagctccccagatacaaatggcataacacccctgcctgctcacttcacaacaagcgggcgaatcgccgagtccaccactttctatatcagccccgggtctatggagacaaccctggcttcaactgcaaccacaccaggtctctctgccaagtctaccatcctctattcttcctcacgttcaccggaccagaccctgtccccggcctctatgactagctcatcgatctctggtgagcccacttccctgtacagtcaggctgaatctacacacacgactgcgtttcccgcctctaccaccacaagtggcctgagccaggagtctaccacattccatagcaaacctggctcaacagagacaacactgtcgccaggctccataacaacctcaagctttgcacaagagtttactaccccacatagccaacctggatcggccttgagtactgtctctccagccagtacaacggtgcctggactctccgaggagtccaccacattctattcttccccgggcagtactgagacaaccgccttttcacattcaaatacaatgagtatccatagccagcaatcaaccccttttccagacagtccaggcttcacccatacagtcctccctgcaacacttactactaccgacattggccaggaaagcaccgctttccactcatcttcagatgctacagggacaacaccattgcccgctcgcagcactgcttctgacctggtcggcgagcctaccactttctatatctcgccatcccctacgtataccacactctttcctgcatcttccagcacttctgggctgacagaggaaagtacaaccttccacacatccccgagtttcacgtcaacaatagtatctacagagtcccttgaaacactggcccccgggctttgccaggaggggcaaatttggaacggcaaacagtgcgtctgtcctcagggctatgtggggtaccaatgccttagccccttggaaagtttcccagtggagacccctgagaaactcaacgctaccctcggaatgacagtgaaagtgacttatcgtaattttactgaaaagatgaacgatgcatcgtctcaggagtaccagaacttctccacgctcttcaagaatagaatggacgtggtcctgaaaggcgataacttaccacagtacaggggcgtaaatattcggcgattgcttaacggaagcattgtcgtgaaaaatgacgtcatcctcgaggcggactacactctcgaatacgaggaactgttcgaaaatctggccgaaattgtcaaggcaaagataatgaatgagacacgaacaaccctgctcgaccccgattcatgcagaaaggctatcctttgttactcagaggaagataccttcgtagattcaagtgtaactcctggcttcgactttcaggagcagtgtacccaaaaagctgcggaaggatacacccagttctactacgttgatgttctggatggtaaattggcatgcgttaacaagtgcaccaaggggactaagtcccagatgaactgcaacttgggaacctgccaacttcagcgctctggaccccgttgcctgtgtcccaacacaaacacacactggtattggggtgagacgtgtgaatttaacatcgctaagtcactagtgtatgggatcgtgggcgcagtcatggcagtccttttgttggctctgatcatactgatcatcctcttctccctcagccagaggaaaaggcaccgggagcagtatgatgtgcctcaggagtggcggaaagagggtacacctgggattttccaaaaaactgctatttgggaagatcaaaatttacgggagtcacggtttggcctggagaacgcttacaacaattttcgcccgaccctagagaccgtcgactccggcaccgagcttcacatccagagacccgaaatggttgccagcactgtttag

SEQ ID NO: 195715 - DNA, 16008 bp, synthetic construct
  misc_feature 1..16008: note = Description of Artificial Sequence: Synthetic coding sequence
  source 1..16008: mol_type = other DNA
atgctggtgatctggatcctgaccctggccctgcggctgtgcgccagcgtgaccaccgtaacgcccggcagcaccgtcaatactagcattggaggcaatactactagtgcttcaaccccgtcaagtagcgatcccttcactacatttagtgactatggcgtgagcgtcaccttcatcaccggctcaactgccactaaacactttctcgattcctccaccaacagcggtcactccgaggaatcaaccgtcagccactcaggaccaggtgctaccggcacgaccctcttcccaagtcacagcgccacctctgtgttcgtgggagagccaaaaaccagccccattacctccgcatccatggaaacgactgcacttcctggctccaccactaccgccggcctctcggagaagtcaacaaccttctactcgtctcccaggagtcccgacagaaccctgagtccagcccggaccacttcaagcggagtgagtgagaaatcaacgacgtctcatagtagaccgggacccacacatacaatcgcctttcctgacagtacgaccatgcccggggtgtcccaggagtcgaccgcctcccacagcattcccgggtccacagacactaccctgagccctggaaccacaacgccatcatccttagggccagagtcaacgaccttccactcatcccctgggtatacgaagacaacccgacttccggataacacgaccacgtctgggcttctcgaagcctctacgccggtgcactcttcaacgggcagcccacataccactctcagtccctcctcctctactactcatgagggtgaacccacaacttttcaatcttggccctctagtaaagacacatctcccgccccaagcggcactacaagtgccttcgtcaaactcagcaccacatatcacagcagcccttcttcaaccccgaccacccacttttccgcttcttcaacaactctgggacactccgaagagtccacccctgttcattcctcacccgtggccactgccacaaccccaccacccgcaagatctgcgacctccggccacgtggaggaatcgactgcataccaccggagccccggttcaacgcagacaatgcacttcccagaatcaagtacaacttcgggtcacagcgaggagtctgccacctttcatggatccacaactcacacaaaatcgtccacaccttcaaccaccgcagcgctcgcccacacatcttaccacagctcacttgggtctacagagacaactcatttcagagactcctccaccatctctgggcggtccgaagagtctaaggccagccactcatccccagatgccatggcaaccacagtattgccagccggatcaacccctagtgtcctcgtgggggactctacgccgtctccgatctcaagtggctccatggagactacggcgctgccaggttcaactactaagcccggtctgagtgagaaatctaccactttttactcctctcccaggtcacctgacactacgcatctgccagcctcaatgacttccagcggtgttagtgaagaatccaccactagccacagccggcctggctctactcatacaacggcctttcctggcagtacgacaatgcccggtctatcccaagagtctacagcttcacattcctcaccaggaccaactgacaccacactgtcccccggctccacgacggcgtcttctttggggcctgagtacacaacattccattccaggcccggtagcaccgaaactaccctacttccagacaacacaaccgcctctggtctgttagaggcttccatgccagtgcatagtagtacccgcagcccccacaccactctcagtcccgctggcagtacaacccgtcaaggcgaaagcaccacctttcattcctggcctagctccaaagatacacggcccgcacctccgaccacgacctctgcctttgtcgagccttcgactacctcacatggctccccctcctctattccaacaacccacatatcagccagatctaccacttcaggcttagtggaggaatccacaacctatcattcttcacctggaagtacacagaccatgcatttccccgaatcagacactacttccggcaggggcgaggagtctactacctctcactcttccactacgcacaccatctcaagcgccccgtcgacaacctcggcccttgtagaggagccaaccagctatcactccagccccggctcaaccgccacaacccacttcccggatagctccactacctcaggcagatccgaggagtccaccgcatcccactccagtcaggatgccaccggtaccatcgtcctcccagccagaagcaccactagcgtcttgttgggcgagagcacgacgagtcctatttcatctgggtcaatggagactaccgcgttgcccggctctactactaccccagggctgtccgaacgatccacaacgttccattccagcccgagatcaccagcgactaccctgagtcccgcaagcacaacctcgagcggcgtgagcgaagaatccaccacatcacggtcacgacccggttctacccataccactgcgttcccggattccaccaccacgcccggactttcccggcacagcactacaagccacagcagcccagggagtacggacaccacactgctgccagcgtccacaaccactagtggaccctcccaggaaagcacaacatcacactcatcctcgggatctactgatactgctctgagccctgggagcactaccgccctctcattcggccaggaatcaaccacgttccactccaatccgggatctactcacactacactgttccctgattcaacaacttctagcggcatcgtggaggcttccactagggtacacagctcgacaggatctcccagaactactttgtctccagcctcctctacttccccggggctccaaggcgaatccacagcgtttcagacgcatccggcatctacccacacaacaccctctccgccctctactgccacggctcctgtggaggagtctactacttaccacagaagtcctggatccacgcccactacgcatttcccagcatcgtcaaccacctcagggcatagtgaaaagagtaccatatttcatagctccccggacgcaagcggtactacgccaagcagcgcccactcaaccacttcaggccgaggagagtctaccaccagccggatcagcccaggatcaacagagatcacaactctgccaggctctactacaactccaggcctctccgaggcctcaacaaccttctatagctcccctagaagccctaccactactctgagcccggctagtatgacctctcttggcgttggcgaggagtccactacaagtcgttctcaaccaggcagcacacattccaccgtgtcacctgcaagcacaacaactcctggtctgagtgaagaaagcactaccgtgtactcgtccagccgtggttcgacagagacaaccgttttccctcactccacgaccacttctgtccatggggaagagcctacaacattccactctaggccagccagcacacatacaactctttttacagaagacagcaccaccagcggacttaccgaagaaagcactgcttttcccggctcacccgcctcaacccagacagggctccccgctacactgaccacagccgatcttggtgaagagtctacaactttcccttccagcagtggctccacaggaaccaaactgagtccagctaggtcgacaacctcagggctggtcggcgagtctacacccagtcgtctatccccaagctccaccgagaccactactctgcccgggagcccaaccactccatcattatccgagaaaagcacaacgttttacactagtccacggagtcctgatgctaccctgagcccagcaaccaccacgtcctctggggtgtccgaggaatcctcaactagccattcccaaccaggctctacgcataccaccgccttcccagatagcaccaccacttcagatctgtcccaggagcctaccacctcccacagcagccaaggctctacggaagcgaccttgtccccgggaagtaccacagcctcaagcctaggacagcagtcaacaacctttcactcctcccctggtgataccgaaacgactctccttcccgacgatactattacatcagggctggttgaagcatccacccccacgcactcctcaaccggctccctccacacaacactgaccccagcatcaagcaccagtgccgggctgcaggaagagtcaacaactttccagtcctggccttcttctagtgatacaacgccaagtccacctgggacaactgccgccccagtggaggtgagcaccacataccactcccgtccctctagtaccccaacaacacacttttcagccagctctaccacactgggcaggtccgaggagtcaactacggtgcactcaagtcccggagccactgggactgctctgtttccgacccgatccgccacatcagttctggttggggagccaacaactagtccaatttcttcgggctcaaccgagactactgctctccccggctctacgacaaccgctggactctcagagaaaagtacaacattctactctagccccaggtcgccagataccacactcagccccgcatctacgacctcctcgggagtgtctgaggagtccacaacatctcactcccgtcctggttctacacacaccaccgctttccccgggtccacaactatgccaggcgtcagccaggagtccaccgcttcccattcttcacctggatctacagacaccactctatcgcctggctccacaacagcttcctcactcggtccagagagtacaaccttccattccagccccggctctacggaaactactctgctccccgacaacaccaccgccagcgggctcctggaggctagcacccctgtacactcctccactgggtccccccataccaccctgtctccggcagggtcaacaacccgacagggagaaagcacaacattccagtcgtggcctagcagtaaagatacaatgccagcacctcctacaaccacttcggccttcgtggagttgagcacaacgtcccacggtagcccatctagtaccccgacaacgcacttttctgcctctagcactaccctaggccgtagcgaggagagcaccaccgttcactctagccctgtggccactgccacgaccccaagcccagctcggagcactacttccggtctcgtcgaggagtctaccgcttatcacagctccccaggttctacccaaacaatgcatttccccgaatcttcaacggcatctggaaggtccgaggagtcacgcacatctcatagcagcacaactcacaccattagctccccacctagtacaacaagtgcactcgttgaggaaccgacttcttatcactcctcccccggttctactgcaactacccatttccccgactcttccactaccagtgggaggtcagaggaatccacagcctcacactcatcccaggacgcaacggggaccattgtcctgcctgcacgtagcaccacatcggttttactgggcgagagcacaacatccccgatctcatccggtagcatggagactaccgcattgcccggtagtactacgacacccggactgagcgagaaatcaactacattccacagttcccccaggtcccccgccacaacactatccccagcttctaccactagctccggcgtatcggaagagtccacaacgtcccactctaggcctggatccacacacacaacagccttccccgactcaaccacaacgccaggactttctaggcattccacgaccagtcacagcagtccaggttcaacagacactacccttctgcctgctagcacaaccacctccggcccaagccaggaatctacaacgtcgcacagctctcctggaagtacagacaccgcattatcacctggatccaccacagcactgtccttcgggcaggagtccacaacattccactcctcccccggctcaacccataccactctgttccctgattccaccacatcatccggaatcgtagaggcctcaacacgagtccatagctctaccggctctccccgcacgaccctttctcctgctagttccacgagcccaggattgcaaggtgagtctaccgcatttcagacccatcccgcttccacccacacaacaccatctcccccctctactgctactgccccagtagaggaaagcacaacataccacaggagcccgggaagtactcctactacacattttcctgcctcaagcaccacttccgggcactccgaaaagtctactatttttcacagcagccccgatgcgtccggcacgacaccgagctctgcgcacagtaccacgtctgggaggggtgagagcaccacctcacggatttccccgggaagcaccgagatcaccaccttgccaggcagcactacaacacccggactaagcgaagcgtccactactttttattcatcacctaggagtcctactaccaccctatcacccgcctcaatgacgtctctgggagtgggtgaggagagtactacaagtcgcagccagcccggttcaacgcactctacagtgtctccagccagcaccactactccgggtctgtccgaggagtctacaacagtgtatagtagttccccaggaagcaccgaaacaactgtcttcccccgaaccccgacaacttcagtgcggggggaagaacctacaacatttcactctagacctgccagcacccataccaccctgtttaccgaagactcaacaacttctgggctgaccgaggagagtaccgcttttccaggctcgcctgcatcgacacagactgggctccccgcaaccctcactactgccgatctgggagaggaaagcaccaccttcccgtcatcaagcgggtctactggcactaccctgagtccggcacggtctaccaccagcggactggttggcgaaagcactccttcacgcctttcaccatctagtactgagacaaccacattacctggatcccctactactccgagtctctccgaaaagtccactaccttttacacaagtccccgatccccggacgccaccctgtccccagctactacaacctccagcggcgtgtcagaggagtcatccacctctcactctcagccaggctcgactcatacaacagctttccccgatagcactacgacaccagggctgtccagacattcgacaaccagccactcatcacctggctccacagatactacactgctgcccgcctctacgactacatcaggtccaagtcaggagtccaccacctctcacagtagtccaggatctacagatacagcactgagtcctggctcaacgaccgctttgagttttggccaggagagcactacgtttcacagtagtcccggatccacgcatacaacactgttccctgactctacaacatcatccggcatcgtggaggcttccacaagagtgcactccagtaccggctcaccccgcactactctgtctcctgccagcagcaccagtcctgggcttcaaggggagagcacgacattccaaacacatccggcctccacacatacaacaccctcacccccttcaacagccactgctcccgtcgaggagagcacaacttaccaccggagtcctggatccacgcctaccacccattttcctgcatcttctaccacctctggacacagcgagaagtcaaccatcttccacagctcccccgatgcgtctggcaccacccctagctctgcccatagcacgacttcaggcaggggcgagtctaccacgagccgaataagtccaggaagcaccgagattacaactctgcccggcagcacaaccacccccggactgtcagaggcttcgacaaccttctactcttcaccccgcagtccgaccaccacccttagtccagccagcatgacatccttgggcgtaggggaagagagcaccacatctcggagccagcccggctctacccatagcactgttagtccggccagtacgacgactccaggattgtcagaggagtcaaccactgtctattcctcctctcctggaagcaccgaaaccactgtattccctcgtagtactacgacatccgtgagaggcgaggaacccactacattccactcacgacccgcaagtacccacacaacactctttacagaagattccactacctctggcttgaccgaggaaagtacagcttttcccgggagcccggcttccacacagactgggctgcctgccactctgactaccgccgacctcggtgaggagagcacgacattccccagcagctccgggtcaacagggactacgctatcgcccgcccgatccactacgagcggcttagtgggtgaatcaacaccgtcccggctgagtcccagttcgactgagactactaccctgcccggctcgccaactaccccaagcctgtctgagaagagcactactttttacacttctcctaggtcccccgacgccaccctctcacctgctaccaccacatcatccggtgtgtcagaagaatcttctacctcccatagtcagccaggctccacacacactaccgcattccctgactccaccaccacatctggacttagccaggaacccacggcttcacatagctcacagggaagcaccgaagctactctgtccccaggatctaccaccgcctcctccctgggtcaacagtcaactactttccactcaagtcctggagacacagagactacactccttccagacgataccatcacaagtggtttggtggaggcctccactcccacccacagttccactggttctctgcacacaacattgaccccggcaagttccacttctgcaggcttacaggaggaaagcactaccttccagagctggcctagctcgagtgacacaaccccatctccacccggcaccactgctgccccggtggaggtgagcaccacctatcactctcgacctagcagcactccaactacccatttcagtgccagttccacaaccttagggcgcagcgaagaaagcacaactgttcattcctcgccaggggccacaggcaccgcactcttccccacacggagtgcaacgagtgtactggtgggggagcctacgacctcccctatatcctcgggcagcacagaaactactgccctgcctggcagcactacaaccgccggtctgagtgagaagtccactactttctatagctcacctcggagccctgacactaccttgagccctgccagcaccactagctccggcgtatccgaggagtctaccacctcccatagtagacctggctctacacacactacggcgtttcccggaagcacgacaatgccgggggtcagccaagagtccaccgcatcccacagcagccccggatcaacagacacaaccctctcccctggatcaacaactgcctcttcattgggtcctgagagcaccacctttcattcgggccccgggagcaccgagactactctcctgccagataacaccaccgcctcaggtttgctcgaagcctccacccctgtgcattctagcacaggtagccctcacacaaccctgagccccgcaggatccaccacacgacagggggaatctaccacctttcagtcctggccgaattccaaagatactacgcctgcccccccgaccacaaccagtgcttttgtggaattatcaacaacctcacacgggtctccgagcagcacccctaccactcacttttctgcctccagcacaacgttgggaaggagtgaagaatccacaaccgtccattcttcgcctgtagccacagcaactactccctcccctgcccggtcaaccacctccggactagtggaagagtccacaacatatcactccagcccaggatcaactcagacaatgcactttcccgaaagtgacaccacttccggtcgcggagaggaaagtacgactagtcattcatccactacccatactatcagctccgctccctccacaacatctgcgcttgtagaggagccaacctcttaccattcctcccccgggagcaccgctacaacccactttcctgattcttctaccaccagcggaagaagcgaagagagcaccgcctcacattctagtcaggacgcaaccggaactatcgtgctcccggcgcgctcaaccactagtgtgctcctcggagagagcacgacctccccaatctcctcaggttctatggagaccactgccctgcctgggtctaccaccactcccggcctaagcgaaaaaagtactactttccacagtagtcccagatcaccagcgacaactttaagccctgcatcgaccacctcttcaggggtgtcagaggagtcaacaacctcccattctaggcctggatctacacacaccaccgccttccccgatagtaccacgaccccgggacttagcagacacagcactacgagtcactccagcccgggatctacagacaccacactgttgcctgccagtacaactaccagcggatccagccaggaatcaacgacatcccacagcagctctggctcaactgataccgccttgtcccctggcagcaccaccgctctgagtttcgggcaggaaagtacaaccttccactcgtccccagggtctactcatactaccttattccctgattccactacgtcatctgggattgttgaggccagtactcgggtgcattcttccactggttctcccagaacaacgctctccccggcaagttcaacttcaccgggactgcaaggagagtcaaccgctttccagacccacccagcctcgacccacaccactccatccccaccctcaaccgccaccgccccagtggaggagagtactacttatcacaggtcacccggaagcacccccaccacccacttcccggcttcctctactactagtggacattccgagaaaagcacaattttccactcatcccccgatgcgagtggtaccaccccctcatccgcccactccaccacgagcgggcggggcgagtcgactactagcagaatttcccctggatccacagagataacaaccttgcccggatctaccaccaccccagggctgagtgaggcctccacgacgttttacagttcgcctcgctcccccaccacgacgttatcaccagccagcatgacctcgcttggagtgggagaggagtctacaacttctcgctcccagcccggctcaacccatagtacagtgtctcctgcgagcaccacgacgcccggcttgtctgaagagtccactaccgtttacagcagttctccgggcagcaccgagacaaccgtgttcccacggagcactaccaccagcgtacgtagagaagaacctactacatttcactctcgtccagcctctactcataccactctgttcactgaagactcaaccacatcaggactaacagaggagagtactgcgttcccaggatctcctgcttcaacgcagacgggcttaccagccacattaacaaccgctgaccttggggaagaatccacgacgtttccttccagtagtggcagcacaggaaccaaactcagtcccgcgaggtctaccacatctggtttggtgggggaatccaccccttcacggctctcaccctcctctacagaaacaactacactgcccggtagcccgactactcctagcctgtccgagaagtccaccacgttttatacttctccgagatcccctgacgcaaccctcagccctgcaacaactacgtcctccggagtgagcgaggagagtagcacctctcacagtcaacctggctcaacccacactacagccttcccggattccaccaccacaagcgggctgagtcaggagcccacaactagtcattcctctcagggctctactgaggcaacactttcacctgggtctaccacagcctcttccctgggccagcagtctaccacattccacagcagtccaggtgacaccgagactaccttgctgcctgacgacaccattacgagcggtcttgtagaggcgtccaccccaacacattcgtcaactggtagcctgcacactacattgacccccgctagtagtacctcaacaggcctgcaggaagaaagcaccacgtttcagtcttggcctagctcttctgacactaccccaagcccaccttccacaaccgccgttcccgttgaggtgagcactacttatcatagccgcccctcaagcacaccaacaactcacttttccgcaagcagcaccacactggggaggtctgaggaatcgaccacagtgcattcttcacctggagccacggggaccgccctctttccaacgaggagtgctactagcgtgctggtgggcgagccaacaacatcgcctatatccagcggctccaccgaaaccaccgcgttgcccggttctactactacagcaggcctgagtgagaagtctaccaccttctattccagtccacgcagcccagacacaacactttcccccgcttcaacgacttctagcggtgtgagcgaggaatctacaacctctcactctcggcctggatccatgcatactacagctttcccgtctagcactactatgcccggcgtgagccaggaatccacggccagtcacagctctccaggcagcacagacaccacattgtcacccggctcaacaacagctagttcattgggcccagagtctaccaccttccattctagcccaggctccaccgagaccaccctcctgcccgataatacaaccgcgagcggcctgctcgaagcaagcacccccgtccactcctctaccggttccccccacaccacgctgtcgcctgccggtagtaccactcggcagggggagagcactacctttcagagctggcctaactccaaggatactactccagcaccccctaccaccacgtcagctttcgtggaactctcaactacctcccacggatccccctcaagcactcccactactcacttttccgctagtagcactacacttggccgctctgaggagagtactaccgtgcattccagcccagtcgccaccgccacaacaccttcacctgctaggagtacaaccagcggcctggtggaagaaagcacaacctatcattcaagtcccggcagtactcagaccatgcattttcccgagtcaaatacaacttctggacgaggcgaggagtccactacatcccacagcagtacaactcatactatcagctccgctccttctaccaccagcgcactggtggaggagccaacctcctatcattcatcgccaggcagcacagccacaactcatttccccgacagcagcaccacgtcaggcagatcagaagaaagtacggcttctcattcaagtcaagacgccacgggcaccattgtgctgcctgcgcgttcaactacatccgttctgctgggggagagcaccacaagccctattagctccgggtctatggaaaccacagctctccccggcagcactaccactcctggtctgtcagaaaagagtacgacattccatagcagcccatcctccaccccaacgactcatttttctgcctccagcacaacattaggacgatcggaagagtccacaacagtgcactctagccccgtggcgactgctaccaccccctctccagcccggagtacaacctctggccttgtcgaggagtccaccgcataccactcatcccctggctcaacccagaccatgcactttccagagagcagcacagccagcggaaggtccgaggaatcacgtactagccatagctccactacacataccatctcctcacctccttctaccacgagcgccttggtcgaagaacccacaagttatcattcgtctcccggatccatcgccactacgcactttcccgaatcatccacaacatctggaagatctgaagagagcacagcgtctcactcaagcccagacaccaatgggattacgccacttcccgcccactttactacatctgggcgcattgcggagtccaccacattttatatcagccctggcagcatggagacaacattggcatcgacggctacgacccctggattgtctgcgaagagcactatcctgtattctagtagtcgttccccagatcagactctctccccggcctctatgacctcatccagcatttccggagaaccgacttctctgtattcccaggcagagtccacgcatacaactgcatttcctgcatctactaccacaagcggcctgtcccaggaatccacaacatttcatagtaaacctggttccacggagaccaccctgagtcctggatctattaccacaagttctttcgcgcaagaatttactactccacactcacagcccggatcagcactgtcgaccgtcagtcccgcgtcgacaacagtgcctggtctgtccgaggagagcactacgttctacagtagccccggatcaacagagactaccgccttctcccacagtaatacaatgtctattcattctcaacagtctaccccgtttcccgactcccctggcttcacacacacagtgctaccggccactcttacaacaaccgatattggccaggagtccaccgccttccattcgtcctccgatgctacaggtacaactcccctgccggcccgttctacagcatctgacttagtgggggagcctacaaccttttatatcagtccgtcacccacgtacaccaccctcttccccgctagctcttccacttccggcctcaccgaggaatctactacatttcacactagtccctcattcacgtctacaatcgttagcaccgagagtttggagacactggcacccggactttgccaggaaggccagatctggaacggaaaacagtgtgtctgcccgcaggggtatgttgggtaccagtgtctgtctccgttggagagcttccctgtggaaaccccagagaagctgaacgctaccctgggcatgaccgtgaaggtgacctataggaactttacagagaagatgaatgacgcttcatcacaggagtaccaaaacttctctacactattcaaaaaccgaatggacgtggttctcaaaggcgataatctgccacagtaccggggcgtgaacataagacggctcttgaacgggagtatcgtcgtcaagaatgatgtgattctcgaggccgactataccctggagtacgaggaattgttcgagaatctagccgaaattgttaaagcgaagatcatgaatgagacgagaacgaccctgctagatcccgactcctgcaggaaagcaattctatgctacagcgaggaggatacctttgttgactcgtcagttacaccaggcttcgatttccaagaacagtgtacacagaaggccgcagagggatacactcagttttactacgtggacgttctggacggcaagctagcatgcgtgaacaaatgtaccaagggcacgaagtcacagatgaattgtaatctcggcacatgccagcttcaaagatctgggcccaggtgtctctgtcctaacactaacacgcattggtattggggggagacctgtgagtttaacatcgccaagtctctcgtctacggaattgttggggcagtgatggccgtgctactgctcgccctaattattctcattatcctattcagtctgtcccaacgcaagaggcaccgggagcaatatgacgtcccacaggagtggaggaaagagggcacaccgggcatctttcaaaagaccgcaatctgggaagatcagaatctgagagaaagccgctttggcctggagaatgcttacaataacttccgacctactctggagactgttgatagtggtactgagttgcatattcagagacccgagatggttgcttctactgtttag

SEQ ID NO: 195716 - DNA, 1536 bp, synthetic construct
  misc_feature 1..1536: note = Description of Artificial Sequence: Synthetic coding sequence
  source 1..1536: mol_type = other DNA
atgaaggccatcatccacctgaccctgctggccctgctgagcgtgaacactgcaaccaatcagggcaatagcgctgatgccgtgacaacaactgagacagccacttcagggcctaccgtggcagccgctgataccacagagaccaatttcccagagactgcttctacaacagcaaacaccccgtttcccaccgcaactagcccggccccgccaattatatcaactcacagctcttccaccatacctacaccagcaccacccattatcagtactcattcttcttccacaatccctatccctactgctgcagattcagagtctactacgaatgtcaacagtctggccacgagtgatatcatcacagcctcctccccaaatgacggactaattactatggtgccgtctgagacacaatccaacaatgaaatgtctccaaccacagaggataatcagtctagcggacccccgaccggaacggcactgctcgagacctctaccctgaattcaaccggaccttctaatccttgtcaagacgacccatgcgctgacaatagtctgtgtgtaaaacttcacaatacttctttttgcctctgccttgagggctattactataactcctccacttgcaagaagggaaaggttttcccaggcaaaattagcgttacggtgtccgagactttcgaccccgaggagaaacacagtatggcttatcaagaccttcattccgagatcacgagtctgtttaaagacgtgtttggcactagcgtgtacggccaaaccgtaattcttaccgtgtcaacctccctgagtccccggtcagaaatgagagccgacgataagttcgtgaatgtcacgattgtgactatactcgccgagacaacgagtgacaatgagaagaccgtcaccgagaaaatcaataaagccataaggtcttcctcttcaaactttcttaactacgacctgacactgaggtgtgactattacgggtgtaaccagactgctgacgactgcttgaacggacttgcctgcgactgtaaatctgatttgcagcggcctaacccccagtcccctttttgtgtcgctagtagccttaagtgtcccgatgcttgcaatgcacagcacaaacaatgcctcatcaagaagtctggaggggcacccgaatgcgcgtgtgttccaggttatcaagaggatgcaaacggcaattgtcagaagtgcgcctttggctactccggcttggattgtaaggataaatttcaactgatcctcacaatcgtgggaactattgcgggaatcgtgattctgtccatgatcatcgccctgatcgtcactgccaggtcgaacaacaagactaaacacatcgaggaggagaacctgatcgacgaagacttccagaacctgaagctgcgctccacgggattcacgaacttaggagccgagggttctgtcttccctaaggttagaattactgcttcacgcgactcacagatgcaaaatccctacagccggcattctagcatgcctagaccagattactag

SEQ ID NO: 195717 - DNA, 13482 bp, synthetic construct
  misc_feature 1..13482: note = Description of Artificial Sequence: Synthetic coding sequence
  source 1..13482: mol_type = other DNA
atgccccggcccggcaccatggccctgtgcctgctgaccctggtgctgtcccttctccccccccaggccgccgctgagcaagacttaagcgtgaatagggctgtatgggatggaggaggctgcataagtcagggggatgtcttgaaccgccaatgtcagcagctgtcgcagcatgtgaggacagggagcgccgcgaataccgctacgggtaccactagcacaaacgtggtcgaaccacggatgtacctgagttgtagcaccaatcctgaaatgacatccatcgaatcgtctgtgacaagcgatactcccggggtctcctccacccgcatgactccaaccgagtcccggaccacgagcgaaagtacctctgattcaacgactttattcccctcgagtactgaagacaccagctcaccaaccacaccagaaggcacagatgtcccgatgagcactccgtcagaagaatctatcagctccaccatggcttttgtgtctaccgcgccactgccctcatttgaagcctacacatccttgacatataaagtagatatgtcgacacctttaaccaccagtacccaagctagctcttcccctaccacccctgagagtacaactattcccaaatcaacaaattccgagggatcaacccccttgacatccatgccagcatctactatgaaagtagccagtagcgaagctattaccttgctgactacacctgtggaaatctccacgccagttactatctcagcccaggcgagtagctctccaaccaccgcggagggcccaagcctatccaattctgcgccttcaggagggagtactcctctcaccagaatgcctttatctgttatgctcgtcgttagtagtgaggcctccacactgtccaccacgccagcagccactaatattcctgtaatcacctcgactgaagcttcttcctcgcccaccacagcagaaggaacatccatacctacatcaacctatactgagggcagcacccccttgacgtccaccccagcatcaactatgccagtggccacatctgagatgagtactctatccattacccctgtggacacatccactctcgtaacgacttcgaccgaaccctcatcactgcctaccactgccgaagcaaccagcatgctgacgtctactctgtctgagggctctacacctctgacaaacatgcctgtgagtaccatacttgtggctagcagtgaagcaagcacaacaagcactatacctgtcgattctaagacctttgttactacagctagtgaggcatcttcctccccaacgacagccgaagacacctccatcgcgacttccacccctagcgaaggctctaccccgctgaccagcatgccagtgtcgacaacccctgtggcttctagcgaggcttctaacctctctacgacgcccgtcgattccaagacccaggtgactacttctacagaggcctcgtcgtctcctcccaccgctgaagtgaattctatgcccacgagcactccctcagaaggaagcactccccttacatcaatgagtgtatccaccatgcccgttgctagttccgaagctagcaccctatcgacaacacctgtcgacactagcacccctgtcactaccagctctgaggcaagcagctcttccacaacaccagaagggacatctattcctacctcaaccccatccgagggaagcacacccttaacaaatatgcccgtctccacccgattagtggtgtctagcgaggcttccaccacctctacgactcccgctgattccaatacctttgtaactacatctagcgaggctagcagctctagtacaaccgccgagggaacctccatgcctacaagtacatattcggaacggggtaccacaatcacgagcatgtccgtaagtacgacactggtggccagttctgaagcaagtactctttcaaccacccctgtggactccaataccccagtaactactagcaccgaggccacttcaagcagcaccactgctgaagggacgagtatgccgacatctacctatacagagggcagcacacccttgacaagcatgcctgtcaacacaacacttgtcgcaagctctgaggcctcaacattgagtacgactcctgttgacactagcactccagtgaccacttctacggaggctagctctagccccactactgccgatggagcctctatgccaacgtctacaccttctgaagggtctaccccattgacttccatgcctgtgtcaaaaaccctgctcacttcaagcgaggcgtcaactttgtctactactcccctggacacttccactcacattactaccagtacggaggcatcctgttcccccactaccacagagggtacttctatgccaatttccacacccagcgagggctcgccactgctgaccagcataccggtcagcattactccagtgactagtccggaggcttctacgctgagcacaactcctgtcgactccaacagcccggtaacaaccagcactgaagtgagctcctctccaaccccggccgaagggacctccatgcccacaagcacatatagcgagggcaggacccccctcacttccatgcccgtctccactacactcgtcgctacttctgctatctccaccctcagcaccacccctgtcgacacctccacaccagtgactaattcaacagaagctcgcagcagccctaccactagtgaggggacatccatgcctacctctacccctggggagggctctacgccccttacctctatgcctgacagtacaacccccgtggtgtcttctgaggccaggactctgtcggctaccccagtggatacatctacgccggttaccactagcaccgaggccacaagttctcctactacagcagagggtacaagtataccaacctctaccccttcagagggaactactcctttgacgtcaacccccgttagtcacactctggtggcaaattctgaagcatcaaccctgagcactacacccgtggatagcaatacccctctcacgacatccacagaggcgtcttctccgccacctactgctgagggaacttctatgcctacatcaaccccctctgagggatccacacctctgacccgcatgcccgtttctaccaccatggtcgcttcctctgaaacatccaccttgagtaccacccccgcggacacgagcacccctgtgacgacatactcacaagcctcttcaagttccaccaccgctgacggtacctctatgcccacttccacctactccgagggatccactcccttgacatcggttcctgtgtctaccagactcgtagtgtcttcagaggcctcaacacttagcaccaccccagtcgacacttcgatacctgtgacaaccagcactgaggcttccagctccccaaccaccgctgagggaacttccatcccgacaagccctccatctgaaggcaccacccctttggcctctatgccggtctctaccacccttgtggtgagttctgaagctaacactctgtctaccactcccgtggactcaaaaacccaggtggcaacttctactgaggcttctagccctcctccaaccgccgaggtgacctcgatgcctactagcacccctggagaaaggtctacccctttgacgagcatgccagtacggcacacccccgttgcatcttctgaggccagtactctgtccacatcacccgtggatacctctaccccagtcacaacatctgccgagacatccagctctccaaccacagctgaaggaaccagcttgccaacctcgactacttccgagggcagcaccttgctcactagtattccagtaagcacaaccttggttacctccccagaagccagtacactgcttacaacacccgtagatactaaagggcctgtcgtgactagcaatgaggtaagtagctcgcccacgccagctgaggggacatctatgcccacatccacttactcagagggcagaacacccctgacgtctatccccgtcaacactacattggttgcttctagcgccatcagtatcctaagtaccacacctgtggacaacagtacccccgtgactacaagtaccgaagcttgtagctcccccacgacctcggagggcacttcaatgcctaactccaatccctccgaagggactacaccactgacttcaataccagtctctacgacgcctgtggtgtcatctgaggcatcaacactgtcggctaccccagtggacacatcaacacccggaacgactagcgccgaggcgacttctagccctaccactgctgagggaatctcgatccctacctccacgccctcagagggaaaaacacctcttaagtccatccctgtatccaatactcccgtggccaacagtgaagcatccacactatccactactccagtggactccaatagcccagttgtcactagcaccgccgtttcctcttctcctacacccgccgagggtacctccatcgcaataagtacccctagtgagggcagcactgcactgacttcaatacccgtgtcaactacaacagtggcctcttctgaaatcaacagcctgtccacaacaccagcagttacatccactcccgtaacaacctacagccaggcttcctcttcccccacaactgccgatggcacatcaatgcagaccagtacatactcggaaggtagtacaccactgacatcgttgcctgtgtccactatgttggttgtctcctccgaggctaacactctgagtaccaccccaatagactcaaaaacacaggtgaccgcttccactgaggcttcaagttcaaccaccgctgagggttccagcatgactataagtacacccagcgaaggctctcccttgttgactagcatacccgtgtcaacaactccagtggctagtcccgaagcctccaccttgagtactacccccgtggactcaaacagcccagtgatcacatccacagaagttagctcatctcccactcccgcagaaggaacatcaatgccaaccagtacttacactgagggccggaccccactaacttccattaccgtaaggactacccccgtcgcgagctctgccattagtactctaagcactactcctgtggataacagtaccccggttactactagtactgaagcaagaagtagtccaacgacctctgagggaacgtcaatgccgaactctacccctagcgagggaactactcctctgacctccatcccagtaagcacgactcctgtccttagctccgaggcgtcaacactgtctgccacaccgatcgataccagcaccccggttactactagcactgaagcaacaagttcaccaaccactgcggaaggtaccagtatcccaacatctacactgtctgaaggaatgacccctctgacttcgactcctgtttctcacacactggttgccaattccgaggcgtcaaccctgagcacaaccccggttgactctaactcacccgttgtgaccagcaccgcagtgagttctagcccaactcctgccgaaggcacatcaatcgcaactagtactccttctgaagggagcaccgcacttaccagtatccctgttagcacgaccacagtcgccagttccgagacgaacaccttgtccactactcctgctgttacaagtacccccgtgaccacatatgcccaagtgtccagcagtcccactacagctgatggatcaagcatgccaacatcaaccccaagggagggacgccccccccttacatctatccctgtcagcaccactaccgtggcgtcatcggaaatcaacactctgtccaccaccctagccgatacgagaacgccagtcaccacctatagtcaggcaagttcctcaccaacgactgccgacggaacctccatgccgacacctgcttattcagaggggtcaacccctctcacaagcatgccgctaagcactaccctcgtggttagtagtgaggcatctaccctgtcaactactccagtcgacactagcaccccagccactaccagcacagaaggaagtagcagccctacgaccgcaggcggaacctccatccagaccagcacacccagcgaacggacgactcctctggccgggatgccggtaagtactactctggttgtgtcaagcgagggtaacactttgagcaccacacccgtagactctaagacccaggttaccaattccaccgaggcatcatcctcagccaccgccgaaggctcgtctatgactatctcagcacctagcgagggctccccgctgctgacatctattcctcttagcacaacccctgtcgctagcccagaagcatctaccctgtccacaaccccggtagattctaactctcccgttattacaagtacagaagtgagctcctctcccattcctacagagggaacttctatgcagacctccacttactctgatcggcggacccctctgaccagcatgccagtttcaacaactgtggtggctagcagcgctatcagtacactgagtacaacacctgttgacaccagtaccccagtgactaacagcacagaggctagatcctctccaactacatccgaaggcaccagtatgcccacatcaactccgagcgaggggtcaacaccatttaccagtatgcctgtgtcaacaatgcccgtggtgacatctgaagccagcaccctctccgccacacccgttgatacctctaccccggtaacaacctccactgaggcaacctccagtccaacgacagctgaaggaaccagcatcccaacaagcacactatctgagggaacaacccctctgacaagtattcccgtttctcacaccttagtggcgaacagcgaggtgtccacattgtcgacaacacctgttgattctaacaccccttttacgacttcaactgaagcgagctctccgccgccaacggctgagggcacaagcatgcccacgtcaacctccagcgaaggcaataccccactgactcgtatgcctgtctccacaacgatggtcgctagctttgagacatccacattatctacaacccccgccgatacatcgacccccgttactacctattcacaggcagggtcttctcccaccacagcagatgatacttctatgccaacctccacgtatagcgaggggagcacccccctcacatccgtgccagtgtccaccatgcctgtggtgtcctccgaggccagcacccacagcactaccccggtggatacatctacccccgtcacgacttccacagaggccagctcttcgccaaccactgccgaaggcacttccatcccgacgagccccccatcagaaggcacaactcccctggcctccatgccagtgtctacaaccccagtggtctcatccgaagcaggcactcttagcacaacaccagtggatacatccacgccaatgactacttctacagaggcaagttcctcaccaaccaccgcggaggacattgtcgtgcctattagtacagcgtccgagggctctaccctgcttaccagtatcccggtttcaacaacacctgtggccagccctgaagcttccaccctttccacaacaccagttgattcaaactcacctgtcgtcacttccactgagatcagtagctccgctacctcagccgaaggtaccagcatgccaactagcacttactcagagggcagcacccctctccggtccatgccagtgtcaacaaagcctttggctagttccgaggcctccaccctgagcactactcctgttgacactagcatacccgtgaccaccagcactgagacgtcttcaagccccaccactgcaaaagacacttcaatgcctatctcaacaccctcagaggtctccactagcttaacctcgatacttgtgtccaccatgccagtggcctccagcgaagcctcgacacttagcacaacccctgtagatacaagaactttggtaaccacatccacaggcacgagctcctctcctaccactgcggaagggtctagtatgccgacctcgacccctggtgaaaggagcacccccctgaccaatatcctggtgtcgactacattgttggctaatagcgaggcaagtaccctgagcacgacaccagtcgatacatcaacgcccgtgacaacaagtgccgaggcaagctcaagcccaaccaccgccgaagggacaagtatgcggatttctactccttccgacggaagtacacccctcaccagtatcctggttagtactttgccagtagccagctccgaagcctcaacggtgagcactaccgccgtggatacttccattcctgtgaccacgagtacggaggcctcatcctcccccaccaccgctgaagtcacctcaatgcctacaagtaccccttccgaaacgtcaaccccactgacttctatgccagttaatcacacccccgtggccagcagtgaggccggcaccctaagcacaactcctgtggataccagtactccagtgaccactagcacaaaggcgagttcaagccccaccacagctgagggcatcgtggtacctatttctactgcaagtgaaggcagtaccctgctgacaagcatccctgtgagcaccacccccgttgcctcaagcgaggcatctaccctgagcaccacacctgtcgatactagtattcctgtgacaacttccactgagggaagctccagccccacaaccgccgagggaactagcatgcccatcagcacaccgtcagaggttagtacacctttgacctcaattttggtctctactgttcccgtggcaggatccgaggctagtaccctgtcaacaaccccagtcgacacccgcacccccgttactacaagtgctgaagccagctcttcccctacaactgctgagggcaccagcatgccaatcagcacaccaggcgagcgccgtactccgcttacgtctatgtctgtgtccaccatgcctgttgctagctcggaagcttccacactgagtaggacgccagcagacacgtctaccccggtaaccacaagtacagaggcttcaagcagcccaacgaccgccgagggaacagggatccccatttccactccaagtgagggatcaacaccactcacgtctatccccgtttcaaccactcctgtggctataccggaagctagcaccctttccaccactcccgttgattcaaacagtcccgtcgtaacttctacggaggtctccagttcccctactcccgccgaggggacaagcatgcccatcagtacctacagcgagggcagcacgcccttgacaggagttccagttagcaccaccccagttacaagttctgcaatctccaccctgtctaccacgcccgtggacacgtccacgcccgtgacaacgtccacagaggcgcactcctcccctactacctctgagggcacctctatgccaaccagtacaccaagtgagggcagcacaccgctgacctatatgcctgttagtactatgttggtggtgagcagcgaggattctacgctgagcgccacccccgtggacactagcactcctgttactacctccactgaggcaaccagctccaccaccgcagaagggacaagcatccctacatcaaccccaagtgagggcatgacccccttgactagtgtcccagtgagtaatactcctgtagctagctcggaagcttcgatactaagtactacacctgttgactctaacaccccacttaccacgtcaactgaggccagttccagcccgccaaccgcggagggcacctcgatgcctacttccacccccagcgaaggtagcacacctttgaccagtatgcccgtgagtacaaccacggtggcttcttccgaaacctctacgctgtccacgacacctgcagatacctctacccccgttactacctacagccaggcttcctctagcccacccatcgccgatggcacctcaatgcctacgtcaacgtatagcgagggcagcaccccactaacaaatatgagcttctccacaacccctgtggtttcttcagaggcaagtactctgtccaccactcctgtggacacctcaacccctgtcacaacgagtaccgaggcgtccctgagtcctacaacggccgagggcaccagcataccaacaagcagtccttccgaagggacaaccccgctggccagtatgcctgtctctaccaccccagtggtgtcttctgaagttaacacactgtccactacccctgtggactctaataccctggttactacctccaccgaggcatcctcaagtccaaccatcgcggaggggacctccctgcctacatccaccacttccgagggcagcacgcctctcagcattatgcccctttcaacaacacccgtggccagctccgaggcgtcaacactaagcactacacccgtggacacaagcacaccagttaccacctcatcccccaccaattcaagtcccaccaccgccgaagttacatccatgccaacttcgacggcaggtgagggaagcaccccactcaccaatatgcctgtgtccaccacaccggtggcctcatcggaggccagtacacttagtacaacccccgtggatagcaacactttcgtaacttctagcagccaagcttcttcatcccctgcaacactgcaggtgaccactatgagaatgtcaaccccatctgagggctccagctctctcactacgatgttgcttagcagtacttacgtgacttccagtgaagcctccacaccttctaccccctcagtggatagaagtacacccgtgaccacatcgacacaatcaaactccacaccaactccacctgaggtcattaccctgcccatgtcgaccccatcagaggtgtcaacgccactgacaatcatgccagttagtaccacgtcagtgacaatatctgaagctggtaccgcttccactctgccagtcgatacatctacacctgtcatcacatcaacacaagtatcttcgagccctgttactcccgaaggcactactatgcccatctggaccccctcagaaggtagtactcctctgacaaccatgcccgtgtccacgactcgagtgaccagctcggaggggagtactctcagtaccccttccgtggtaaccagtacaccagtcactacgtctacagaagctatctccagcagcgcaacgctcgactccactaccatgagcgttagtatgccaatggaaatttctaccctaggaacaacaatcctcgtctccactacccccgtgaccagattccccgaatcttcgacaccgagtatcccctcggtatatacttccatgtctatgactacagcctcagagggcagtagttcacctactacactggagggtaccactaccatgccaatgtcgaccacatccgaaagatccacacttctcactactgtactgatttcccccatatctgtgatgagcccgtctgaggccagtacattgtccacgccacctggggatactagtacccccctcctgacttccacgaaggccgggtcattctcaatccctgctgaggtaaccactattcgaatatctattacgtctgaaaggtccacccctctcaccactctgctggtgtcgactacactcccgacttcttttcctggagcttcaatagcctcaaccccccccttggatacctctaccactttcaccccatccaccgacaccgcctcgacccccaccataccggtggcaaccactatctcagtatcagttattaccgaagggtccacccccggaaccaccatatttatcccatctacacctgtcacttcatctactgcagatgtatttcctgccacgacaggtgctgtgagcacccctgttattacctcaaccgagttgaacacccctagtactagttcatcatctactacgaccagctttagcacgactaaggagttcacgacgccggcaatgaccaccgccgcccctttaacatacgttaccatgtcaaccgcgccctcaacccctagaaccacctctaggggatgtactacaagcgcttcaacactttcagcaacctctaccccacacacgagtacatccgtaactacacgcccagtcacccccagctccgaaagttccagaccgtctacaataacgagtcatactattccgcccacattccctccagcacactcaagcaccccaccaacaacttctgcaagctcgaccactgtgaaccctgaagcagtgactactatgacaactcgaaccaagccgtctacgcgaacgacaagtttcccgacagtgactacgaccgctgtccccacaaacacaactatcaagagcaaccccactagtacgcctaccgtccccagaactaccacatgtttcggagatggatgtcagaacacggccagtcgctgtaaaaacgggggcacgtgggatggtctaaagtgccagtgtcctaatctgtactatggggaactgtgtgaggaagtcgtttcttcaatcgacataggacctccagagacaattagcgcccagatggagctgaccgtgaccgtaacctcagtgaagttcacagaggaactgaaaaatcactcatctcaggaatttcaggagttcaaacaaacttttacagaacaaatgaacatagtgtattcgggcattcctgaatatgtgggcgttaacattactaaactgcgactgggaagtgtggtcgtggagcacgacgtgttgctgaggactaagtacacgcccgagtacaagaccgtgcttgacaacgctaccgaagtcgttaaggagaagattactaaagtcactacacagcagattatgataaacgacatttgttctgatatgatgtgtttcaacactactggcactcaggtccaaaatatcacagtgacacagtacgaccccgaggaagactgccgaaagatggccaaagaatacggcgattacttcgtcgttgaataccgtgaccagaaaccctactgtattagcccgtgtgaaccagggttctccgttagtaagaactgcaatctgggcaagtgccagatgagcctgtccggcccgcaatgtctctgtgttactactgagacccattggtacagtggtgaaacgtgtaaccaaggtacacagaagagcctcgtgtatggtctggttggcgctggcgtcgtcttaatgttaattatcttggtggcactgttgatgttagtctttcgctccaaaagggaagtgaaacggcaaaagtataggctgtcgcagctgtacaagtggcaggaggaagatagtggaccagcaccaggaaccttccaaaacatcgggtttgacatctgccaggatgatgactcaatccacctggagtctatttactcaaatttccagccgtccctacggcatatcgatcccgaaacaaagatcaggatacagcgaccccaggtgatgacaactagtttctag

SEQ ID NO: 195718 - DNA, 843 bp, synthetic construct
  misc_feature 1..843: note = Description of Artificial Sequence: Synthetic coding sequence
  source 1..843: mol_type = other DNA
atgaccaccgccctgggcagccagctgagcagcagccagaccgtgatccccggaagcagcggaactatctcgcacacaacagttgccccagggtcaagcgtcaccggaaccaccaccggagcaagcgacgatcaggtgacaggctccaagactgggaccactggagtcgccctctcaactaccgttgctcccggcagtagctccactgaagccacaaccagcaccggggtacatcgcacgactgtagtggggcaaaaaacgggagccactacaaggggcagcgcaaaacaaggcactaggtccaccatagaggctaccacatcttttcgcgggacgggcactaccggcagtggtatgaacactggcaccactggtgtcgtgtcgggtaacacaatttccccaagctctttcaacacggaagctacatccgggacatccgaacgccccaatccgggctcagagatcggaacaacaggcatcgtctctgggacaacagtggctccaggctcaagcaacacagaggccaccacatcactgggtaacggcggaacaactgaggcgggtagtaagatagtaactactggaattacgacggggactaccatcgtgcccggcagcttcaatacgaaagctaccacttccaccgacgtcggggtggcaacgggtgtcgggatggcaacaggcatcactaatatcatctcaggcagatcccagccgactggatccaagacaggatacactgtgactggatcgggaacaacggcgcttccaggtggctttcgaaccgacagtcccagctttccacttttcttgatttgcagttatcgggggcataatttttag

SEQ ID NO: 195719 - DNA, 837 bp, synthetic construct
  misc_feature 1..837: note = Description of Artificial Sequence: Synthetic coding sequence
  source 1..837: mol_type = other DNA
cccaccggcacccagacccccacccccacccccatcagcaccaccacaaccgttactcctacccccacccccacaggcacacaaacccctaccaccacacccattacgactacaactaccgtgacaccaacaccaactcccacgggtacccagactccaaccactgtgctaataacaacaacaaccacgatgactccgaccccgacgcccacttcaactaagagcactacggtgactcctattactactaccacaaccgtgaccgccacacctactccgactggaactcaaactcctacgatgattccaatctccactacaactacagtgactcctacgcccacacccaccacaggatcgacggggccacctacccatacttctacagcccctatcgcagagctgacgacgtcaaacccacctccagagtcaagtactccgcagacctctcggtcaacaagtagtccactcaccgagtccaccaccttgctttccacgttacccccagccatcgaaatgacatcaaccgccccaccctcgacgcccacggcccccactaccacatcaggaggccacacattgagcccgccgcctagcaccacaacaagcccccccggaaccccaacgcgtggaacaactactggatccagtagcgccccgaccccttcaacagtgcagaccaccaccacgagcgcatggacacccactccgaccccattgagcaccccctccatcattagaactaccggactcagaccctatccctcatcagttctgatctgctgtgtgctgaacgatacgtattacgcacctggagaggaagtatataatggttag

SEQ ID NO: 195720 - DNA, 5343 bp, synthetic construct
  misc_feature 1..5343: note = Description of Artificial Sequence: Synthetic coding sequence
  source 1..5343: mol_type = other DNA
atgggcctgcccctggcccggctggccgccgtgtgcctggccctgtccctcgccggaggatctgagctgcaaaccgagggcagaacacgcaaccacggacacaatgtttgttccacttgggggaattttcattacaaaactttcgacggagacgtcttccgattcccaggtctgtgtgactacaatttcgcgagcgactgccgagggtcctacaaagagttcgcagtacatctgaaacgcggtccaggccaggcagaggctccagcgggagttgagtccatcctgctaacaatcaaggacgatactatttacctgacccggcacctggctgttctgaatggagcagtggtgagcacacctcactactccccaggcttgttgatcgagaaatccgacgcttacactaaagtgtactctagggccggcttaacactgatgtggaacagagaagatgcgctgatgttggaattggatacaaagttccgcaatcacacatgtggattgtgcggggactataatggtttgcagtcctatagcgagtttctgagcgatggagtactcttttcccccctggagtttggaaacatgcaaaaaattaatcagcccgatgtggtgtgcgaggatcctgaggaagaggtcgctcccgctagctgtagcgagcacagagcggagtgtgagcgcctgctcaccgcggaggctttcgcagactgccaagacctggtaccgcttgagccttatctgagagcttgccagcaggacaggtgccgctgcccgggcggggatacttgtgtttgctcaaccgttgctgaattctcccggcaatgttcacacgccgggggccgtcctggcaattggagaaccgcaacattgtgcccaaaaacgtgcccaggtaacctggtgtatctggagtccggcagcccgtgcatggacacatgttcccatctggaggtttcatctctttgcgaagagcaccggatggatgggtgcttttgtccggaaggaacagtatacgatgatatcggagactctgggtgcgtgccagtctcccaatgtcactgcagactacacgggcatctttacacacccgggcaggagatcaccaacgactgtgagcaatgtgtgtgcaatgccggaagatgggtgtgcaaggacctgccttgccctggcacctgcgctctggaaggcggatctcatataaccacattcgacggaaagacttatactttccatggcgattgctactatgtactcgctaaaggagatcacaacgactcatacgcccttctaggagagctggccccatgtgggagtacagacaagcagacctgcctgaagacggttgtgttgctggccgataaaaaaaaaaacgtggtggtctttaagagtgatggctcggtgttgcttaacgaactacaagtgaatcttccacatgtgacagcctccttcagcgtcttccgaccatccagctatcacatcatggtatctatggccatcggggtcagattgcaggtccagttggcccctgtcatgcagctctttgtcacgcttgatcaagccagtcagggtcaagtgcagggactttgcggcaattttaacgggctcgagggggatgactttaaaacagccagcggcctggtagaggccacaggggcagggtttgcgaatacctggaaagcccaatcctcttgccatgacaaactggattggctggatgacccatgcagtcttaatatcgagagtgcaaattatgccgagcactggtgtagtttgttgaagaagacggaaacgccctttggacgctgccattctgcggttgaccctgcagaatattacaaacgctgtaaatacgatacctgcaactgccaaaataatgaagactgtctctgcgccgccctgagcagctatgctagggcttgcacagctaagggcgttatgctgtggggttggcgggagcacgtctgtaacaaagatgtgggatcatgtcccaattcccaggtctttctgtacaaccttaccacctgtcagcagacgtgccgctccttgagcgaagctgattcacactgtctggagggatttgcacccgtggacgggtgcgggtgtcccgaccataccttcctcgatgagaaaggacgctgtgtgcccttggctaagtgtagctgttaccacaggggcctttacttagaggccggagacgtcgtggtgaggcaggaggaaagatgcgtgtgccgggatggcaggcttcattgtcgacaaatccggctgatcgggcaatcctgtacagccccaaagatccacatggattgttccaacctgacagccctggctacgagtaagcctcgcgcactgagctgccaaaccctggctgcaggctattaccacacagaatgcgtgagcggctgcgtctgcccggacgggctgatggatgacggaagggggggttgtgtggttgaaaaggagtgtccgtgtgtgcacaacaacgatctatacagttctggagctaagattaaggtcgattgtaacacgtgcacctgtaaacggggccgctgggtgtgcacccaggctgtctgtcacggtacttgctctatctacggttcgggacactatattaccttcgacggtaagtattacgactttgacggccactgcagctacgtggcggtccaagactactgcggacagaatagcagtctcggtagcttttccatcatcacagaaaatgtgccatgtggaaccacaggtgttacctgtagcaaagcgattaagatattcatgggtaggacagagcttaagctcgaagataaacatcgagtcgtcatccagagagacgagggccatcacgtggcctacaccacacgcgaggtcggacagtacttggtggtggagtcctcgacagggattattgttatttgggataagcgcaccacagtgtttattaaactggccccgtcttacaaaggtacagtctgcggactgtgcggtaactttgaccataggagtaataacgactttacgaccagagaccacatggtggtgtcctctgagcttgactttggaaatagctggaaggaagccccaacatgtcctgatgttagcaccaacccggagccttgcagtttgaatccccatagacggagctgggctgaaaagcagtgctcgatcctcaagtccagcgtattctcgatttgccatagtaaggttgaccctaagccgttctatgaggcctgtgtgcacgacagttgcagctgcgacacaggtggcgactgcgagtgcttttgtagcgccgtggcatcctatgcccaagaatgtactaaggagggagcctgtgttttttggcggactcctgatctatgtccaattttttgcgactactacaatccgccacatgaatgcgagtggcattatgagccatgtgggaaccgctctttcgagacctgtcggactataaacggtattcactcaaatatctctgtcagctatctggagggctgttatccgagatgccctaaagaccgccctatatacgaagaggacctgaaaaagtgtgtaaccgctgataagtgcggttgttatgtggaagatactcactaccccccaggcgcttctgtgcctaccgaggagacctgcaagtcgtggtgcacctgcactcaaactcatactgcttaccacgtgcacacacatggcaaaatcttaaatcagacccaagatggcgctttttgttattgggagatctgtggacccaacggaactgtagagaagcacttcaatatctgctctatcacaaccaggccaagcacgctcaccaccttcactactataaccctgcctaccacaccaaccacattcacaaccactacgacaacgactactcccacgtcctccaccgtgctgtcaacaactcctaagctgtgctgtctctggtccgattggatcaatgaagatcatcccagcagcggtagtgacgacggcgaccgagaaacttttgacggggtgtgcggggctcctgaggatatagagtgccgctctgtaaaggatccgcatctgagcctcgaacagcttggtcagaaagtccagtgtgacgtgagcgtgggtttcatctgcaagaatgaggaccaatttggcaacgggccattcggcctgtgctatgattacaagatccgcgttaactgctgctggcccatggataagtgcataacaacccccagcccgcctacgactactccatcccctccacccacctcaactactacactgccaccaacaactacaccttctccacccacaacaacgactacaacccctccacccacgaccacaccctctccacctatcacaaccaccaccactccaccccccaccaccacgccttccccaccaatctccacaacaacaacacctccccccacaaccaccccttctccccccacaaccaccccgtccccccctactaccacgccttcacctcctacaaccactactaccacccctccgcctaccactacgcccagtccccccaccaccacgcctatcacccctccggcctctaccaccaccctaccccccaccacaactcctagcccccctacaaccactactaccacacctccaccgaccactacgcccataactactacaacaacggtgactcctacaccaaccccgacgggaacccaaacccctacgacaacaccaattaccaccaccactacagtcactcctacgccgacacctaccggtacacagacccctacctccacgccaatcaccacaactacgactacccccacacctaccgctatcacaactaccactacggtcacccccacacctactcccacaggaacccaaacccctactactaccccaattactacaactacaactgtcacccctactccaactcccacaggcacccaatcgccaacaccaactgctatcaccacaaccaccaccgtcacgccaacaccaacaccgacaggtacccagacccccacctctacaccgattacaactacaactacagtaacgcccacccccaccccgactggcacccagactccaactccaacacctatttcgacaacaaccactgtgacaccaacccctacaccaacaggcactcagacccctacgacaacgcctatcactaccactactacagtaacgcccactccgactcccacaggcacacagacccctaccaccacccccacccccacttccactaagagcaccaccgtcaccccaatcactacaacgacaactgtgaccgcaacaccaacccctactgggacgcaaaccccaacaatgattccaatctctacaacgacgaccgtcacaccatag

SEQ ID NO: 195721 - DNA, 1230 bp, synthetic construct
  misc_feature 1..1230: note = Description of Artificial Sequence: Synthetic coding sequence
  source 1..1230: mol_type = other DNA
gacatcgagtgccggagcgtgaaggacccccacctgagcctggagcaactgggacagaaggtccaatgcgacgttagcgtggggtttatatgcaagaacgaagatcagtttggaaacggaccatttgggctatgctatgactataagatccgggtgaattgttgttgtacccctaccaggggcacgaccacaggctcttcctccgcaccaacaccctcgacggtccagaccactacaacatctgcctggactccaactccaacacccctgtctacgccctccataatccgcactaccggtcttaggccttacccgagtagtgtccttatctgttgtgtattgaatgatacatattacgcaccaggggaggaagtatataacgggacttacggggacacttgctattttgtcaactgctccttgagttgcacgctcgagttctacaattggagttgcccatctacaccctcaccaactccaaccccatctaaaagcacccccactccttccaaaccctctagtactccatctaagcccactcctggcactaaaccgccagaatgccccgacttcgatccacccaggcaagagaacgagacgtggtggctctgtgactgcttcatggcgacctgcaagtataataatactgtggagatcgttaaagtggagtgcgagccacccccgatgcctacatgcagtaacgggctgcagcccgttagggtggaagacccagacgggtgctgctggcattgggaatgcgactgttactgtaccggatggggggacccccactacgttacgtttgatgggctgtattactcctatcaggggaactgcacctacgtcctcgtggaagagatatccccttcagtggataatttcggtgtttacatcgacaactatcattgcgaccccaacgacaaagtgtcctgccctcgcacgctcatagtcagacacgagacacaggaggtgctgatcaagaccgtgcacatgatgccgatgcaagtacaagttcaggtcaacaggcaggccgttgccctgccttataagaaatatggactcgaagtgtaccaatccggcatcaactacgtggtagacatcccggagctgggagtgctagtgagctacaatggtttaagtttcagtgtgcggctcccctaccaccggttcggcaataatacaaagggccaatgtggcacttgcaccaacacaacaagtgacgactgctag

SEQ ID NO: 195722 - DNA, 8454 bp, synthetic construct
  misc_feature 1..8454: note = Description of Artificial Sequence: Synthetic coding sequence
  source 1..8454: mol_type = other DNA
atgggcctgcccctggcccggctggccgccgtgtgcctggccctgtccctggcaggaggaagtgaactccagacagaaggccggacgcgcaaccatggccacaacgtgtgctccacctgggggaacttccattataaaacctttgatggcgatgtgtttagatttcctggtctgtgcgactataattttgcatccgactgtcggggctcatacaaggagtttgccgtgcacctcaagcgtggcccgggacaagcagaagcccccgccggcgtggagtccatcctgctgacgattaaagatgataccatctaccttactcggcacctagcagttctgaacggcgccgtggtctcgacccctcattactcacccggcttacttattgagaaaagtgatgcatacacaaaggtctactctcgggcaggacttacacttatgtggaatcgagaggatgctctcatgctcgaacttgacactaaattcagaaatcatacctgtggactgtgcggtgactacaatggcctgcagtcatattctgaatttctgtccgatggagtattgttctctcccctcgagttcggaaatatgcagaagattaaccagcctgacgtagtgtgcgaggatcctgaggaagaggtagcccccgcttcttgcagcgagcacagagccgaatgtgagagattgcttactgccgaggcatttgctgattgtcaggacttggtcccactggagccatacctgagggcctgtcaacaggaccggtgtaggtgcccaggcggcgacacctgtgtctgttccaccgtagctgagttcagtcggcagtgtagtcacgctggcggccgccccggaaactggagaactgcaactctgtgccccaaaacctgtcccggaaacctggtgtatctggagagtggtagtccatgcatggacacctgttcacatctcgaggtaagtagcctctgcgaagaacacaggatggacggttgtttctgccccgaaggcactgtgtatgacgatatcggcgatagcggttgtgtcccagtcagccagtgccattgcaggctgcatggacatctctatactcctggccaggaaatcactaatgattgcgaacagtgtgtttgcaatgccggcagatgggtctgtaaggatttgccatgccccggaacctgtgcgctcgaagggggtagtcatatcactactttcgatgggaagacgtacactttccacggagactgctattatgtgctagcgaagggggaccataacgactcttatgctttactaggcgagctggcgccgtgtgggtccaccgacaaacagacttgcttgaagacggtcgtactcttggccgacaagaagaagaatgtcgttgtttttaaaagcgacggttccgtcttgctcaacgagctgcaggtgaatttgccccacgtcactgcctcttttagtgtgtttagaccaagttcctatcacatcatggtctccatggcaattggtgtgagactacaggtgcaactggctccagtgatgcaattgttcgtgacgcttgaccaggcaagccagggacaagtccagggtctgtgtggaaattttaacggacttgagggagacgattttaagactgccagcggactggtggaagctacaggggcgggctttgccaatacatggaaggcccagtcctcatgccacgataaactggattggttggacgacccctgttctcttaatatcgaatcggctaactacgcagagcattggtgctctctgctgaagaagactgagacaccgttcggaaggtgccactctgccgtggatcctgcggaatattacaagcgctgcaagtatgacacatgcaactgccagaacaacgaggattgcctttgtgcagccttaagctcttatgcccgggcatgtactgctaaaggagtaatgctctgggggtggcgcgaacacgtgtgtaacaaggacgtcggatcatgccccaacagccaagtgtttttgtacaacttaactacctgtcagcagacatgccgcagtctaagcgaagccgacagccactgtctggaaggatttgcacccgtcgatggatgtggctgccccgaccatacattcctggacgaaaaaggccgatgcgtccccctggccaagtgcagctgctaccacagaggtctgtacctcgaagctggggacgtcgtagttcggcaggaagaaaggtgcgtgtgtagggacggtagattacactgtcggcaaattagactgataggccagtcttgcacggctcccaagatccacatggactgttctaatctaacagccctcgctacaagcaaacctcgggccctgtcatgccagaccctcgcagcaggctactaccacacggaatgcgtctctggttgtgtctgtccggatggtctaatggacgacgggcgcggggggtgcgtggtggaaaaagagtgcccatgtgttcataataacgatctatactcctctggggctaagatcaaagtagattgtaacacatgtacatgcaaaagaggtcgttgggtatgtacccaggccgtgtgtcacggcacatgctcaatctacgggagtggacactacattacttttgatggaaagtattatgactttgacgggcactgcagttacgtggctgtgcaggactattgcgggcagaactctagtctcgggtcatttagcatcatcacagaaaacgtcccctgcggaacaactggggtaacttgctcaaaagccataaagatcttcatgggccgcactgaactcaagctggaagacaagcaccgagtggttatccagagagacgagggacaccacgtggcctacaccacaagagaagtgggccagtatctcgtggtcgagagctcgacgggtatcattgtcatttgggataaacgcacaaccgtgtttattaagctggctccgtcctataagggcacagtgtgcggcctgtgtggcaatttcgaccataggagcaacaatgattttacgacccgagaccacatggtcgtatcttctgagctggacttcggaaacagctggaaggaagccccaacatgccctgatgtgagcacaaatcctgaaccttgtagcctcaacccgcaccgtagatcctgggcagaaaaacaatgctctatcctcaaaagcagcgttttttctatctgtcacagcaaagtcgatccaaagccattttacgaagcttgtgtgcatgacagctgctcttgcgacaccggtggtgattgcgagtgtttttgtagcgccgtcgcatcttatgctcaggaatgcaccaaggagggagcttgtgtcttctggcgaacccctgatctgtgtcctattttttgtgactattataacccaccccatgaatgcgagtggcactatgaaccgtgtggaaatcggagtttcgaaacctgcagaaccattaacgggattcacagcaacataagcgtctcgtatctagaaggctgctatcccaggtgtccaaaggatcgtccgatctacgaagaagaccttaagaaatgtgtgactgctgacaaatgcggctgctacgtggaggacactcactacccccctggagctagtgtccctactgaggaaacatgcaagtcctgcgtgtgtaccaacagttcccaggtggtttgcagacctgaggaggggaagatattgaatcagacacaggacggggccttctgctactgggagatctgcggcccgaacggcaccgttgagaagcactttaatatttgtagcataacgactaggccttcaacgctgactactttcactaccataacgttacctaccacccctacaacattcacaactactaccactacgaccactcccaccagtagtactgtactcagcaccacaccaaaattgtgttgcttgtggtccgattggatcaatgaagaccacccttccagcggcagcgacgatggagatcgtgagactttcgatggagtatgcggggcacccgaggacattgagtgtcggtctgtgaaggacccacacctgtccctggaacagctcggccagaaggtccagtgtgacgtgtcagtgggcttcatatgtaagaatgaagaccagtttgggaacggaccattcggattgtgctatgattataaaatacgcgttaattgttgctggccaatggacaagtgtatcaccaccccctctcctcccactaccactccgagtcccccacccacttcaactacaaccctgcccccgaccaccaccccctctccacccaccacgactaccaccactccacctccgacgacaactccgtcaccccctatcactactactacgactcccccacctactactaccccatccccacccatttccacaacaaccactccgccacccaccacaactccttccccccctaccacaacccccagccctcccaccaccaccccatcccctccaaccacaacaacgacaacaccccctccgaccacaacccctagccccccaaccaccacccctattactccccccgcctctacgacaacgcttccccccacaaccacacctagtccaccaactacaacaaccactacgccgcccccaacgaccacaccaattaccacaaccactaccgttactcccacccctacgcccactggcactcagacccccactactacacctatcaccaccacaacaaccgtgacacctacccctaccccaactgggactcaaacacccacctctacaccaatcaccaccaccaccacagtgactcccactccaaccccaaccggcacacagacgcctaccaccacgcctattaccactaccactactgtgacccccacaccgactcctactggtacacaaacaccaactcccaccgcaatcacaacaaccacaaccgttacgcccacacccacgcctaccggaacacaaacgcccacaacaactcccattaccacaaccacaaccgtgactcccactccgacaccaacaggaacacagtctccaactcccaccgcgattactacgacgaccaccgtaactccaacccctaccccaaccggaacccagactcctacctcaactcccatcaccacaaccactacggtcacaccaactcccacccccaccggcacccaaacacctacaccaacacccatttccacaacaacaactgtcacaccaacgcctactcccactggcactcaaactccgaccaccaccccaataactactactaccactgtaaccccaactcccactcctacaggtactcaaaccccaacgacagtcctcatcaccactacaaccactatgactcctacacccactcccacctctaccaaatcaacaaccgtgacccctattacaacgaccactaccgtgaccgccaccccaactccaacggggactcagactcccaccatgattccaattagcacaacgactactgtgaccccaactcccacccctaccacaggttctaccggtccacccacgcatacttcaactgcacctattgccgaacttactacttctaaccccccaccagaatcctcaactccacaaacctctaggtcaactagtagtcctttaacagagtccactacactcttatccaccctgcctcccgccattgagatgactagcacggcccctcccagcactccaacagcccccactaccacctcagggggacacacactgagccccccaccatctaccaccaccagcccacctggaacacccacacgggggaccacaaccggatcatcaagcgctccaactccatccactgtgcagaccactaccacatccgcctggacccctacccctacacctcttagtacaccatctattattcgcacaactgggttacgcccctacccttcaagcgtgctcatttgttgcgtgctgaacgatacatattacgcgcctggggaggaggtgtataatggaacctacggagatacctgctacttcgtgaactgcagcctttcctgtaccctggagttctataattggtcatgcccaagcacccctagtcctaccccaactccctccaagtctacaccgactccttcgaaaccaagttccacaccttccaagcccaccccaggcaccaagccgcccgagtgtccggatttcgacccacccaggcaggaaaatgaaacatggtggctgtgtgactgcttcatggctacatgcaagtacaacaacacagtggaaatagtgaaggtggagtgtgagcctcctcctatgccaacctgttctaatggactgcagcctgtgcgtgttgaggatccagatggatgttgctggcattgggaatgtgattgctactgtactggctggggagatccccactatgtcacattcgatggcttatattattcctaccaggggaattgcacgtacgtcctggtcgaggagatctcccccagcgtagacaactttggcgtgtatattgacaattaccattgtgatccaaatgacaaagttagctgtcctcgaacactgatcgtccgacacgaaacccaggaagtgctcataaagaccgtgcatatgatgccaatgcaagtgcaggtccaggttaataggcaagccgtggccctgccatataagaagtatggtctggaagtgtatcagtccgggatcaattatgtggtggacatccctgagctgggagtgttggtgagttacaacggtctgtctttttctgtgaggttgccttaccaccgatttgggaacaacaccaaggggcagtgtgggacctgtaccaacactacatctgacgactgtatcctaccttcaggggaaatcgtgagtaactgcgaggccgcagccgatcaatggctggtgaatgaccccagcaagccccactgtccacactcaagttctacaacaaagaggcccgccgttactgtgccaggcggcggtaagaccacaccacataaggactgcacaccttccccgctgtgccagctaatcaaagacagcctgttcgctcagtgtcatgcattggtgcccccacagcattactacgacgcctgtgtgttcgacagttgttttatgccaggcagcagtcttgaatgcgcttcattgcaggcctatgccgccctctgtgcacagcaaaatatctgcctggattggcggaatcacacccacggcgcgtgcctggtggagtgcccaagccaccgtgagtaccaggcttgcggccccgccgaagaaccaacctgtaagtcatcatcatcgcagcagaacaacaccgtgttagtggaagggtgcttctgcccagagggcacaatgaattacgcaccaggtttcgatgtgtgtgtgaaaacttgtggctgtgtagggccggataatgtgcctcgggaattcggagagcactttgagtttgactgcaagaattgtgtatgcctggagggtggctccgggatcatctgtcagcccaaacggtgtagccagaaacccgtcacccattgtgttgaggacggaacatacctggccacggaagtgaacccagctgacacctgttgcaatatcactgtgtgcaagtgtaataccagtctctgtaaggaaaagccgagtgtgtgccccctggggttcgaagtgaagagcaagatggtccctgggagatgttgccctttttattggtgcgaatcaaagggcgtgtgtgtgcacgggaacgctgaatatcagcctgggtcgccagtctacagcagcaagtgtcaggactgcgtttgcactgataaggtggataataatactctgctgaacgtcatcgcgtgtactcatgtgccctgcaacaccagctgctcacccggatttgagctgatggaggctcccggagagtgttgcaaaaagtgtgagcagactcactgtattattaagagacccgataaccaacacgttatactgaagcctggggactttaagagtgatccaaagaacaattgtaccttttttagttgtgtcaaaattcacaatcagcttatctcatccgtatctaatattacgtgccctaatttcgacgcctctatctgcattcccggctcaatcacctttatgccgaatggatgctgcaagacgtgtaccccgagaaatgaaacaagagtaccttgcagcaccgtgccagtgacaacagaagtaagttacgctggatgtaccaaaacagtgttgatgaaccactgctccgggtcttgtggaacttttgttatgtattcagccaaagcccaggcccttgaccacagctgttcttgttgtaaggaagagaagacttcacagcgagaagtcgtgctatcatgtcctaacgggggctcactgacccacacctatacccacatagagagttgccagtgtcaagacaccgtttgtgggctgccaacaggcacttctcgtagggcgcgccgatctccgagacaccttggtagcggctag

SEQ ID NO: 195723 - DNA, 2631 bp, synthetic construct
  misc_feature 1..2631: note = Description of Artificial Sequence: Synthetic coding sequence
  source 1..2631: mol_type = other DNA
atctacagcaccgtgagcaccagcaccaccgccatcaccagccactttaccacctccgaaactgccgtgactccaacacctgtgacccctagttcactgagcaccgacatccctacaactagcttgcgcactttgactcccagtagcgtgggcacctcgacgtcactgactactactactgacttcccttcaatacctactgacatctccacacttccaacacggacccatatcatatctagctcaccctccatccagagcacggagacaagcagccttgttggcacaacgtcccctacaatgtcaacagtacgtatgactctccggataacagaaaatacgccaatcagttccttctcaacatcgatcgtggttattcccgagaccccaacccagacaccacccgtccttacgagtgctactggaacccaaaccagcccagcccctacaaccgtcacttttggatctacagactcttctactagcaccttgcataccctgacaccaagcaccgccttgagcaccattgtgtctacatcacaggtgcctatcccttccacacactctagtacccttcagacaacaccgtccacgcccagcctccagacaagcttgacgagcacctcagagttcaccacggagtcttttactcgcggaagcacatccactaatgcaatactcaccagtttttcaactatcatctggtcctccactccaaccatcattatgtcttctagtccaagcagtgcgtccatcacccccgtgttttctaccacgatacacagcgttccatcgtcaccgtacatattcagcaccgagaacgttggatctgctagcataactgggtttccatctctctcatcatcagccaccacttccacctcttctacgtcgagcagtctgacaacagcactcaccgaaattacccccttttcctatatttcccttccaagcaccactccgtgtccagggaccattaccatcaccatagtgccagcgtctcctaccgacccttgtgtcgaaatggatccctcaacagaagctacatcccctcccacaacccccttaacagtttttccttttaccacggagatggtgacgtgtcctacatcaattagtattcagacaacgttgaccacttatatggatacttcctctatgatgccggaaagtgagtcttcgatttctcctaatgcctcatccagtacggggactggcaccgtccccaccaatacagtgtttacgagtacgcggctgcccacttcagaaacgtggctgtctaactcttctgttatacccctgcctctcccaggagttagtaccatccctctaactatgaaaccaagttcgagtctgccaacaatactgagaaccagcagcaagagtacacacccgtctccccctaccactaggacttccgagacacccgttgctaccacccagactcctactacgctcacaagccgtagaactacacggatcacatctcagatgacgacccagagcaccctgacaaccacagccggaacatgtgataacgggggaacctgggagcaaggccagtgcgcctgcctgcctggattcagtggcgaccggtgccagttacagacaaggtgccagaacggtggccagtgggacggattgaagtgtcaatgcccctcaacgttttacggttccagttgcgagtttgccgtcgaacaagtagatctggacgtagtggaaaccgaagtcggcatggaagtttccgtggaccaacagtttagccctgacttaaacgataatacaagccaggcctatagagacttcaataagacgttctggaaccagatgcagaagattttcgcagacatgcaaggcttcacatttaagggagtagaaattctgtccttacggaacggtagcatagtggtggattacctggtgctgctcgagatgcccttcagtccacaactggagagtgaatatgaacaggtgaagacaactctgaaggagggattgcagaacgcctctcaggatgctaactcttgccaagatagccagaccctttgctttaaacccgatagtatcaaggtgaacaataatagcaaaacggagctgacaccagaggccatatgcagaagagcagcccctaccggttacgaggaattttactttcccctggttgaggctacccggctgcggtgcgtgacgaaatgcacctctggggtggacaatgccatagactgccaccagggccagtgtgtgctcgagacaagcggtccagcctgcaggtgctattcaacagacacccactggttttctggccccaggtgcgaggtcgctgtccactggagggccttggtcggggggctcacagcaggcgccgcacttttggtgctgctgctgctggcattaggtgtgagggctgtaagaagtggatggtggggcggccagcgccgaggccgaagctgggatcaagacagaaaatggtttgagacatgggatgaggaagtggtcgggacctttagtaattgggggttcgaggatgacggaaccgacaaggatacgaatttccatgtcgcgctagaaaacgtcgacactacgatgaaagttcacataaaacgaccagagatgactagcagtagcgtctag

SEQ ID NO: 195724 - DNA, 927 bp, synthetic construct
  misc_feature 1..927: note = Description of Artificial Sequence: Synthetic coding sequence
  source 1..927: mol_type = other DNA
tgcgacaacggcggcacctgggagcagggccagtgcgcctgcctgcccggattttcaggagacagatgccagttgcagaccagatgccagaacggcggccagtgggatgggctgaaatgccagtgtccatcgaccttttatggatccagctgcgagtttgcagtggaacaggtcgacctggacgtcgtcgaaacagaggtgggcatggaggtttccgttgatcagcagtttagcccggatcttaatgacaatacatcccaggcatatagagattttaacaagacattctggaatcagatgcagaaaattttcgcagatatgcaggggtttacttttaaaggagtggaaattctcagtctgaggaatgggagcatcgtggtggactatctggtgcttctcgagatgccgtttagcccccaactggagtctgagtacgaacaagtgaagaccaccctcaaggaaggactacagaatgcttcccaggatgctaattcctgccaggactctcagacactgtgctttaagccagactctattaaagtgaacaataatagcaagactgagctcacacctgaggctatttgcagacgggcggccccaaccggctacgaggagttttacttcccactcgttgaggccacacgactccgttgtgtcacaaagtgtacctccggcgtggataacgcaatcgattgtcaccagggccagtgcgtccttgaaaccagcggacctgcctgtcggtcttgggatcaagatagaaagtggttcgagacctgggacgaagaagtggtgggcacattctctaattggggtttcgaggatgacggtaccgacaaggacaccaatttccatgtggcattggagaacgttgacacgaccatgaaggtccatatcaagcgtccagaaatgacatcctcctctgtgtag

SEQ ID NO: 195725 - DNA, 3531 bp, synthetic construct
  misc_feature 1..3531: note = Description of Artificial Sequence: Synthetic coding sequence
  source 1..3531: mol_type = other DNA
atgaagggcgcccggtggcggcgggtgccctgggtgagcctgagctgcctctgcttgtgcttgttaccacatgtggtacccggtatgacaactccttctctgaagactgacgggggcaggaggaccgctacctcgccaccgcctaccacctctcagaccattataagcaccattccgtccaccgccatgcatacaagaagtacagccgctccgatacctattctaccagagcgtggggttagcctgtttccttacggagcaggcgctggggatctggagtttgtgcggagaacagtggatttcacatctcccttgtttaagccagcaacaggctttcctctggggtcttcattgcgtgatagcctgtatttcaccgataacggtcagattattttccctgagagtgactaccagatcttctcctatccaaatcctctcccgaccggcttcacaggacgggatcctgtggcgctggttgcccccttctgggacgacgccgacttctctacaggtaggggaaccaccttttaccaggaatatgagacgttctatggagaacactctctcctagtacagcaggcagagagttggatcagaaaaatgacaaataacggaggttacaaggctcggtgggcgctcaaagtcacttgggtcaatgcccacgcttacccagcacagtggacacttggctccaatacttaccaagctatcctctcgacggacggaagtaggagctatgccttgtttttgtatcagagtggtggcatgcagtgggatgtcgctcaacgatctggcaatcctgttttaatggggttctcctctggcgacggatactttgaaaactcacctctgatgtctcagcccgtatgggagcgctaccgaccggaccgcttcctcaattctaatagcggcctgcaaggcctgcagttttataggttacatcgtgaggagcggccaaattataggcttgagtgtttacagtggctcaagagccaacccaggtggccaagctggggctggaaccaggtgtcatgcccctgcagttggcagcagggtagacgggacctgagatttcagcctgtcagcatcggaaggtggggactggggtccagacagctgtgttctttcaccagctggagagggggagtttgctgctcttacgggccatggggagagttccgcgagggatggcacgtgcagagaccttggcagctcgcgcaggagctggaacctcaatcttggtgttgccggtggaatgacaagccttatctctgtgcactttaccagcagagacggccacatgtcgggtgcgctacgtatagaccacctcagcccgcttggatgttcggcgatcctcacataaccaccctggacggggtttcgtatacattcaatggtcttggcgatttccttctcgttggagcgcaggacggcaatagcagttttctcctgcagggacgaacggctcagactgggagcgcccaggccactaacttcatagcctttgctgcccagtacaggagctcttcactgggccctgttacggtgcagtggttgcttgaacctcacgacgctatcagggtcttgctggataatcaaaccgtgacgtttcagcctgaccatgaggacggtggcgggcaggaaacctttaacgcaaccggggtgctgctcagccgcaatgggtccgaagtgagtgccagctttgacggttgggctacagtcagtgtcatcgccctctcaaacattctccatgcgtcagcttcgctgcccccagagtatcagaacaggactgaaggccttctgggcgtgtggaataacaaccctgaggacgactttcggatgcctaatggaagcacgatccctccgggctctcctgaagaaatgttgttccactttggaatgacctggcagataaatgggactggcttgcttggaaaacggaacgatcagttaccctccaactttacacccgtcttttattcacaactgcaaaagaactccagttgggccgagcacttgatatcaaactgcgatggagatagctcatgcatctatgacaccctcgccctcaggaacgcatccattggactgcatactagggaggtgagcaagaattacgaacaggcaaacgctaccctgaatcagtatcccccaagtatcaacggtgggagggtaatcgaggcctataagggccagacaactcttattcagtacacaagtaacgctgaagacgcgaactttaccctgagggactcatgtaccgacctggagctgttcgagaacggtactctgctttggacccccaagtccctcgagccctttaccctggaaatccttgcccgcagtgctaaaattggtcttgcgagcgctctgcagcccagaaccgttgtttgccattgtaacgctgagtcccaatgcttgtacaatcaaaccagccgggtgggcaattcctctttagaagtggcaggctgcaagtgtgacggtgggacttttggcaggtactgcgagggaagcgaagacgcatgtgaggaaccttgcttccccagcgtgcattgtgtgccaggcaaagggtgtgaggcatgtccccccaatctcactggtgacggacgtcactgtgcagccctggggtcctctttcctctgccagaaccaaagctgtccagtaaattattgttataaccaaggccattgctacatttcccagaccctcggctgccagcctatgtgcacatgcccccctgccttcaccgattcgagatgttttcttgctggtaataacttctcaccgacagtcaacctcgaactgcctctgagggtcattcaactcctgctttctgaggaggagaatgcttcaatggccgaggtaaacgcctcagtggcctatcggttaggcacattggacatgcgcgcctttctgcggaactcccaggtcgagcggatagacagtgcggcgccagcgtcaggctcacccattcagcactggatggttatcagtgagttccaatatagaccgcgcgggcctgtgattgattttttaaacaatcagctactggccgcggtggtggaagccttcctgtaccatgtccctcgccgctcagaagaaccacgcaatgatgtggtgtttcaaccaatttctggcgaagacgtgcgggatgtgacagctctaaacgtaagtaccctgaaggcttatttccgatgtgacggttacaaaggatatgatcttgtgtactcgcctcaaagcggatttacatgcgtttctccctgttcacgcggctattgcgaccacggcggacagtgtcaacacctgccaagtggcccacgatgttcatgtgtgagcttcagcatctataccgcttggggagagcactgcgaacacctgagtatgaaattggatgctttcttcggcatcttcttcggtgccctcggaggcctattgctccttggagtgggaacctttgtggtgctccgtttttggggctgttctggtgcaagattcagctactttctgaactctgctgaagctctgccgtag

SEQ ID NO: 195726 - DNA, 3378 bp, synthetic construct
  misc_feature 1..3378: note = Description of Artificial Sequence: Synthetic coding sequence
  source 1..3378: mol_type = other DNA
atgaagggcgcccggtggcggcgggtgccctgggtgagcctgagctgtctctgcctctgcctgctgccacacgtggtgcctggagtttccttattcccgtatggagccggtgcaggcgatctggagtttgtaaggcgcacggtagactttactagtccactgttcaagcctgctacgggctttccgctgggttcctctcttagagactctttgtactttaccgacaatgggcaaatcatctttcccgagtctgactaccaaatctttagctacccaaacccactccccaccggctttaccggtcgggatcctgtggctttggtggcccccttctgggatgatgcagacttctctactggtcgggggacaacgttctatcaagagtatgagaccttttatggggagcactcacttttggtgcagcaggctgaatcatggatccgtaagatgactaataacggggggtacaaggcccgatgggctctgaaggtaacgtgggtcaacgcccacgcgtaccctgcccagtggacactggggtccaatacatatcaggcgatcctttccaccgatggaagcaggtcgtatgcgctgtttctgtatcagagtggaggtatgcagtgggacgttgcacagaggtccgggaaccccgtcctgatgggcttttcgagtggcgacggttattttgagaacagtcccttgatgtctcaaccggtgtgggagaggtacagacccgaccgcttcctcaatagtaactccggactccagggactgcagttttacaggcttcaccgggaggagcgcccaaattatagactggagtgcctgcaatggttaaagagccagcctcggtggccatcgtggggatggaaccaggtatcatgcccctgctcttggcaacagggtcggagggacttgcgcttccaacccgtgtccataggcagatgggggcttggcagcagacagttatgcagtttcaccagctggcgcgggggggtttgctgctcctacggaccctggggtgagttcagggaaggatggcatgtccagcggccttggcagctggctcaggagctcgagccacagagttggtgttgccgctggaatgacaaaccatacttgtgtgccctatatcagcagcggaggcctcacgtcggctgtgccacctaccggcctcctcagccagcgtggatgtttggggaccctcacatcaccaccctagatggagtctcttacacatttaacggtctgggtgatttcctgcttgtgggcgcgcaggatgggaattcttccttcctgctgcagggccgtaccgcacagactggatcagcacaggccactaatttcattgcctttgccgcccagtacagatcttcaagtcttggacccgttacagtgcagtggctgctggaacctcatgacgctattcgcgttctgctggataaccagaccgtaacgtttcagccagaccacgaggatggcggtggccaggagactttcaacgcaaccggcgtcctgctttcccgaaatgggtcagaggtctcagctagttttgatggatgggctactgtctccgtgatcgctctgagcaatattctacatgcatccgcttcactcccccctgagtaccagaataggaccgagggccttctgggagtgtggaataataatcctgaagatgatttccgcatgccaaacggcagcacgatcccccctggcagccctgaggagatgctgttccattttgggatgacctggcagataaacggcactggcctgctgggaaaaagaaacgaccagttgccctccaattttaccccagtgttctacagtcagcttcaaaaaaatagtagctgggccgagcacctaatctcaaattgcgatggcgactcttcatgtatttatgatactctagcccttcggaacgcctctatcggactgcatacccgcgaggtgagcaaaaactacgagcaggccaacgctacactgaatcaatatcccccctcaattaatggcggccgggtgatcgaagcctacaaagggcagacgactctcattcagtatacctcgaacgccgaggatgccaactttaccctgcgggattcttgtacagatttagaattattcgagaatggcacacttctctggacccctaagtctctggagccttttactctggaaattttagccaggagcgctaagattgggctagctagtgcactgcaacccaggacagtcgtgtgtcattgcaatgctgagtctcagtgtttgtataaccagaccagcagagtgggcaacagttcgctggaggtagctggatgcaagtgcgatggaggtacctttggccggtactgtgaagggtcagaagatgcatgtgaggagccatgcttccccagtgtgcactgtgttcccggtaaaggatgtgaagcctgtccacccaacctcacaggcgatggtagacattgcgccgccctgggatcaagtttcttatgtcagaatcagtcatgtccagtaaactactgctataaccaaggccactgctacatctctcaaaccctgggttgccagccaatgtgcacctgtcctcccgcctttacagatagcaggtgtttcctcgcaggaaacaacttctctcctacagtaaatctagaactgcccctgcgcgtaattcaactcctgctctccgaagaggagaacgcaagcatggccgaagttaacgcatctgtcgcctacaggctgggaacactcgacatgagagcctttctacgcaactcacaggtggagagaatagactcggcggcacctgcctccggaagccctattcagcactggatggtgatttcagaattccagtatcgaccgagaggcccagtgattgatttcctgaataatcagctgttggctgccgttgtggaggccttcctgtaccacgttccccggcggagcgaagaaccacggaacgatgtggtatttcagcctatttcaggtgaagacgtaagggacgttaccgccctgaacgttagcacactgaaagcgtactttcggtgtgacgggtacaaaggatacgatctggtatacagcccccagagcgggtttacatgtgtctcaccctgtagccggggatactgtgaccacggtggccagtgtcagcatctgccaagtggacctcggtgctcttgcgtgagtttcagcatctacacagcctggggagagcattgtgagcatctctctatgaaattagacgcttttttcggcattttcttcggggctctgggcggcctcttactgctgggagtaggaacctttgtcgtcttgcgcttttggggatgctctggagctcgattctcgtactttctgaacagtgcagaagcgctcccttag

SEQ ID NO: 195727 - DNA, 5739 bp, synthetic construct
  misc_feature 1..5739: note = Description of Artificial Sequence: Synthetic coding sequence
  source 1..5739: mol_type = other DNA
cccggcaccaccgaggacaccctgatcaccggcagcaagaccgccgccccggtgacctcgacaggaagcactactgctacactagaaggacaaagcacggctgcctcgagcagaaccagcaatcaggatatctctgcgtcaagtcaaaatcaccaaaccaagtccacggaaactacgtccaaggcccaaaccgacactttgactcagatgatgaccagtaccctgttcagcagtccttcagtccataatgtgatggagacagctccaccagacgagatgacaacctcatttccttccagcgtcactaatacactgatgatgaccagtaagacgatcacaatgactacctcgactgacagtacgctcggtaatactgaggaaaccagcacagcaggcactgagtctagcacccccgtgacatcggctgtttccatcactgccggccaggagggccagagtagaaccacatcctggagaacatcaattcaagacacttccgcctcgtcccagaaccattggacaagaagcacacagacgactcgggagagccagacaagcacactgacccatcgaacgactagtaccccttccttcagcccctcggttcataatgtgaccggtaccgtgagccaaaagacctcaccatctggggaaacagcaactagctctctttgtagcgtaactaatacaagcatgatgacgagcgagaaaataaccgtgacaacctccacaggaagcactctgggcaacccaggggagacctcatcagtgccggtgacgggtagccttatgcctgttaccagcgcagcattggtcactttcgatcccgaaggccagagtccagccaccttttccaggacctctactcaggatacaacagccttcagcaagaaccaccagacccagtccgtggagaccactcgcgtgtcgcagattaacaccttgaacacactaacacccgttactacttctacagtactctcctctcccagcggattcaatccatcaggcacagttagccaggaaactttcccctctggcgaaacaacaacaagctctcccagtagcgtttccaataccttcttagtgaccagcaaggttttccggatgcctacctccagagattccactctgggaaacaccgaagaaacttctttgtctgtatcgggaaccatttctgccatcaccagtaaggtgtccacgatctggtggagtgatacattaagtaccgcattgagtccttcctcactgcccccgaagattagcaccgcttttcacacacagcaatctgagggggccgagacaacaggaagaccccacgaaaggtcgtccttttcacctggggtgagccaggaaatctttacactccacgaaacaactacatggccatcttcatttagctcgaagggacacactacatggtcacagacagaattaccctctacgtccactggggctgccacacgactggtaaccggcaaccctagtaccggtactgcggggactattcctcgtgtgccctccaaggtgtccgcaattggcgagccgggtgagcccacaacttactcaagccatagcactaccctgcccaagacaacgggagcgggcgcccagacgcagtggacacaggagaccggcacaaccggggaggcacttctctctagcccttcatacagtgtaacccaaatgatcaagactgcaacatcgcctagtagcagccctatgctggatcggcacacctctcaacagatcacaactgccccgtctaccaatcactctaccattcactctaccagcacgagtcctcaggaaagcccggctgtgagccagaggggacacacgcaggcaccacagaccacacaggagagccaaacgaccaggtcagtttcaccaatgacagatacaaagacagtcacaacaccgggcagcagttttactgcttccggccattctccatcagagatcgtgccacaagacgccccaacaatttccgccgctacgacattcgctcctgcgcccacaggggacggccacaccacccaggccccgaccactgccctccaggcggcaccttcgtcacatgacgccacattgggcccttctggaggtacttcactctccaagaccggggcgttgacgttggccaactccgtcgtctccaccccgggcggtcccgaaggccaatggaccagcgcttccgcctccacctcccccgacaccgctgctgctatgacacatacccaccaggccgaaagtacagaggcctctggccagacacagacctccgaacccgcgtcgagcggcagccggacaacctccgctgggacagcaaccccctcctcttccggcgcaagtggtaccaccccctctggatctgaggggatctccaccagtggagagactacccgtttctctagcaacccatcgcgtgacagccacacgacccagtccactaccgagctgctcagcgcgtctgccagtcatggtgcaataccagtgagcaccggaatggcatcttcaattgttcctggcacatttcacccaacgttgagcgaagctagtaccgcaggtagacctacagggcagtcatcacccaccagtccctctgcctcaccacaggagaccgcagccatctctaggatggcgcagacccagagaacccggacctccaggggttcggacacaatttccttggcgtcacaggctaccgacacattctcgacagtgcccccaaccccaccgtctatcacgagcacgggcctgactagcccccagactgaaactcatacactcagtccaagtggcagcggcaagacctttacaaccgcattgatcagtaacgctacccctcttcccgtgacatacgcatcttccgcatctacaggccacgctactcctctcgctgtctcatcagccacatctgcttctacagtcagcagcgacagccctctgaagatggagaccccagggatgactaccccctcgcttaaaaccgatggtggccggaggaccgccaccagcccccctcctacgacttcacagaccatcatttctaccatcccctctaccgcaatgcataccagatcaacggccgcacccatcccaattttaccggagagaggcgtgtcgcttttcccatatggagccggcgctggtgatctcgagtttgtgcgaaggaccgtagacttcaccagcccccttttcaaaccggccacgggctttccactgggcagttcactgagagactctctttattttactgataacgggcagatcatctttcctgagtcggactatcaaattttctcataccccaacccacttcccaccggatttacaggacgggatccggtggctttggtggcccccttctgggacgatgcggacttttccacaggtaggggcacaactttctaccaggagtacgaaacattctacggcgagcactccctgcttgttcagcaggcagagtcctggatccgaaaaatgactaataacggcggctataaggctagatgggcactcaaggttacctgggtcaatgcccatgcttaccctgctcagtggaccttaggctcaaacacctaccaggcaatactgagtaccgacggctccagaagttacgccctgtttttgtatcagtcagggggcatgcagtgggacgtggcacaacggtccggtaatcccgtgcttatgggatttagcagtggtgacggttacttcgagaatagcccactgatgtctcagccggtttgggagagatacagacctgatcgctttctgaactccaacagtggtttacagggtctacagttctatagactccaccgggaagagagacccaactacagactggaatgtcttcagtggctcaagtcacagcctcgatggccctcctggggttggaatcaggtgtcgtgcccttgttcgtggcagcagggaagaagggacctccggttccagcctgcaagccttccgcccgaatatcagaacagaaccgaaggtttgctgggggtgtggaacaataaccctgaggatgattttagaatgcctaatggcagcacgatcccgccggggtctcccgaagagatgctgttccattttgggatgacttggcagattaatggaactggactgcttggcaaaagaaacgaccaactgccaagcaattttaccccagtgttctatagccagctgcagaaaaacagctcttgggccgaacatttaatcagtaactgcgacggagacagctcctgtatctatgacaccttagctctgaggaatgcctcaatcggtctgcacaccagagaagtctccaaaaattacgagcaagcgaatgctacgttaaatcagtacccaccctccattaacggcggcagagtaatagaggcatacaaaggacagactactctgatccagtacaccagtaacgcagaagacgccaattttactctgcgcgatagctgcaccgatctcgagctgtttgagaacggaaccctgttatggaccccaaagtcactggagccattcacactggagatcctagccagatccgcgaagatcgggctggcaagtgccttgcagccacgtaccgtcgtttgccattgcaatgctgaatctcaatgcctgtataaccaaacttctcgcgtggggaactccagcctggaagtcgcagggtgtaagtgtgacggaggcacctttggtcgatactgcgagggaagtgaggatgcctgtgaggaaccctgcttcccctcagtgcactgcgtaccaggcaaagggtgtgaggcctgtccaccaaacctaaccggcgacggccgtcactgtgctgctttgggctcatctttcctgtgccagaatcagtcctgcccagttaactattgctataatcagggccattgctatatctcgcagaccttgggctgccagccgatgtgtacgtgccctccggccttcacagattctcgctgctttctggccggcaataattttagtccaacggttaacttggaattgcccctccgtgtcatccaacttctattgtccgaggaggagaatgcaagcatggccgaggtgaacgcttccgtggcctaccggttagggaccctcgatatgcgggctttcctgagaaatagccaagtggaacgcatcgattcagctgctcccgcctccgggagccccattcaacactggatggtgataagcgaatttcaatacagaccccgtggacccgtgatagactttctcaataatcagctcctggccgccgtcgtcgaggcgttcttgtatcacgtgccaaggcgcagtgaagagccgagaaacgacgtcgtctttcagcctatctcaggagaggatgtgcgggatgtcactgcccttaacgttagtaccctaaaggcttatttcagatgcgatggatacaagggctacgacctcgtctactcccctcagagcgggttcacatgcgtatcaccatgttctcggggatactgcgatcacggaggtcagtgtcagcacctgccatctggacccagatgcagctgcgtgtccttctcaatctatacagcttggggggaacactgtgagcatctgtctatgaagctggatgcatttttcggaatctttttcggggctcttggcggcctgcttctacttggagtcggaaccttcgtagttctgcgcttttgggggtgctccggcgcaagattttcatactttctgaattcggccgaggccctgccatag

SEQ ID NO: 195728 - DNA, 16239 bp, synthetic construct
  misc_feature 1..16239: note = Description of Artificial Sequence: Synthetic coding sequence
  source 1..16239: mol_type = other DNA
atgaagggcgcccggtggcggcgggtgccctgggtgagcctgagctgtctctgtctctgtttactgcctcatgtcgtgcccgggacaaccgaagacactttaattacgggatccaagaccgctgctcccgtgacctcaactggcagtactaccgccaccctcgaggggcagtcaactgctgcaagttcccggacatcgaatcaggacataagcgctagtagccagaatcaccagactaagtccactgaaactaccagcaaggcacagaccgataccttgactcagatgatgaccagtaccctattctcgtcgccttcagtacataacgtgatggagaccgcacctccggacgaaatgacgaccagttttcccagctcagtcactaatactctcatgatgaccagcaagacgatcactatgaccacttctacagactctactttaggcaatactgaggagaccagcacagccggcacggagagcagcacccctgtcactagcgctgtatcgattacagccgggcaagagggacagtcccgcaccacatcatggagaacgtccatacaggatacttccgcgagcagtcagaatcattggacccgtagtacgcaaaccacaagagaatcgcagacctcgactttaacgcacagaaccacatctactccctctttctctccatccgtgcacaatgtaaccggcacagtctcgcaaaagacttcaccaagcggtgaaaccgctacttcatccttgtgcagcgtgaccaatacttccatgatgacatcagaaaagatcacagtcaccacctctactggatcaacattgggtaatccgggtgaaacctcatctgtgcccgtgaccggctctctcatgcccgttacttcagccgcgctagtgacgtttgatcccgagggtcaatctcccgccacattttcacgcacatcaactcaggatacgacagcttttagcaaaaaccatcagactcagtccgtggagaccacaagggtttcccagatcaacacacttaacacactgactcctgtcacgacaagcactgtcctgtccagcccttcggggtttaacccctcagggactgttagtcaggagaccttcccttctggggagaccaccacaagctctccaagtagtgtctcaaataccttcttggtaacctctaaagtttttaggatgccaacttctcgggactctacactggggaatactgaggaaacttcgttgtccgtgtctggtaccattagcgcgattacctctaaagtcagcactatttggtggtctgacaccctcagcacggcactgtcaccaagcagtcttcccccaaagatctccactgcctttcacacccaacagtccgaaggcgctgaaacaacaggacggcctcatgagaggagctccttcagccctggagtgtcccaggagatctttacactccatgaaaccacaacatggccatcctctttctcatccaagggtcacacaacctggtctcagacagaattaccctcaacaagtaccggggccgcaactcgcctcgtcacggggaatccctccacaggcacagctgggacgattccgagggtcccatcaaaggtgtcagctatcggagagcctggcgagccaaccacttacagtagtcactccactacccttccgaaaacgacaggcgccggcgctcagacccagtggacacaggaaactggcactacaggcgaggctcttctgtctagtccttcctacagcgtaactcagatgattaaaactgcgacttccccatctagcagccccatgttagataggcacacaagccagcagataacaacagcaccatcaaccaatcacagtactatccactccacctccacctctccacaggagtcaccagccgtgtctcagcgcggacatacgcaggcaccccagaccacgcaagaatcgcagaccactcgttcagtcagcccgatgacagacaccaaaacagtaactactcccggcagctcttttacggcatcaggccactctccttctgagatagttcctcaggacgctccaaccatttctgctgcaaccaccttcgctcccgccccaactggcgacgggcacaccacacaggcccccacgactgccctccaggcagctccatcttcacacgatgccacactcggaccgtccggaggcacctcccttagtaaaacaggcgctctcactctagcaaactctgtcgtcagcactcccggcgggccagaagggcaatggactagcgcctccgcaagcacatcgccggatactgctgctgcaatgacgcacacccaccaagctgagtccaccgaagcatctggacagacgcagaccagtgaaccagcgtcttccggaagcaggacaaccagcgctggaaccgcaacaccatcgtctagtggcgcaagcggaacgaccccaagcggttctgaaggtattagcactagtggagaaactacccggttctcctccaacccaagccgggacagccacacaactcagagcacaaccgagctcctgtctgccagcgctagccacggcgccatccctgtcagcaccggcatggcctccagtattgttcccggtacttttcatccaacactaagcgaagcctccaccgctggtagaccaactgggcagtccagtcccacatcccctagcgcgtctccacaggagaccgcagcaatttccagaatggctcagactcagcgcacaagaacttccagaggtagcgatacaatctccctggcatctcaggccaccgacacatttagcaccgtccctccaacaccgccgtctataacttccaccggcctcacatctccccagaccgaaacccacacactgtctccttctgggagcggaaagaccttcactactgcgctgatttctaatgccacgcctctccccgtgacatacgcgagctctgcgagtaccggacacaccaccccgctccacgtgaccgacgcctcctctgtgagcacagggcatgccaccccccttcctgtgacttctccgagtagcgtgtccaccgggcacacgactccattgccggttactgatacctccagtgaatccaccgggcatgtgaccccccttcccgttacctcctttagttctgcttcaactggagacagcacgccactacccgtgactgataccagctccgcatctactggccacgttacccctctgcctgtaacaagcctgagcagtgcctcaaccggggataccacgccactgccagtcacggatacatccagcgcctccaccggacatgctacatcactgcccgtgaccgatacttccagcgtgtccactggacatactacacctttacccgtaacagacaccagcagtgctagcacaggtcacgcgacctctctgcctgttaccgacaccagctcggtcagcacgggccacaccacacccctgcacgtaacagacgcatcttccgcaagcacggggcaggccacacctctcccagttacttcgctcagctcggtatctactggcgacactacaccattgcctgtcacttccccctcctcggccagtacgggccacgccactcctctgctggttaccgacacaagcagcgccagcaccggtcacgctacaccattgccagtgacggatgcctcaagtgtgagcaccgatcatgccacctctttgcctgtcacaattccctccgcagcatccaccggccataccacacccctgcctgtgaccgacacaagcagtgcttcaacaggacaggccacatcccttctcgttactgatacaagcagtgtgtccaccggcgataccacgccccttcctgtgactagtacatcctcagcttccacgggacacgtgacacccctacacgtgacatcccccagctccgcaagcactggtcatgcaactccactgcccgtaacttcattaagtagcgcttccaccggcgatactatgcccttgcccgttacatcaccatcctcagccagtaccggcgataccacccccttgcctgtgacggatgccagctcagtgagcactggccacacgacacccctccacgttaccgacgccagtagcgcttctacagggcaggccactcccctccctgtgacctctttaagctcagtgagcacgggggataccactccgctgccagtgacttccccctctagcgcatctacaggacatgcaaccccacttttggttactgacacgtcctccgcgagcacaggacacgccaccccgcttccagtgacagatgcctcctctgtgagcaccgaccacgctacatccctccctgtcacgatcccaagcgccgcatcgacaggccacacaactccgctgcctgtcaccgacactagttcggcctccacgggacaggcaacatcactcctggtgacggacacaagcagtgtcagtacaggcgacaccacaccgttgcccgttacaagcaccagttccgcatccactggccacgtgacaccgctgcatgtcacatccccaagcagcgccagcaccggacatgcaaccccactacctgtgacgagcttgtcatcagcatcaactggggatacaatgccccttccagtcacatccccctcctctgcatcgaccggcgatacgaccccactcccggtgaccgacgcctctagcgtctcaacaggccacactactcctctccccgttacatccccaagcagtgcttcaaccggacacactacccctttacctgtcactgacaccagttccgcctctaaaggcgatacaaccccactgcctgtgaccagcccgagcagcgcgtcaactgggcacactacccccctgcctgtcacggatacgtccagcgctagcaccggggacaccacgccactacccgttacaaatgccagctcactcagcaccggtcatgcaacacccctgcatgtgacaagccccagtagtgcctcaactggacatgccaccccgctgccagtcacatcaacctcatctgcgtccaccggacatgccactccactacccgtgacggggctgtcatccgccaccactgacgatactactcgactgcccgtaacagatgtgtcatctgcatcaactggacaggctaccccgctaccagttacaagcctcagctccgtcagcacgggcgatacaactccgctgccagtgacttccccctcatctgcatccacaggccatgcatcacctctgctcgtgaccgatgctagttctgcttctaccggccaggcaacacctctgcccgtgacggacaccagctccgtgtcaacggcgcacgctacaccactccccgtgacaggcctcagcagcgcgagtactgacgatactacacgactgccagtgacagatgtgtcctctgcgagtacaggacaggctatccctttgcctgtcacttctccatcatctgcgtcaacaggagatacaaccccactacccgtgaccgatgcttccagcgccagcaccggagacaccacttcgctgccagttaccatcccctcttccgcttcttccggacacactactagccttcccgtgacagacgcctcatcagtcagcactggccatgccacgtcactgcttgtgacagatgccagctctgtctcaaccggagacaccacccctctgcctgtcacagacaccaactcggcctcaaccggagacactacccccttgcatgttactgacgcatcctccgtgtccaccggtcacgccacaagcctgcccgtcaccagcctgtccagcgcctccacaggcgataccacaccactgcccgtcacgagccccagctccgccagttccggccacacaacaccgttacccgtgacagacgccagttcagttcctacaggtcatgctacctccctgcccgtgaccgacgcctcctcagtatcgacaggccacgcgactccactacccgtgaccgacgcctcgtctgtatccaccggtcacgccactccattgccagtgacagatacgtcatcagtgagcaccggccaagctaccccccttcccgtgacttccctgtcaagcgccagcacaggggataccacaccacttccagtcaccgacacatcaagcgccagtaccggccaggacacaccacttcctgtgacctccttgtccagtgttagcacaggcgatacaacccccctgcccgtgaccaatccttccagcgcctctaccggccatgccacacccctgctggttactgacgcctcttctattagtaccggccatgcgacctctcttctagtgactgacgctagcagcgtcagcacggggcacgctaccgcactccatgacacagatgcttcctcactgagtaccggtgataccacgccactacctgtgacctctcctagttcaacgagcacaggagacactacaccgctgcccgtcacagagacttctagcgtaagcaccggccatgcgaccagcctgcccgtgacagatacaagcagcgcctccaccggccatgcgacctcactgcccgtcaccgatacaagtagcgccagcactgggcacgcaacgccgctccccgttacagatacttcctcagctagcactggacaggctaccccactgccagtgacctctcctagctccgccagcaccggccatgccatacctctgctggtgacagacaccagctctgcaagtactggacaagctaccccactgccagtgacatccctgtcaagcgctagtaccggcgataccacgccgttacccgttactgacgcaagtagcgtcagcaccggacatgctacctctttgccggtcacttcactgagcagtgtatctaccggggacaccactccactgcccgtcacatctccatcaagcgctagtactggccacgctactcctctgcatgtcactgacgcctcttcagcgtcaaccgggcacgcaaccccccttcccgtgaccagcctgtcgtcagcctctaccggagacaccacacccctacctgtcacttctccctctagcgcctctactgggcatgccacacctttgcatgttacagatgccagttctgtaagcactggagacactactccattaccagtcacatcttcgtccagtgccagttcaggccacacaacaccgttgcccgttaccgacgcctcgtccgcatcgactggtgacaccacaccacttcccgtgacagacacttctagcgcgagcaccgggcacgccacacacctgccggtcaccggcctgtcctctgcatctaccggggataccacccggttgccagtaaccaacgtaagcagtgcttctaccggacatgctactcccttgccagtcaccagtacatctagtgctagcaccggggataccacacccctgccaggaacagacacctcctctgtgagtaccggccataccacaccactgctggtgaccgacgctagctctgtgtccacgggggataccacacgcctgcctgtaactagccctagcagcgcgagtaccgggcacaccactcccctcccagtgaccgatacaccctcagccagcacaggcgatactacccctctgcctgtcacgaatgccagcagtctgtcaacacggcacgcaacttctctgcacgtgacctcccctagctccgccagtaccggccatgccacgtccctgcctgtcacggacacctctgctgccagcaccggccatgccacacctctgccagttacaagcacctccagcgcgagtacaggagacacaaccccactgcccgtgaccgatacctattcggccagtactggtcaagctactccgctgccggtgacttccctctcgagtgtgtctaccggggacacaacacctttaccagtgacctcgccctcaagtgcttcaacagggcacgccacaccactgctggtcactgatgcaagctcagcatcaaccggtcaggctacccctctgcccgtgactagtttgtcatccgtgagcaccggtgacactacccccctgccagtcacgtccccttctagtgcttctaccgggcacgccacttcactgccagtgaccgacacatcaagcgcatcaaccggcgacactacaagtctccccgtaacagacaccagctccgcttataccggtgatacaacctcacttcctgtaaccgacactagcagctcctccaccggagataccacacctttacttgttaccgagacctcgtcagtgagtaccggtgatacaactcccttgccagtcacggatacctccagtgctagcactggccatgccacccctcttcctgtgacaaataccagcagcgtgagtactgggcatgccacccctctacacgtcacctcaccttcctccgcctccaccggccatacaactccacttcctgtgaccgacgcctcaagtgtgtctaccggccacgcaacctctctgcctgtaaccgatgcctcatcagtcttcaccggccatgcgaccagcctgccagtcaccatcccaagttccgcctcctccgggcacaccactccccttcctgttacggatgcttctagcgtcagcacagggcatgcgaccagtctgccggtcaccgacgccagtagtgtgagtacaggccacgcaacccctctccccgtaaccgatgcatcctccgtctcaactgggcatgctacccctcttcctttaacctctctatcttccgtctctaccggagatacaacgcccctgccagtgaccgacactagcagcgcgtctacagggcaagccacccctttaccagtcactagtctctcttccgttagtaccggcgatacaaccccgttgccggtcacggatacctcaagcgcctccacaggacacgccacctccctcccagttacagacacttcttctgcctccacaggacacgcaacaccactgccagacactgatacaagttcggcgtctactggccacgctaccctgttgccggtcaccgatacatccagcgccagtatcggacacgcaacaagtctgcctgttaccgatacttcttcaatcagcactggacacgctactcccctacacgttacttctcctagcagcgctagcaccggtcacgccacaccactcccggtcactgacacaagctcagcttcgaccggacacgcgaaccccctccacgttacttcgccttcaagcgcaagcacggggcacgccacccccctgcctgtaaccgatacaagttcggcttccacaggtcacgcaactccactacctgtaactagtttgtctagtgtcagcactggcgacactacgcctctgcccgtgacaagccctagcagcgcatccacaggccatacaacaccacttccagtcactgatactagttcagctagtaccggccaggccacagctctgccagtcacctctacgtcttccgcctccacaggggatactacccctctgcctgtgacagatacctcctccgcgagcacgggtcaggccaccccgcttccagtgacctccctgtccagcgtgtcaactggagatacaacgccgctgcccgtgactagtccaagttccgctagcactgggcatgcgacgccactgctagtgacagacgcttctagtgcttccacaggacaagctaccccattgcctgtgaccagtttatcctctgtgtctacaggcgatactaccccactcccagtcacaagtcctagtagtgcttcaacaggccacgctacctcactccccgtaacagacacttcctctgcctcaactggggacactacttcccttccagttacagataccagttccgcctataccggtgacactacttccttacctgtgacggatacctcctcgagtagtaccggagacacaacccccttgcttgtcaccgaaacttcctcggtcagcaccgggcacgctacaccactattagtcactgatgctagctctgcctctacaggccacgccacaccactgcacgtcacctctcctagctccgccagtactggagataccacaccagttcctgtgactgacacttcatcagtgtcaacaggccatgctacacctcttcccgtgactgggctgtccagcgctagcacaggcgacaccactaggttacccgtgactgacatctcctctgcaagtactgggcaggccacccccttacccgtcacgaatacttctagcgtcagcacaggcgacacaatgcccctccctgtgacatccccctcctcagcaagcaccggtcatgccacccctttaccggtaacatccacctctagcgctagtacaggccatgcaacacccgtgccagtgacaagcacatctagcgcgtctacaggccacaccacgcctctgcctgtaaccgacactagcagcgctagcacgggagacaccactcccctcccagttactagtcccagtagtgcttccactgggcataccacgcctctgcatgttacaatcccctcctcagcaagtaccggagatacttcaaccttgccagttaccggggcttcttcagcttccaccgggcacgctactcctttgccagtgactgacacttcttctgtcagcaccggacatgctacgccgctccctgtgacctcactgagctcagtgagcaccggtgatacgacaccgctccccgtaacagacgcttcttcagccagcacagggcaggcaacgccgctcccagtgacatccttatcttctgtgtcaaccggcgatacaactcccttgctcgttactgacgcctcttctgtctccaccgggcatgctactcccctccctgtgaccgacacatcttccgccagcactggagatactacacggctgccagttactgacacttctagtgcatccaccggccaagcgaccccactgccagtgacttccctgagcagtgtatccacaggcgacacgacgcccctcctggtgactgatgcaagttctgtctctaccggacacgcgactccactgcccgtgactgacactagtagtgcaagcacaggagacactacccgcctgcccgtgacagacacatcctccgctagtacaggccaggcgacccccctgcctgtgactataccttccagttcctcctccggccacaccactcctctgcctgtaaccagtacatctagtgtgagcaccggtcatgtgactcccctgcacgtcactagtccctcaagtgcatcaacgggccacgtcaccccactgccagtcacatctacgtcctcagccagcaccggacatgccacacccttactggtgacagacgcatcatcagtcagcaccgggcatgccacgccgctgccggttactgacgcctcttcagcctcaacgggtgatacgacccccctgcccgttactgacaccagttcagcctccacaggacaggcaacgccattgccagtgacttctctgagcagcgtctctactggggacaccacccccctgcctgttacagatgcatcttcggcttcgactggccacgccacccccttacctgttaccatccccagcagtgtgtctacaggagacactatgcctttacctgtaacttctccctcctcagcaagtacaggccacgcgacccccttacccgtgacaggactgtctagcgcttctaccggtgatacaacaccacttcctgttaccgacacaagttcagcctccacgcgtcatgccactccattaccagtaaccgatacaagctccgcgtccactgacgatactacacgcttgcccgtgacagatgtcagcagtgcctccaccggtcacgccactccactgcccgtgacatctacttcaagcgcaagtacaggcgatacaacccctttacccgttacagacaccagttcagtctccacagggcacgcaacctccctcccggtcacctcccgttcctctgcaagcacagggcacgctacgcctcttccagttacagacacaagctctgttagcaccgggcacgctactcctctgcccgtgacgtctacatcttccgtgtcaaccggtcatgctacccctctacctgtgacgtcacctagctccgcgtcaacgggccacgcaactcccgtgcctgtgactagtacttctagcgcgagtacaggagacaccacgccgttacccgtgacaaatgcctcgtccttatccaccggccacgcaacaccactgcatgtcacctcccctagcagtgcatcgaggggcgatacatctacattacctgtcaccgacgcgtcgtcagcctcaaccggccacgcaaccccgctacctctcacctcactgagcagcgtcagcacgggcgacactaccccactgcctgtgacagatacctccagcgcgagcaccggccaggcgacaccgttacctgtgacttctctctcctcagtttccactggcgacacaacccccctgccggttaccatcccgtcatctgcgtccagtggtcacactacaagtctacccgtgactgatgcatccagcgtgagtacaggccacggcacacccctgcccgtgacgagtacaagtagtgcgtccacaggagacactaccccccttcctgtcacagacacatctagcgcttctactgggcatgccactccactccctgtgaccgataccagcagcgccagcaccggccatgccactcccttacctgtcactagcttgtccagcgtgagtacaggccatgccacacctctagcagtgtctagcgccacttccgcgtctacggtgtcctccgattcgcctttgaagatggagaccccaggcatgaccacgccgagcctgaaaactgatgggggtcggaggacagccacctcccccccacccacaacaagccagaccattatcagcacaataccctcaaccgctatgcatactcggagtaccgcagcgccaatcccaatcttgcccgagcgcggagtgtctctgtttccatacggcgctggcgcgggcgatcttgagtttgtacgccgaacggtcgacttcacgtctcctctgtttaaacctgccacggggtttcctttgggatcatccttgagggatagcctgtacttcactgacaatggccagataattttccctgagagcgactaccagatttttagttatccaaaccctttgcccacagggtttactggacgggacccagttgctctagtggcccctttctgggatgacgctgatttcagtactggaaggggcaccacattctaccaggaatacgagactttttatggagagcatagcctactggtacagcaggctgaatcctggatcaggaaaatgacaaataatggggggtacaaagctcgatgggctttgaaagtgacatgggtcaatgcccacgcgtacccagctcaatggacgctgggatccaacacataccaagcaatcctatcaactgatggcagcaggagttacgctctctttctctatcagagtggtggcatgcagtgggacgtggctcagcgttcagggaaccccgtcctcatgggtttcagtagcggagacgggtactttgagaacagtccactgatgagccagcccgtctgggaacgataccgccctgaccggtttcttaacagcaacagtgggcttcaagggttgcaattctataggctgcatagggaagaacgaccgaattatcgactggagtgtctccaatggttaaagtcacagccccggtggccctcttggggctggaaccaggtgtcttgtccctgctcatggcagcagggccgtcgggatctgagatttcagcccgtgtccatcggtcgctggggattaggtagcaggcagctgtgcagcttcacatcatggcggggaggtgtgtgttgctcatatggtccgtggggggagttccgagaaggatggcatgtacagaggccctggcagctcgcccaagagctcgagccccagtcttggtgttgcagatggaacgataaaccctacttgtgcgctctctaccaacagagaaggccgcacgtgggctgtgcaacctacagacctccgcagccggcctggatgttcggggaccctcatattacaacgttagacggggtgagttacaccttcaatggacttggcgattttctgctagtcggagctcaggacgggaatagcagcttcttactccagggaagaactgcccaaactgggagtgcccaggccacgaatttcatcgcctttgcagcacagtatcgctccagtagcctaggacccgtcaccgttcagtggctactggaaccacatgatgccatcagggtgctgctcgacaaccaaactgtgacctttcaaccagatcacgaagacggtggtggccaagagacttttaacgccacaggtgtgctgctgtctcgcaatgggtctgaggtgagtgctagttttgatggttgggcaaccgtttccgttatagcgctctcaaacatactgcatgcgtcagcctccttgccacccgaataccagaacaggactgaaggcctgcttggggtctggaacaacaaccctgaggacgattttagaatgccgaacggttccactatacccccaggtagcccagaagagatgctgttccacttcgggatgacgtggcagataaatggtaccgggttactcggcaagcgcaatgatcagttaccaagtaacttcacgcctgtgttttacagtcaattgcagaagaactctagttgggcggagcatctgatctccaactgtgatggtgattcaagttgcatttatgatacactcgccctaagaaacgcctcaattggactgcacaccagggaggtgtccaagaattatgaacaggccaatgccacgctcaatcagtacccaccttctattaacggcggtcgcgtcattgaggcatacaaagggcagacaacacttatccaatacaccagtaacgccgaagacgccaatttcactttgcgtgactcgtgcaccgacctggagctcttcgagaacgggaccctgttgtggacacccaagagtctggagcccttcaccctggaaatcctcgcccgctcggctaaaattggcctggcttcagccctgcaacctagaactgtcgtgtgccactgtaatgccgagtcacagtgcctgtacaaccagacttcaagagtgggaaactccagtctggaagttgccggatgcaaatgtgatggtggaactttcggcaggtattgcgaaggcagcgaagacgcgtgtgaagagccatgttttccttctgtgcactgtgtgccgggcaaaggttgtgaggcttgtcctccgaacctaactggagatggccgacactgcgccgctcttggtagttcgttcctatgccagaaccagtcctgtccagtgaactactgctacaaccagggtcattgctacatttcccagaccctcggatgccaacccatgtgcacctgtccaccagctttcacagattctaggtgctttctagccggaaacaacttctcaccaaccgtgaacctggagctcccgctcagagtgattcagctcctcctcagcgaggaagagaatgcaagcatggcggaggtgaacgcctcagttgcgtatcggctgggaaccttggacatgagggccttcttgcgcaacagtcaagtggagcggatcgattctgcagctccggcttctggctctccaattcagcactggatggtgatatccgaattccagtataggccacgcggcccagtcatcgacttcctgaacaatcaactgcttgccgccgtggtcgaagcattcctgtaccacgtccctcggcgctcggaggagcctagaaatgacgtggtgtttcaaccaatttcaggtgaggacgttagggacgtcaccgcgttaaacgtgtcaaccctgaaggcttactttcgctgcgacggatacaaggggtatgacctggtgtactctccacagagtggtttcacttgcgttagcccatgctcacggggatattgcgaccacgggggccaatgccagcacctgccatctggtccgagatgctcttgcgtttcatttagcatctatacagcctggggggaacactgtgaacacctcagcatgaaactggatgctttcttcggtatcttttttggtgccttggggggactgttgttgcttggagtgggcacattcgtagtcttaaggttttggggctgcagcggcgccaggttctcttattttttaaactctgcggaagcactcccgtag

SEQ ID NO: 195729 - DNA, 16083 bp, synthetic construct
  misc_feature 1..16083: note = Description of Artificial Sequence: Synthetic coding sequence
  source 1..16083: mol_type = other DNA
atgaagggcgcccggtggcggcgggtgccctgggtgagcctgagctgtctgtgtctgtgccttttgccacatgtcgtgccaggcacaaccgaagataccttaataaccggtagtaagacggcggcccctgtgacatccactggaagtaccactgctactttggaaggccagtcaaccgcggcctccagcaggacttccaaccaagacatatctgcatcttctcagaaccaccagaccaaatccacggagactacatctaaagcacagactgacacactcacccagatgatgacctcgaccctgttcagtagcccaagcgtgcataacgtcatggaaaccgcaccacctgacgaaatgaccacaagctttccaagcagcgtgaccaacacactgatgatgaccagcaagacaatcactatgaccaccagcaccgactccacacttggcaacaccgaagagaccagtaccgcaggcactgaatcaagtactcccgtaacatcagcggtctctataaccgccggtcaggaaggtcagtcacgcacaacaagctggcgcacctctatccaggatacctccgcgtcttctcagaaccattggacccggtcgacccaaacgacacgcgagtcacagacttccaccctcacccatcgaacgacgtccaccccgagcttctcacccagcgtccataatgttactggcacagtctctcagaaaacctcacctagcggcgagacagctacatcaagcctatgctctgtcactaacaccagcatgatgacctcggagaagattactgtaactacaagcactggctccacactcgggaatccgggggaaacatccagcgtgcccgtgacaggttcgctgatgccagtgacctccgcagcgctggtgacatttgaccctgagggccagagtcctgcaaccttctcaagaaccagcacccaggacacgaccgccttcagcaagaatcaccagactcaatcagtcgagaccactagagtgtcgcagattaacacactgaatacgttgactccagttaccaccagcacggttctaagtagccctagcggtttcaatccaagcggcactgtctcccaagaaactttcccctctggcgaaacaaccacaagttcaccttcatcagtgagcaacaccttcctcgtcaccagtaaagtgttcaggatgcctacatcacgggacagcactcttgggaatactgaggaaacctccctgtccgtcagtgggaccatctcagccatcacgagcaaggtttccacgatatggtggtctgatactttgtccaccgccttatctccatcgagcctccccccaaagatttctacagcttttcatacacagcagtccgagggggccgaaactactggtagaccacacgagaggtccagcttcagcccaggagtgtcacaggaaattttcacacttcacgagacaaccacttggcccagctcattttcgagcaagggccatacaacttggtcccagaccgagctgccttccacttcaaccggcgccgccactcggctggtgacagggaacccctctaccggcaccgccggaacaatacctagagtgcccagcaaagtgagcgccatcggtgaaccgggtgagccgaccacttatagttcgcacagtacaaccttgcccaagacaacaggcgcaggtgcccagacgcaatggacccaggagacaggtaccacaggggaggccctgctgagcagcccctcctattctgtgacccagatgatcaaaacagctacctccccatcttcgtctcctatgctggataggcacacgtctcaacagatcaccacagctccctctacgaatcactctaccatccacagcaccagcacctctccacaagagtctcccgcggtttcccagagaggacacactcaggccccccagacaacccaggaatctcagacaacgagatctgtttcgcccatgactgataccaaaactgttaccacacctgggtcaagttttacagcgtccggtcattcgccgagcgaaatcgtgccccaggatgcgcctacgataagtgcggccaccacatttgcccccgctcccacgggagatgggcacacgacccaggctccaaccactgcactacaggccgcacccagtagtcacgacgcgaccctgggtccaagcggcgggacatccttatcaaagactggtgcactgaccctggctaattctgttgtcagcacaccagggggccctgagggccagtggacctctgcctctgccagcacaagccctgatacagctgctgcaatgacacatacgcatcaggccgagtctacagaggcttcagggcaaactcagacctccgagcccgccagctccggcagtaggactaccagtgccggaacagccacaccatcgagcagcggggccagcggtaccaccccttccgggagtgaggggattagcacaagcggtgaaaccaccagatttagctcgaatccttcgcgagactctcataccacccagtccactactgagctgctatcagcctcggcatcccacggcgctattccagtctccacaggaatggctagctccatcgtgcctgggacctttcaccccaccctgagcgaagcttcaactgcgggccggcctacggggcagagctcaccaacatccccaagcgccagtccccaggaaactgccgctattagccgtatggctcaaactcaacgaactcgcactagccgaggaagcgatactatttccctggccagtcaagccaccgatactttctcaaccgtcccaccaacaccaccttccattacctccactgggttgacctctccacagacagagactcacacgttatccccttctgggtccgggaaaacattcactacagcccttatctctaatgcaactcccctgccagtcacatatgcaagttctgcttctacgggccatacaactcccttacacgtgacagatgcttcttctgtcagcacaggtcacgcaacacccttgcccgtcacgtccccttcctctgtttctactggtcacaccaccccgctgccagtaaccgacacatcaagtgagagtacaggtcatgtgaccccactgcctgtgacgtcattcagttctgcctcgactggggactccaccccactgcctgtgaccgacaccagcagtgcatcgactggccatgtcacccctctgcctgtgacctccctgtcctcagccagcaccggcgatactacccctctcccggtaaccgacacaagctccgctagcaccggccacgccactagcctgcccgtcactgatacctcctccgtctctactggccataccacccctcttcctgtgactgacacttcctccgcttcaaccggccatgccacttctctgcctgtgacggatacctcctccgtctctaccggccacacaaccccactgcacgttacggacgcctcttctgctagtactgggcaggcgacacctcttcccgtgacatctctaagcagcgtgagtaccggggacacaacacccctgcccgtgacctcacccagcagcgcttcaacgggtcacgcaacaccattgctggtcactgatacaagctcagcaagtactgggcacgcaactccgctgccggtcacggatgcatctagcgttagtaccgaccacgcaaccagcctgcccgtcaccattccaagcgctgcatccacggggcatacaacaccattacccgtaacagatacatcaagtgcttctacaggccaggccacatccctcctggtgacagatacctccagtgtctcaactggagacacgaccccattaccagtcaccagtacttcgtccgcatcaactggccatgtcactccactgcacgtcacaagtccaagtagcgcaagcaccgggcatgccacaccgctgcctgtcacttcgctgtccagcgcctcaacgggagacaccatgcctctccctgtgacttcaccgagtagtgccagtacgggagacacaacaccattgcccgtcacagacgcctcttctgtctctacagggcacactacgcccctacatgttaccgatgccagttctgcctcaaccggtcaggcaacccctctgcctgtcacctctctgtcttcagtctccacaggggacactactcccctcccagtgacttctccatcctcggcctcaacagggcacgctacaccactcctggtcaccgacacttcctccgcgagcacagggcatgcaactcccctaccagttactgacgcaagttccgtgagcaccgatcacgccacgtctctgcccgtgacgatcccttcagcggcatccaccgggcataccactcctctccctgtaacggatacatcctctgccagtaccggccaggccaccagcctgcttgttaccgatacgagctctgtgagcacaggagataccactccccttcctgtcacgtcaacaagctctgcatctacggggcatgtgacccctctgcacgtcacctcacctagctccgctagcactggccatgcaaccccccttcccgtgacctccttgagtagcgcttcgaccggcgacacgatgcccttgcccgtcaccagcccaagcagcgccagtacgggtgacacaacaccccttcctgtgactgatgcgtccagcgtaagcactggccatacaactccattacccgtgacttcaccctcctccgcatccacaggtcacacaacccccctgccggtgaccgatacatctagcgcttccaaaggcgacactacgcctctccctgttacttccccctcaagcgcttccaccggccacaccacacctctgcccgtaacagacacctcctccgcctccaccggtgatactactccactccccgtcactaatgccagttccctgtcaacaggccatgccacacccctccacgttacaagcccatcaagcgccagtaccggtcacgcaactccccttcccgtgacctccaccagcagcgcatccacagggcatgctaccccccttcctgtgacaggattgtcttctgcaacgacagacgacactacacgtctccccgtcaccgatgtgagcagcgcctccacgggccaggcaacacctctgcccgtaacaagtctgagttccgtgagcaccggtgatactacaccactcccagtaacctcaccttccagtgcctcgaccgggcatgcatcgccgttgttggttacggacgctagttctgcctctaccggccaggctaccccactgccggtgacagatacctcttccgtgagcactgcccatgcaacgcccctgccagtgactggcttgagctccgcatcaaccgacgacaccacacgcctgcctgtgaccgacgtgagttccgcgtctacaggacaggcaattccattgccggtgacaagtccaagttccgcatcaactggcgacacgacacctctgccagttaccgacgcctcctctgcctctactggcgataccacttctctccccgtcactataccaagctccgcctcatctgggcatacaactagcctgccagtgacggatgcgtcctccgtttcaaccggacatgcaacatcattgctagttaccgatgcatcctctgtgagcacaggcgatactaccccactcccagtgaccgacacaaatagtgcatccactggtgacactacgcctctgcacgtcaccgacgcctcatccgtttccaccgggcatgcgacaagcctcccggtcactagtctgtcaagcgccagcaccggcgacactactccgctacccgttactagtccatcttccgcctcttctggacacacaacacctttacctgtcacagacgccagctccgtgcccaccggtcacgccacgagtttacctgtgacagacgcatcctctgtaagcaccggccacgccacacctttgccggtgaccgacgcaagttccgtttcaaccggacacgcaacccctctgcctgttacagatacatcctccgtaagcaccgggcaggcaacaccactgcctgtgacctctctctcatctgcttccacaggggacaccacccccttacctgtgacagatacttcctccgccagcaccggacaggacaccccgctgcccgtgacctctttgtctagtgtttccacaggtgacactactccattgcccgtgactaatcccagctctgccagcaccggccacgcaacccctctcctcgtaaccgacgcctcgtcgatttcaaccggacatgctactagtctactcgttactgatgcctcctctgtgtctacagggcatgcgaccgctctccatgatacagatgccagctctctttccactggggatacaactcccctgccagttaccagccctagttccacttccactggagatacgacgcccctgcctgttacagaaacgagttctgtttcaaccggtcacgccacatcattgcccgtcacagatacatcctccgcttctacaggacacgcaactagcttgccagtgactgacacgagtagcgctagcactgggcatgctactcctcttccagtgaccgacacgtcaagcgcatccacagggcaagcaacgcctcttcccgtgaccagccctagctccgcaagcacggggcacgcaatacctctgcttgtgaccgatacgtcatccgcatcaacaggccaggcgaccccgctgcctgttaccagtctgagcagcgcatctaccggggataccaccccactacccgtcaccgacgcctcctcagtgagtaccggtcacgcaacctctctaccagtgacatcactgtcttcagtatcaacaggggacactacgcccctccccgtcaccagtccatcttctgcctctactggacatgccacacctctgcatgtgacagatgccagcagcgctagcaccggccatgcgacgcccttaccagtgaccagcttgtcatcagcttccactggtgataccacacctctcccagtaacctcccccagctctgcttctaccgggcacgctacgccacttcatgtgacagatgcaagttctgtctcaactggtgatacaactcctctgcccgtgaccagctcctcctcagcttcgtcggggcacactacgccccttcctgttactgatgcatccagcgctagcacaggcgacacaacacctctcccagttactgacacctcttccgcctccactggacatgcaactcacttgcctgtgacgggactgagttccgcatcaacgggcgataccacccgacttcctgtgacaaacgtcagcagcgctagcaccggccacgccacaccccttcctgtgacttcgacgtcctcagcctctacaggagatactaccccgcttccgggcaccgacacttccagtgtcagtacaggccacaccactcctctactggtgaccgacgcttcttccgtttcaacaggtgataccactcgactccctgtcactagcccctcgagtgcttctacagggcataccactcctctgcctgtaaccgatactcctagtgcctcaactggagatacaacaccactacctgtgactaatgcaagctcgctttctaccaggcacgccacgagcctgcatgtgactagtcccagcagcgcgtccacaggccacgcaaccagcctgcctgtgaccgacacatccgccgcttccaccggtcatgcgaccccccttcctgttaccagcacctcatctgcctcgacgggtgacactaccccattacccgtaacggacacatattcagccagcaccggacaagctactcctctgcctgtcactagcctatctagcgtgagtaccggcgacactactccccttcccgtgacctctccaagctccgccagtactggtcatgccacccctctgctggtgacagatgcttcttccgcatcaactgggcaggccacaccgctccctgtgacatcactttcatccgtgtctacaggggacaccaccccattacctgtgaccagcccgtcttctgccagtaccgggcacgcaacttcactccccgtcacggatacaagcagcgcctctaccggagacacaacttcattacccgttaccgacacgagtagtgcatacaccggcgacactactagtttgcctgtgactgacaccagctcatcttctactggcgatacaactcctctgttggtcactgaaacatccagtgtgtcaaccggggacactaccccattgcccgtcacagatacaagcagtgccagtactgggcatgcgactccactcccggtcaccaacacatcatccgtctcgaccggccatgctacacccctgcacgtaacctcaccttcctcggctagtaccggccataccactccgctcccggttactgatgccagctctgtctccacagggcatgctacaagtctgcccgtcaccgacgcttcctccgtgttcactgggcacgctacctctttgccagtgacgattccctcctctgcttcatctggccacactaccccactgcccgtgacggacgcctcgagtgtgtctaccggacacgcaacaagtctgccagtgacagatgccagtagcgtgtccaccggtcacgcaacccccctgcctgtgaccgatgcctcgtctgtcagtacgggccacgccacaccgctgcccctcactagcctctcctctgtgagcacaggggacaccaccccattgcctgtcacagatacctctagcgcgtccaccggacaagccactcccctgcccgtgaccagtttgtcaagtgtgagtaccggggatactacccctctgcccgtaactgatacgtcaagcgcctcaaccggccacgctacgagcctgcccgtcactgacacatccagtgcaagcactgggcacgctacacctctccccgacacagacacatcctcagcttccaccggccacgccaccctcctgcccgtgacagataccagctcagcttcgatcggacacgccaccagccttcctgtgacggatacctcgtccataagcactggtcatgctacacccctccacgtcacctcaccctccagcgccagcactgggcatgctacacctctccctgtcactgacacatcgtccgccagtaccggccacgctaaccccttgcatgtgacatcacctagttctgcctccacaggccacgcaactcccctgcctgtaacagacacctcctccgctagtaccgggcacgccaccccactcccggtgacttcattgtcaagtgtgtctactggagacacaactccactccccgtcacatctccatctagtgcctccaccggtcacacaaccccattgcctgttacggatacatcatccgcttctactggccaggccaccgccttacccgtgaccagcacctcttccgcttcgacaggtgatacaaccccgctccctgtcaccgacacatcttctgcgagtacaggccaagccacaccgctgcccgtcactagcttgagtagcgtgagtacaggtgatacaacacctcttcccgtgacttccccatcttccgcctcaacaggacacgctacccccctgctagtgaccgacgcatcctcagcctccacaggccaggcgaccccacttcccgttaccagcctgagctccgtctctacaggggacaccaccccgctcccggtcaccagcccaagttctgcgagcacagggcacgccacttcattgcccgtcaccgacacctcttcagctagcaccggagacacgacatccttgccagtgacggatacttcttcagcctacactggggacactacaagtctgcctgtaaccgacacctctagcagttctacaggcgatactactccactcctggtgactgagacgagctcggtctcaacaggacatgctactcctctgctggttactgacgcgtcaagtgcctctaccggacacgctacgccactgcatgtaacatcccccagttctgccagtacaggcgatactacaccagtgcccgttaccgacacatccagcgttagcacaggtcacgcaacacccttaccagtgactggtttgtccagcgcaagcacgggggataccacgcgactaccagtaacagatatctcgtccgccagtaccggacaggcaaccccattacctgtcacaaatacatctagtgtgtcaactggagatacaatgcccctgcctgtgacctctccctcttcggcttccacaggtcacgcgactccgctcccggtgacaagcacctctagcgcaagcactggacatgcaacaccagtgccagtcaccagtacctccagtgctagcacagggcataccactcccctacccgtcacggatactagtagcgccagcactggagatactacaccccttcctgtgacttctccctcttccgcctcaacagggcacaccacaccactgcacgtgaccataccctcatctgcgagcacaggagacacttccacactccctgtgaccggggcatctagcgccagcaccgggcacgccactcccctgccagttacagatacctcctccgttagcactgggcatgctactccgctgcccgtgacgtcccttagtagtgtctctaccggtgacacgacaccattacccgtcaccgacgcttctagtgcaagcactggtcaggccacccccctccctgtcacgtcgctctcgtccgtttccactggagatactacccctctcttggtaacggacgcctcatccgtgtccaccggacacgccacacctttaccagtcacagatacatcttcagcttctaccggggataccacgagattacccgtaacagacacctcctcagcctcaaccgggcaggccacacctctgcctgtaacgtcattatccagcgtctctaccggcgacacgactcctctactagtgacagatgcatcatctgtctcaaccggccacgccacaccgttacctgtgaccgatacttctagcgcttctacaggcgacactacccgactgcctgttacagatacctctagtgctagtaccggtcaggctactcccctccctgttactatcccatcctcatcctcgagtgggcacaccactcccctaccagtcacgtccacatcgagcgtgtctacaggccatgtgacacccctgcacgtgacatcaccttcatccgcctcaactggccatgtgacccccctgcctgtgaccagcactagttctgctagtactggccacgctactccattgctagttaccgacgcttcatctgtaagcacagggcacgcaacaccactgccagtgacagacgcatccagcgcaagtaccggcgacacaacaccgctgcctgtcactgacacgagctccgcaagcacgggccaggccacgccgctccccgtcacgtcgctttctagcgttagtaccggagacaccaccccactccccgtgaccgatgctagttcggcctccacgggccatgccacgcctctcccggtcacaataccatcctctgtgagtaccggagacacgatgcctctgccagtaacatcaccatcttcagcctcgaccggacatgctacacccctgccagtcactggtctcagttctgcaagcaccggggataccaccccacttcctgtgacagacacttcttctgcatcaacacgccacgccacccctttaccagtcacagatacttcaagtgcatcaacagatgacacaacacggttacctgtcacggatgtgagctcggcatcaacaggacatgctacccctctgccagtgacttccaccagctccgcaagcaccggagacactacccccctcccagtcacggacacaagttctgtttctactggccatgctacctcgttaccggtgacctctcgctcttccgcaagcaccggtcatgcgacgcccctgccagtgaccgacacaagctcagttagtactggacacgccactcctctccctgtcacgagtacatcctccgtcagcactggacacgccaccccacttccagtcaccagtccttcgtcagcctccaccggccatgccacaccggtcccagttacatccacttcgtcagccagcactggggacaccactcctttacccgttaccaacgcctccagcctatccacgggccacgcaacacctctccacgtaaccagtccttcgagtgccagtcgcggagacacctccacgctgcccgtaacagatgcgtcaagcgccagcacaggacatgcaactccacttcccctgacaagtctgagtagtgtctcaacaggagacaccacccctctccccgtgaccgacacctcctctgcgagcactgggcaggcaactcctctgcccgtgaccagcctgtctagcgtgagcacgggggacacaacaccattaccagtgaccattccttcttctgcaagcagcggccacactacttccctacctgtgaccgatgcatcttccgtctcaacaggccatggcacccctcttcccgtaacatccacatccagcgcctcaaccggcgacaccactcctctccccgtcacagacactagctctgccagcaccggtcacgcgactcccttgcctgttaccgacacctcctccgcatccaccggccacgcaactccacttcccgtgacaagcttgagctcagtgtccacaggacacgccacccctttagccgtgagcagcgccacctcagcatcaactgtgtcctcagactcaccactgaaaatggaaacacccggcatgactaccccttcactcaagactgacggggggagaagaactgccactagcccaccccccactactagccaaacaatcatctccaccattcccagcacagccatgcacacaagatctacagcggcccccattccaatcctgccagagagaggagtaagtctcttcccttacggcgctggcgccggcgatctagagtttgtgcgccgaactgtagattttactagcccactgtttaaaccagcaaccgggttcccgcttggaagttccctgcgagattccctgtattttacagacaacgggcagatcattttcccagagagcgactaccagatttttagttaccccaatccactccccaccgggttcaccggacgagacccagtggccttagttgccccattttgggatgacgcggatttttccaccggccggggaacaaccttctatcaatctaacacataccaagcgatcctatcaaccgacgggagccgcagttatgcactgtttctgtatcagagcggaggaatgcagtgggacgttgctcagcggtccggtaaccctgtgctcatgggattttcttccggagacggctactttgaaaattcaccactcatgagccagcccgtgtgggaacgatacagacctgaccgctttctcaactccaattcaggattacagggactccagttctatagactccacagggaggagaggccaaactacaggcttgaatgcctccagtggctgaaaagtcagccgcgctggccaagctgggggtggaatcaggtgtcttgtccttgctcctggcagcaagggaggcgcgatttgagatttcagccggtctctatcggcaggtggggtctgggctcacgacagctgtgtagctttactagctggcggggaggggtgtgctgcagctatggcccctggggagaattccgagagggatggcatgtgcagaggccttggcagttggcacaagaactggagccccagagctggtgttgtagatggaacgacaagccctacctgtgcgcactctaccagcagagacgaccccatgtgggatgtgctacatacaggcctcctcagcccgcatggatgttcggagaccctcacatcaccactttagatggggttagctataccttcaacggcctcggggacttcttgcttgttggagctcaagatggaaatagttccttcttgctgcaggggcgaaccgcccagaccgggtccgcccaggctactaattttattgcctttgctgcacagtacagatcgagcagcctgggtccagtgaccgtgcaatggctcctggagcctcacgatgccatccgggtgctgcttgataaccagactgttacattccagcctgaccacgaagacgggggtggacaagagacatttaacgctaccggagtgttactgtctcgaaatggaagcgaagtttctgcatcatttgacgggtgggcgacggtttcagtcatagccctgtcaaacatcctacatgcgagtgcaagcttgcctccagaataccagaaccggactgaagggctgctgggagtgtggaataataaccctgaagacgacttccgcatgcctaatggttccacaatccccccgggaagtcctgaggaaatgctgtttcattttggaatgacatggcaaataaatgggaccggcttgttgggaaagcgcaacgaccaactgccttcgaactttacccccgtcttctattcccaactgcagaagaattctagctgggccgagcatctcatttcaaattgtgacggcgacagctcttgtatctacgatacacttgccctgagaaacgcatccataggcctgcacaccagagaagtcagcaaaaattatgagcaagccaacgctaccctcaaccagtatccacccagtattaatggtgggcgcgtcattgaggcatataagggacaaactacactgatacagtacacaagtaatgccgaagatgccaacttcacgttgcgggatagctgcactgatctagagcttttcgagaacggcaccctgctgtggacgcccaagtctctcgagccatttaccctcgaaatcttggctaggtcagccaagattggcctcgctagtgccctccagccgcggaccgtagtatgccactgcaatgcagagtcacagtgtctgtacaaccagacaagtcgagtaggaaattcaagcttagaggtggccggctgtaaatgcgatggaggcaccttcggacgatactgcgaggggagtgaggatgcctgcgaagagccctgctttcctagcgtccattgcgtccccggcaaggggtgcgaagcttgcccccctaacctcactggggatgggcggcactgcgccgcattgggctcatccttcttgtgccaaaatcagtcttgcccggttaattattgctacaatcaaggacactgttatatcagccagaccctgggctgccaacccatgtgcacctgccccccagcatttaccgacagcaggtgcttcttggcaggcaataacttcagtccaacagtaaatttagaactccccctgagagttatccagctgttgctatcagaggaagaaaatgcctctatggctgaagtaaacgccagcgtagcatatagactcgggacactggatatgcgtgcctttcttcgaaacagccaggtcgaacgcatcgattccgctgctcccgcgtctgggagtcctattcagcattggatggtaattagtgagtttcaataccggccacgcggacccgtcattgacttcttaaataaccaactgctcgctgctgtggtcgaggctttcttgtaccacgtgcccaggagaagcgaagagccaagaaacgatgtggtgtttcaaccaatatctggggaggatgtcagggatgtgactgccttaaacgtttctaccctaaaggcttatttccgatgcgatggatacaagggatatgatttagtgtacagccctcagagcggttttacatgtgtttctccttgtagcaggggctattgtgaccacggaggacagtgtcagcatctcccctccggaccaagatgttcttgtgtgagcttcagcatctacaccgcctggggcgaacactgcgaacacctaagcatgaagttagatgctttttttggaattttttttggggcactgggggggttgctcctgctgggagttggcacttttgtagtgttgaggttttggggttgttccggggcaagattttcctacttcctgaatagtgctgaagccctgccgtag

SEQ ID NO: 195730 - DNA, 1863 bp, synthetic construct
  misc_feature 1..1863: note = Description of Artificial Sequence: Synthetic coding sequence
  source 1..1863: mol_type = other DNA
atgagcgtgggccggcggaagctggccctgctgtgggccctggccctcgcgcttgcttgcacacgacatacagggcacgcccaggacggttcatccgaatctagctacaagcatcatcccgcactatctcccattgcccgcggcccctccggcgtgccactcagaggggcaactgttttcccttctctcaggaccattcccgtggtgcgggcttccaatcccgctcacaatggacgtgtctgttccacctgggggtcctttcactataaaacgtttgatggcgatgtgttcagatttcctggactctgcaactatgtcttttcagagcattgtggcgcggcatatgaggactttaaccccgctactccacaacctggcgtcagcggacctcatgcggagcagggtcctcacgagggagggtggagaggacatccagccgaccaggggctgcgtcctggtcagagaccgccaggcccggcagccctgcagcccgtctggggtccccatagtcgggcggcggccacccccagatggagacccgggtgggccctcagcagttgcggcaccacaatgactgcctgctgttggctcgatacaaagtacgctaataaattgtgggccctgtggggactacagagggacgctcggggacagcgcgcacctctgccccagcatcaggctgacacgcatggcattcgcgagcctgcaagatggacgactcctagatcatccgtgcggaccctctcacttaaccctaggggcaccgcccccctggctctgggtatttgcgaggagctcctccacggccaactattttcaggctgcgtcgcgctggtggatgtgggcagctatctggaggcttgcaggcaagatttatgcttctgcgaggatactgacctactgtcgtgtgtgtgtcacactttggccgagtatagcaggcagtgcacacacgccgggggattgcctcaggactggagaggccccgatttttgcccccaaaaatgccctaacaatatgcaataccacgagtgcagaagcccatgcgctgacacctgttccaaccaggagcattctcgagcctgtgaggaccactgcgtcgctggatgcttctgcccagagggtactgtcctggatgacatcggtcagactggctgcgtacccgtctctaagtgcgcctgcgtctataacggcgctgcttatgcccccggcgccacatactccaccgactgcaccaactgcacctgctctgggggtcgatggagctgccaagaagtaccctgccctggaacctgctctgttctgggcggagcgcatttttccacatttgacggtaagcaatacaccgtgcacggcgattgttcctacgtcctgaccaaaccctgcgacagtagtgctttcaccgttctggcagaactgagaagatgtgggttaactgattccgagacctgtctgaaaagcgtgaccctcagcttggatggcgtgcaaaccgtggtggtaattaaagcgtccggagaggtctttttgaaccagatatatacacagctgcctattagtgccgcaaatgtgacgatctttaggccgtcaacattcttcattatcgcccagaccagtcttgggctacagctaaatctacagctcgtgcccaccatgcagctctttatgcagctcgctccaaagctgcggggccagacctgcggtctgtgcggaaattttaattccatacaggctgatgatttccgcaccttgtcaggcgtagtcgaggcaactgctgccgctttcttcaatacattcaagacacaagcggcctgtccaaacattagaaatagcttcgaggatccctgtagtctgagcgtggagaattag

SEQ ID NO: 195731 - DNA, 1872 bp, synthetic construct
  misc_feature 1..1872: note = Description of Artificial Sequence: Synthetic coding sequence
  source 1..1872: mol_type = other DNA
atgagcgtgggccggcggaagctggccctgctgtgggccctggccttagccttggcctgcacaagacataccggccacgcccaggacgggtccagcgagagtagctataaacatcatcccgctttatccccgattgcccgcggccccagtggggtgcccttacgtggagctacggttttccccagccttcgaactattcccgtggttagagcatccaatcccgcccataacggacgcgtgtgtagcacatgggggagctttcactacaaaaccttcgatggagacgtgttccgctttcccggcttatgcaattacgtttttagcgagcattgcggcgctgcctatgaagactttaatatccagctgagacgttcccaggaatccgcagccccaactctcagccgggtactcatgaaggtggacggcgtcgtaatacagctgactaaaggctccgtgcttgttaacgggcatcccgtcctgctgcctttctcacagtccggggtcctgattcagcagtcttcatcctacacgaaagttgaggcacgcctgggtctagttctgatgtggaatcacgacgacagcctgctgctggaattggacactaaatacgctaataagacatgcggactgtgtggtgacttcaacgggatgcccgtcgtgagcgaactgttgtcacataacacaaaactcacccctatggaattcgggaatctgcagaaaatggacgatccaaccgaacagtgccaagatccagtgccggaaccgcccaggaattgttcgactggctttggaatctgcgaagaactcctccatggccagctgttcagtggttgcgttgctcttgtggacgtggggtcgtatctggaggcctgtcggcaggacctctgtttctgcgaagacactgatttgctgtcgtgcgtctgccatacactggccgaatatagtaggcagtgcacccatgctgggggtctccctcaggattggcggggccctgacttttgtcctcagaagtgcccaaataacatgcagtatcacgaatgtcgttcaccatgcgccgatacatgcagtaaccaggagcatagccgcgcatgtgaggatcactgtgtggccggatgcttctgcccggagggaacggtcctggatgatatcggccagacaggatgcgtgcccgtgtcgaagtgcgcatgcgtgtataacggggctgcctacgcaccaggggccacttatagcaccgattgcacaaactgtacttgcagtgggggaagatggagctgccaggaagtcccttgtcctggtacctgtagtgtgctcgggggagcacacttttctaccttcgacggcaagcagtacacggttcacggtgattgctcttacgtgcttacgaagccatgcgactcgtctgcatttacagtccttgcagagctgcgacgatgcggcctgaccgattctgaaacctgcctcaagtccgtcacgctgtccttggatggggtccagactgtggtcgttatcaaagcatcgggcgaggtgtttttaaaccaaatttatacacagctacctattagtgccgctaatgtgaccatcttccgccccagtacttttttcatcatagcccagaccagtctgggtttgcagttgaacctccaactggtgcccacaatgcagctgtttatgcagctggcccctaaattacgcggtcagacctgcgggctttgcggtaatttcaacagcatccaggcagatgattttcgcacgctgagcggagtcgtggaggccaccgcggctgctttctttaatacgttcaagacccaagcagcatgtcccaacatcagaaactcttttgaggatccttgttctctctcagtggaaaattag

SEQ ID NO: 195732 - DNA, 17121 bp, synthetic construct
  misc_feature 1..17121: note = Description of Artificial Sequence: Synthetic coding sequence
  source 1..17121: mol_type = other DNA
atgggcgcccccagcgcctgccggaccctggtgctggccctggccgccatgctggtggtaccacaggccgagactcaggggcccgtagaaccttcctgggagaacgcaggccacaccatggacggaggcgccccaactagcagcccaacacgacgggtttcatttgtccccccggtcaccgtgtttccatctttaagccccttgaatcctgcacataacgggcgggtgtgtagcacctggggagactttcattacaaaacgttcgatggggatgtgttcagatttcccggcctctgcaattatgtgttcagcgagcactgccgtgctgcctacgaagacttcaatgtccaactgcgaagagggttggtggggtcccggcccgttgtcacccgggtcgtgattaaggcccaggggctggtactggaagcaagtaacggaagcgtgctaattaacgggcagcgcgaagagctgccttactctagaaccggactgctggtggagcagagtggagattacatcaaagtgtctattcgtctggtcctgacttttctgtggaatggggaggacagcgcattgctcgaactggatccaaagtatgccaaccagacctgtgggctctgtggcgacttcaacggcctgcccgcttttaatgagttctatgcacacaatgctaggctcacccctctgcagttcgggaacctgcagaagttagacgggcctactgaacagtgccctgaccccctccctctgccggcaggaaattgcaccgatgaagagggcatctgtcataggaccttactgggccccgcattcgccgagtgtcacgctctggtcgactcaactgcttatctggccgcttgcgctcaggacctgtgtagatgtcctacttgtccatgtgcaacattcgtagagtatagccgtcagtgtgctcatgccggtgggcagccgagaaactggcggtgccccgagctctgtccccgaacatgccctctgaacatgcagcatcaggaatgtggatccccgtgtacagatacctgttccaatccccaacgggcacagctgtgtgaggaccactgcgtcgacggatgtttctgtcctccgggatccactgttctggatgatataacccacagcggatgtcttccactcgggcagtgcccatgtacccacggtggcaggacctatagccccggcacctccttcaacacaacatgctctagctgcacctgcagcggagggttgtggcagtgccaggacctgccttgccccggaacatgcagtgtccaaggaggggctcacatcagcacctatgatgaaaagctatacgacttgcatggcgattgttcttacgtgctctccaagaagtgcgccgattcttcttttactgtcttggccgaacttagaaagtgcggtctgacggacaacgaaaactgccttaaagccgttaccctaagcctggacggcggtgatacagccatacgcgtgcaggcagacggaggcgtttttcttaacagcatctatacacaactcccattatctgctgccaatatcaccctcttcactccatctagtttctttatcgtggtgcaaaccggactgggcctccagctgctagtccagctggtgccattaatgcaggtcttcgtgcgccttgacccagctcaccagggccagatgtgcggactttgtgggaatttcaaccagaaccaggcagacgatttcaccgcactgagtggcgtggtcgaggcaacaggagccgctttcgcaaatacatggaaggcacaagcggcttgtgccaatgccaggaattcattcgaggacccatgcagtctcagcgtagaaaatgagaattacgcacggcactggtgcagcaggctaactgaccccaattccgcattctcacgctgtcatagtattattaaccccaaaccatttcattcaaattgtatgttcgatacgtgtaactgtgaacgctccgaggactgtctctgtgccgcccttagcagctatgttcacgcttgtgcagctaaaggggtccagctgagtgattggcgtgatggggtgtgtaccaaatatatgcaaaactgccccaagtcccagaggtacgcatacgtggtagacgcatgtcaacctacctgcaggggcctctctgaagctgatgtcacttgctctgtctctttcgtgccggttgacgggtgtacgtgtcccgctgggaccttccttaatgatgcgggagcctgcgtacccgcgcaggagtgcccatgctacgctcatggtactgtccttgcacctggggaggtggtgcacgatgaaggtgcagtctgttcctgcacaggcggtaagctgtcatgcctgggggcctcactgcaaaaatcaaccggttgcgccgccccaatggtgtatctagattgctctaacagcagtgcaggtactccaggcgccgaatgcctgcgctcatgtcatactctggatgtcggctgcttttcaacacactgcgtgagcggatgcgtgtgtcctcctggcttggtgtccgacgggagcggtggatgcatcgctgaggaggattgcccatgtgttcataacgaggcaacatataaaccgggtgagactatccgcgtggactgtaatacctgtacttgtcgtaataggagatgggagtgcagtcacaggctgtgcctaggaacctgtgtggcttacggggacggccacttcataacatttgatggtgacaggtactcttttgagggctcctgcgagtatattctggcccaggattattgtggcgataataccacccacgggactttcaggatcgtgactgaaaatattccgtgcggcactaccggtacaacatgttcaaaagccattaaattatttgtagagagttatgaactgatcctgcaggagggtacttttaaggctgtagctcggggtccgggcggggatcccccttacaagattcgttacatgggcatatttctcgttatagagacacacggtatggctgtgtcttgggaccgaaagacttctgtgttcatacggctccaccaggactataagggacgagtgtgtggactgtgcggcaacttcgacgataacgccatcaatgattttgcgactcgctccagatccgtagtcggtgatgcccttgagttcgggaacagctggaaactcagtcctagttgtcccgatgcactcgcccccaaagacccttgcactgccaaccccttcagaaagagttgggcccaaaagcagtgctcaatcctgcacggacccaccttcgccgcatgtcgcagccaggtggactctaccaaatactatgaggcatgcgtgaacgacgcgtgcgcgtgcgatagtggaggcgattgtgagtgcttctgtacagcggtggcagcgtacgcgcaggcttgccacgacgccggcctgtgtgtttcgtggcggaccccggacacttgtccactgttttgcgacttttacaatccgcacggcgggtgcgaatggcactatcagccttgcggtgccccttgccttaaaacctgccgaaatcccagcggccactgcctggtggatttaccaggcctggagggctgctaccctaaatgtccaccgtcgcaacctttttttaacgaggaccagatgaagtgtgtggcccagtgcgggtgttacgataaagacggaaactattatgatgtaggtgccagggtgcccaccgctgagaattgccagagctgcaactgcaccccatctggcattcagtgcgctcattccctggaggcatgtacttgtacttatgaagaccgtacttattcctatcaggacgtcatctacaacactaccgacgggctcggcgcttgccttatcgccatctgcggctccaacggaaccattataaggaaagccgtggcctgtcctggaacaccggcaaccacccctttcactttcactaccgcctgggtcccacactcaaccacatctccagcacttccagtgagcactgtatgtgttcgggaggtttgtagatggagctcatggtataatggccataggccggaaccaggtctcggaggcggcgattttgagacctttgagaacttgcgccagcgagggtaccaggtatgcccagtgctcgccgacatcgaatgccgagccgcacagttgccagatatgcctctggaggaactggggcagcaagttgattgtgaccgtatgcgcggcttgatgtgcgctaactcgcaacagagtcccccactgtgtcatgattatgagctaagagtactgtgttgtgagtatgtgccctgtggccctagccccgcccccggcacgagcccccagccctctctgagtgcttctaccgaacccgccgttcccactccaactcagaccacagcaaccgagaagactacactttgggtgacacctagcattcgcagcactgccgccctcacttcccagaccgggtcctcttccggcccggtgacagtgaccccttccgcgcccggcacgacgacctgccagcctaggtgtcagtggaccgaatggttcgatgaggactatcctaaaagcgagcagctgggaggcgacgtagagtcttacgacaaaattagggccgcgggaggccatctctgccagcagcctaaagacatcgagtgccaggccgaaagcttccctaattggaccctggcgcaggtggggcagaaagttcattgcgatgtccatttcggcttagtgtgtaggaactgggagcaggaaggggtgtttaagatgtgttacaactaccgaattcgagtgctatgttgctccgatgaccactgccgcggcagggccacaactccaccccctaccaccgaactagagacagccacaaccacaactactcaggcacttttttctaccccacaaccaaccagttctccaggactgactcgtgcaccccctgccagcacgacagccgtccctactctgtccgaggggttaacttcgccccgttatacatctacccttgggaccgccaccaccgggggacctaccacacccgcagggagcacagaacctacagtgcctggagtagccacatccaccctgcccacacgctctgcattgcccggaaccactggaagcctgggcacctggagaccttctcagcctcctacactggcacctactacaatggctacatcccgcgcgaggcccacaggtaccgctagtaccgcctctaaggagcctttaactacttctttagcccccacgttaactagcgaactcagcacctcacaagcagaaacgtccaccccacggacagagaccactatgtcacccctgactaatactaccacaagccaaggtacgacccgctgccagcctaagtgtgagtggacagaatggtttgatgttgacttccctacatccggtgtagctggcggcgacatggagacctttgaaaatattagggctgcaggaggcaaaatgtgttgggcaccaaagtctatcgaatgccgcgcggagaactatcccgaagtctcgatcgaccaggtaggccaggtactgacttgctcattagagacgggcctgacttgcaagaatgaagaccagaccgggcgattcaatatgtgctttaactacaacgttagagtgctctgctgcgatgactattctcactgcccttctactcccgccacaagttctacagccaccccttcctccacaccaggcacaacatggattctgacaaagccgactactaccgccactacgacagcctctactgggtcaactgccaccccaacatctacactgaggactgctccgcccccgaaagtgctgactacgactgccactacccccacggtcacctccagtaaggcaacccctagcagttcacctggcaccgcgactgctttgcctgccttacgttcaactgctactaccccgacagccactagcgtgacccccatcccgagcagctctctggggacaacctggacccggttaagccaaactaccactccaactgccacaatgtctacggcaaccccctcctcaacacccgaaactgctcacacctctaccgtgctgaccgcgaccgctactactacaggcgccacaggcagtgttgccaccccatcttctacgcctggaacagcacacaccactaaggtgccaactacgactacaactgggtttactgctacaccctctagcagccccggcactgccctgacaccccccgtttggatttctaccacgaccacccccacaaccagagggtcaaccgtcacaccctcaagcatccccggtacaacccataccgccaccgtcttgactacgacaacaaccacagtggcaacaggatcgatggccaccccttctagtagcacgcagacgagcggcacaccaccctccctgaccaccaccgcaacaactattacagctaccggctctaccaccaacccatcctctaccccaggcaccacaccaatcccccctgtgctaaccaccacggccactacgcccgctgccacctccaacacagtcacacccagctcagccttggggacaacacataccccacccgttcccaatactatggcaacaactcacggaagatctctgcccccttcgagtccacacactgtcagaactgcctggacttcagccacaagcggcattttagggactacacacattaccgaacctagcaccgtaacctcacacacactggccgcgactaccggtaccactcagcattctacgcctgcgctgtccagtccacacccttcatctcggaccaccgagagcccaccttctccgggaacaaccacacccggtcacactactgccactagtcggaccaccgctacagcaaccccgagtaagactagaacatcaaccctgctgccttcttcgccaacatccgcgccgatcactacagttgtgaccatgggctgtgagccgcagtgtgcatggagcgaatggctcgattactcttaccccatgccaggcccttcagggggggacttcgatacctatagcaacatccgagccgccgggggcgctgtatgtgaacagcccctgggtctcgagtgtagggcccaggcacagcccggcgttccattgcgggagctgggccaggtggttgaatgctctctggactttgggctagtgtgcagaaaccgcgagcaggttggcaagtttaaaatgtgttttaactacgagattagagtgttttgctgcaattacgggcattgcccttccactccagcaacttctagtacagccatgccctcgtctacacctgggacaacttggattttgactgagctgacaaccacagccaccactaccgagtcaacaggctctaccgccacaccttcatccacacctgccactgcgggcactccccacgtgtctaccactgccaccacgccgactgtgacatcgagtaaggccacacccttcagctccccagggactgcgactgcactaccagcactcaggtcaacagctaccactccaactgctacaagtttcactgcgatcccctcttcatcactgggcaccacctggaccaggctaagtcagactactacccctacagctaccatgtcaacggcgactccaagttctacacctgagaccgttcacacctctaccgtgctgaccaccacagcaactacaacaggcgccacgggtagcgtggcaacaccctcgagcacaccgggcacagcccacaccaccaaagtgctgactaccactaccaccggcttcacagcgacccccagttcttcccccggaaccgccaggacgcttcccgtgtggatttcaaccacaactacaccaactaccagaggctccaccgtgacacccagctccataccggggacaacccatactccgactgtcctaacaactactacaaccactgtcgcgaccggctctatggctactccctcaagctcaacacaaacctctggaacacctccctctctcacaaccaccgctaccaccattacagcaactggctctacaaccaacccctcatctacccccggcaccaccccaatccctccagtgctcacgactaccgcaactacacccgcggctactagctccaccgttactccctcatccgcactcggcactacccacaccccacctgtcccaaacaccacagccaccactcacggcagaagcctctcgccatcctctcctcatacagttcggaccgcctggacttcagccacgagcggcacgctaggtaccacccacattaccgagccttctacaggcaccagccacactcctgctgccacaaccggcactacacagcacagcacccctgcactcagcagtcctcacccctctagcagaaccacagagagcccccctagccctggcacaactacccccggccacacacgcgctactagccgaaccaccgctaccgctactccttctaaaaccagaaccagcacgcttcttccctcctcacctacgtccgcaccaattacaactgttgtgacgatgggctgcgaaccgcagtgtgcctggagcgagtggcttgactactcgtaccccatgccaggacctagcggtggtgatttcgacacatactctaacattcgcgccgccggaggtgctgtctgtgagcaacctctagggctggagtgtagagctcaggcccagcctggcgtgcccctgcgggaactggggcaagttgttgagtgttccctggatttcggactggtttgtagaaatcgagagcaggtcggaaaatttaagatgtgttttaactatgagatccgggttttttgttgcaactatggacactgcccctccacccctgctacatctagcacagcaactccctccagcacacccggcacaacttggatactcaccgaacagactactgccgccactaccacggccacaacgggcagcacagccatccccagctcgacaccgggaaccgctcctccacctaaggttctcacttccaccgccaccaccccaaccgccacctcaagtaaagccacaagttcatccagtcccaggactgctaccactctccccgttcttacttctacggccaccaaaagcaccgccacttcctttacacctattccaagctttacactgggcacaaccgggaccctaccggagcagacaactacacctatggctaccatgagcactattcatccctccagcacccctgagactactcatacctctaccgtgttgaccactaaggccacgacaactcgggctacatcttcaatgtccacacctagtagcacccccgggactacttggatcctgactgagctcaccactgccgctacgaccaccgcagctacaggccccacagccacgccaagttccacccctgggacgacctggattttgacagaaccctccaccaccgcaacagtgaccgtccccacaggatctacagccaccgccagtagcacccgcgccaccgccggtacactcaaagtgctgacctccaccgctacaacacccaccgttatttcctctcgggccacccccagcagttcccccggaacagccactgcgttgccggctctcaggtccacggcgaccacacccactgccactagcgtcactgccattccatccagtagtctcggaactgcttggactaggctgtctcaaaccaccaccccaaccgccaccatgtcgacagccactccttcttctacaccggagacggtccatacctccacggtactgacaactacgaccacaaccaccagggccactggcagtgtagctacgccttccagcaccccaggaacggcacatacgacaaaggtgccgacaacaacaaccactggttttacggctactccatcgtctagccccggaactgcactgaccccacccgtgtggatttctactactaccacccctacgacaagggggagcactgtcacgccaagctccatacctgggactacccacacggccactgttcttacaactacgaccacaaccgtcgctacagggtcaatggccaccccatcctcctccacccagacctccggcactccacccagcttgaccacaacagcaacaaccattacggccacaggctcaacaaccaaccccagcagtacacccggcacgacccctatccctcccgtgttgaccacaaccgccacaactcctgcagcaaccagctctaccgtgacccctagctccgccctggggactacccatacacctcccgtgccgaacaccaccgcgactactcacggtaggtccttgcctcccagctcaccccacactgtgcgtactgcgtggaccagcgccacttcggggatactgggcacaacgcatatcacggagccgtcaaccgtgacatcacatacaccggctgctacgacctccactacacagcactccaccccagctctatcatcacctcatccatcttccaggaccacagaatctcccccttcgccaggaaccacaacccctgggcacacaagaggcacgagtagaacaactgcgacagcgaccccaagtaaaacgaggaccagtaccttgttgccatcgtcccccacctcagcacctattaccaccgtggtcaccaccggctgtgagcctcagtgtgcctggagcgagtggttggactattcttatcctatgcctgggccgtccggcggcgattttgatacctattccaatatcagggcagccggaggggcggtgtgcgaacagcccctgggtctagagtgccgagcacaggctcagcccggtgttccacttagggagctgggccaggtcgtggaatgttcattggactttggacttgtctgccgaaaccgtgagcaggtcgggaaattcaagatgtgctttaattatgaaatcagagtgttttgctgcaattatggacattgtccgagcactcccgccacgtccagcacagctactccttcaagcactcctggaactacctggatcctcacgaaactgacaaccactgcaacgaccactgagtccacgggttcaacagccacaccctctagtacacccggtgccactgctggaacccctcacgtttcaaccacagccaccacacccacagttacctccagcaaggccactccattctcctctccaggaaccgctacagcgctccctgcactgcgctctacagccactacaccaaccgctacctcctttacggccatcccaagcagctctttgggcaccacatggacgcggttgagccagacaacaacgcccactgctaccatgtctacagccaccccatcaagcacgccagaaaccgctcatacaagtaccgtgctgacgacaaccgctaccactactagggctacaggttccgtggcaaccccttcaagtacacccggaaccgctcacaccaccaaggttcccactacaacgactaccggatttactgtgaccccgagctcctcgccaggcacggctagaactcctccagtgtggatatcaactactaccactcccacgacctccggtagcacagtgacaccgagttccgtccccggtacaactcacaccccaactgtgctgactaccaccaccactaccgtggctaccggaagtatggccacgccctcttcttctacccagacttcagggactcctccatccctcattacaactgctacaactattaccgccaccggcagcactactaacccaagttccactcctgggacaaccccaatcccccccgtcctgacgacaactgctacaacacctgctgctaccagctcgacagtgacgccaagcagcgccttggggaccacacatacacctccagtgcccaatactacggctaccacccatggaagatctctttcgccctcttcccctcataccgttagaactgcctggacttccgctacctctgggactctggggactacccatatcacggagcctagtactggtacatcccataccccagcagcaacaacaggaacaacgcagcactctacccctgcgctctctagcccgcaccccagttcccggaccaccgaatcgcctcctagcccagggacaacaactcctggccacacgaccgctactagtcgtaccactgctacagcaacaccctccaagactcggacctcaaccttactgccgtccagccctacatccgcaccaattactaccgttgtgacgaccggatgcgagccgcagtgcgcctggagcgaatggctggactactcctatccaatgcctggtcctagcggcggagacttcgacacatactcaaatatcagagcagcaggaggtgccgtctgtgagcagccactgggcctggagtgcagggcccaggcacagccaggggtgcctttgggtgagttgggccaagtggttgaatgttcattagactttggcttggtctgccggaaccgagagcaggtagggaagtttaagatgtgcttcaactacgagatcagagtgttctgctgtaactatggacattgtccatctacccctgccacctcttcgacagctatgccttcttctactcctggcacaacgtggattctgacagagctaacaactacggctaccaccacagcctcaacaggatcaaccgctacaccaagttctactcctggaactgctcctcctccaaaagtattaacctccccagctaccacaccaacagccacatcttcgaaagccacgagctccagttctcccaggaccgctaccacccttccggtcctgacttccactgccaccaaaagtactgcaacctctgtaacgccgattccatctagcaccctcgggacgacaggcactttacctgagcagaccaccacacccgtggctacaatgtctacaattcatcccagtagtacccctgaaaccacccataccagcacagttttgaccacaaaggctaccactacacgggcgaccagcagcacttcaactccctcatctacacctgggaccacttggatccttaccgagctgaccacggctgcaaccaccaccgccgctaccggccccacagccactccctcctctacccccgggaccacctggattctcacggagctgacaacaactgctaccactaccgcatccaccggttcaaccgccaccccgtcgtcgaccccagggactacttggattctgacagagccgtccactactgcaacagtgaccgttcccacgggcagtacggccacagcgtcgagtacacaggcgactgccggcaccccccatgtgtccacgaccgccaccaccccaacagtgacctcctccaaggctacaccaagctcttcacctgggactgctacagctctgccagccttgaggtctacagccaccacgccaacagcaacctcattcaccgcaataccatcatcttcgttaggcactacgtggacccgcttgagccagaccacaacacccacggcaaccatgagcactgcgacgccttcctctactccagagaccgttcatacgagcactgtattaactgccaccgccacaacgactggcgcaaccggtagcgtcgccacacccagctcaacacccggaactgcccataccaccaaggtgccaactaccacaaccacgggctttactgcaacaccctcgagttctccaggcacagcactgactccaccagtgtggatctcaaccaccactactcccacgacaacaacccccactacgagcgggtctaccgtcacacctagcagcatcccaggtaccacacacaccgcaagggttctgacaaccactactacaaccgtggccaccggctctatggccaccccaagtagctcaacacaaactagcggtaccccacccagcctcacaacaaccgccaccaccattaccgcaacaggctccacaactaatccatcttcgaccccaggcacaacccctataacgcctgtgctcacttcgaccgcaactacacctgctgccactagttccaaagctacgtccagctcctcaccccgcaccgccactactctgcctgtgctcaccagcactgctacaaagtccactgctaccagtttcacgccaataccctcctccacattatggaccacttggaccgtccctgctcagaccaccacacccatgtctacaatgtccacaatccacacatcatctactcccgagacaacacatacctccactgtgctaactaccactgccaccatgactcgcgcgaccaattcaaccgcaaccccatcatccacattgggtacgacaaggatattgactgaactgacaactaccgcaactacgacagcagcgactgggagtacggccactctgtctagcacgcctgggaccacctggatactcacagaacccagtactatcgccactgtgatggtgccaaccggttctaccgccactgcttcgtctactttgggaactgctcacacgccaaaggtcgtcacgaccatggctacgatgccgactgcaactgcctccaccgtcccctccagctccacggtaggcactacgcggacccccgctgtgcttccgtcatccctccctacattctccgtgagcacggtgagcagtagcgtactgacgactctacgccccaccggcttcccatcttcccatttttccacaccctgcttctgccgcgcttttggacagtttttcagtccgggagaggttatctataataagactgaccgagccggatgtcacttctacgctgtctgtaatcagcactgcgacatcgacaggttccagggggcctgtcctacatctccgcctcctgttagcagcgcccctctgtcctcaccatccccagctcccggttgtgataacgccatcccattaagacaggtgaacgaaacgtggactctggagaactgcacggtggctagatgcgtgggagacaatagagtagtgctgctcgatcccaaacctgtggcaaacgtcacctgtgtgaataaacatcttcctatcaaagtgagcgatccctcacaaccctgtgactttcattatgaatgtgaatgtatctgctccatgtggggcggatcccattactccacttttgacggcacaagttacacctttcgcggcaattgcacgtatgtgttgatgagagaaatacacgcacgcttcggaaacttgagcctgtacttggataaccattattgcacggcctctgctactgccgctgcggccaggtgtccccgcgcccttagcatacactacaagagcatggacatcgtacttacagtgacgatggtccatggcaaagaagaaggcttgatcctgtttgaccagatacctgttagtagtggttttagcaagaacggtgtgctcgtgtccgtgctgggaactaccacaatgcgcgttgatatcccagccctgggggtgtcggtcacttttaatgggcaggtcttccaggcgaggctgccgtactcactcttccacaacaacactgaaggtcaatgtgggacctgtactaataaccagcgggatgactgcttgcagagagacggtacgaccgctgcatcttgcaaagacatggccaaaacctggctagtgcctgactctcgtaaagatggttgctgggcacccaccggcaccccgcccacggctagtcctgcagcacccgtgagttcaactccaacgcctaccccctgccctcctcagcctctctgcgatctgatgttgtcccaggtgttcgctgagtgccataatctggtgcctccaggaccgttcttcaacgcgtgcatttcagatcactgcagaggaagactcgaggttccctgccagtctttggaggcctatgcagagctttgtcgggcacgcggcgtatgtagtgactggcggggagccaccgggggcttgtgtgatcttacctgccccccaaccaaagtatacaaaccctgcggccccattcagcccgccacgtgtaacagccggaaccagagccctcagctggaagggatggctgaagggtgtttttgtccagaggatcaaatcctcttcaatgcacacatggggatttgcgtgcaggcctgtccgtgcgtcggaccagacggctttcccaaattccctggcgaacgctgggtgagtaattgtcagtcttgtgtctgtgacgagggatccgtgtcagtgcaatgcaaaccacttccatgcgacgctcagggccagccccccccttgcaacagacccgggtttgttaccgtgacgcgacctcgcgcagagaatccctgttgcccggaaactgtgtgtgtgtgtaacaccacgacctgcccccaaagtctcccagtgtgtccacctgggcaggagtcaatctgcacccaggaagagggagattgttgcccgacatttcgttgccgcccacagctgtgctcctacaacggaaccttctatggagtaggagcaacctttcccggtgccctgccttgccacatgtgcacgtgcctgtcgggggatacccaagatcctacagtgcagtgtcaggaggacgcctgtaataataccacatgtccccagggattcgagtataaaagagtggccggccagtgctgtggagagtgtgttcagacagcttgtctcacacccgatggacagcccgtgcagttaaatgagacctgggtaaatagccatgtggataactgtacagtgtatttgtgcgaggcagaaggcggtgtgcaccttctgacaccccaacccgcctcatgccctgatgtaagttcgtgtcggggtagcttgcgcaagaccggctgctgttactcttgcgaagaggactcttgccaagtccggattaatacaacaatcttatggcatcagggttgcgaaaccgaagtaaacattaccttctgcgaagggtcatgccccggagcctccaagtacagcgcggaagcacaggcaatgcagcaccagtgcacctgctgtcaggagcgacgagtccacgaagagacagtaccactccattgtccaaatggctctgcgatcctgcacacctatacgcatgtggatgagtgtggatgcaccccattttgtgtccccgctcccatggctcctccacacacccggggatttcccgcacaagaggctaccgctgtgtag

SEQ ID NO: 195733 - DNA, 16587 bp, synthetic construct
  misc_feature 1..16587: note = Description of Artificial Sequence: Synthetic coding sequence
  source 1..16587: mol_type = other DNA
gccccccggatgggcgcccccagcgcctgccggaccctggtgctggcacttgcagcaatgctcgttgtcccacaggctggcaaatccccccccctcagaccgctgtccagaaattctggagccggacttgatggtggagcgccaacaagcagccccacaagaagggtcagcttcgtgccacctgtgactgtgtttcctagcctgagccggaagcaaatgcttccgctgccggcgggaaaaggcgtgttcgccagcccaaaggggggagggccagaccttggagttcagctgccccctgcactgaatcctgcccacaatggccgagtgtgcagtacttggggcgatttccactacaaaacatttgatggggatgtcttcagatttccaggcctgtgtaattacgttttttctgagcactgcagggccgcttacgaagatttcaacgtccaattgcgaaggggccttgttggaagcaggcccgtggtgacgcgggtcgtgattaaggcccaaggcctcgttctggaggccagcaacggatccgtgctgatcaatggacaacgcgaagaactcccttactcccggaccggcttactcgtggagcagtctggtgattacataaaagttagcatccggctcgtgctcacgtttctttggaacggagaagattcagcattactggagttggacccaaagtacgccaaccagacttgtggactgtgcggggacttcaacggacttcctgcctttaacgaattctacgctcacaacgcccggctcacccctctccaattcggcaatctccagaagctggacggtcctactgaacagtgccctgaccccctgcccctgccagccggaaactgtacagatgaggagggaatatgtcaccgtacactgttgggccctgccttcgctgaatgtcatgcactcgttgatagcaccgcgtacttggctgcgtgcgctcaggatctctgtagatgccccacttgcccctgtgccacattcgttgagtatagtcgacagtgcgctcacgcgggcggtcagcctagaaattggagatgcccggaactttgccctcgcacctgcccactgaacatgcaacaccaggaatgtggatccccgtgcactgacacttgcagcaacccgcagagagctcagctgtgtgaggaccactgcgtggacggctgcttctgccccccaggacgctcctgcaccgtgttagacgacattacccattcggggtgtttgcctctcgggcaatgtccttgtacgcacggtggccgaacctactctccaggtacttcatttaacacgacatgctcgtcttgtacttgctctgggggactttggcagtgccaggacttaccatgtcctggtacttgttccgtgcagggcggagctcatatctccacgtacgacgagaaactctacgacctgcatggcgactgctcatacgtgctgtccaaaaaatgtgctgattcttcctttacagtgctggccgaactgagaaaatgtggactcactgacaatgaaaattgcttaaaggctgtgaccctttccttggacggcggagacaccgccatccgagtgcaggccgacgggggcgtatttctgaattcaatttacacccagcttccgctgtcagctgctaacattaccctatttaccccgtcatcattctttatcgtggttcagaccggcctcgggctacagctcctggttcagctggtgcccctgatgcaggtgttcgtccgcctggatccagctcatcaaggccagatgtgtggcttgtgcggaaactttaaccaaaatcaagctgatgatttcaccgccctctcgggtgtggtcgaagccaccggtgcagctttcgcgaatacatggaaagcccaggcggcatgtgccaatgctcgcaatagctttgaagacccttgcagcctgtccgtcgaaaacgaaaattatgctaggcattggtgtagccgtttaactgatcctaatagcgcattttccaggtgtcactctatcataaatcctaagcccttccactccaattgcatgttcgatacgtgtaattgcgagcggagcgaggactgtctttgtgccgccctgtcctcatatgtgcatgcgtgcgccgctaaaggggttcaactctccgattggcgggacggagtctgcactaagtacatgcagaactgccccaagagccagcgatatgcatatgtagttgatgcgtgccaacccacctgtcgagggttgtctgaagccgatgtgacttgtagcgttagtttcgtacctgtcgatgggtgtacatgccccgcaggaaccttccttaacgatgcaggagcctgcgtcccagcgcaggaatgcccatgttacgcacatggtacagtgttggcacccggcgaggtggtgcacgacgaaggtgccgtctgcagctgcactggcggcaaactgagttgcctaggtgccagcctgcagaaatccactgggtgcgcagctcctatggtttacctggattgctccaacagttcagctggcaccccaggagcagagtgccttcgctcttgtcacacactcgacgtgggctgcttctccactcattgcgtgtctggttgcgtctgcccccccgggctggtgagcgatgggagcggcggctgtatcgccgaagaagattgtccctgcgtccataacgaggccacctataagcccggagagaccatccgagttgattgcaacacctgtacctgtcgcaacagaagatgggagtgcagccatcgtctgtgtctcgggacctgcgttgcgtacggggatggccactttatcaccttcgacggtgatagatactcctttgagggctcatgtgagtatattctggcacaagactactgcggcgacaatacgacgcatggaactttcagaatcgtcacagagaatatcccgtgtgggactaccggcactacttgttcgaaagctataaagttgttcgtcgaggttcgaactgccccggctgtgagcaccccggatccagcggctaatgagccagccccccgtgaggcttctgtgggctttcggcagaggctgccacctctccagagctacgagctcattctgcaggaagggaccttcaaggcagtggctcgcggacctggcggagacccgccgtacaaaatccgctacatggggatctttctcgtgattgagacgcacgggatggcggtgtcgtgggatagaaagacatctgtgttcattcgtctgcatcaggattacaagggcagagtgtgcggtctttgtggcaactttgatgacaacgccattaatgattttgcgacacgtagtagaagtgtcgtgggagacgccctggaatttggcaacagctggaaactgtctcccagctgtcccgatgccctagccccgaaagacccttgcacagccaatccattccgcaagtcgtgggcacagaagcagtgcagtatacttcatggaccgaccttcgcagcgtgccgcagccaggtggactctacaaagtattacgaggcttgtgtgaacgatgcctgtgcttgcgacagcgggggtgactgtgagtgtttttgtacagcagttgcggcctacgcccaagcctgtcatgacgctggactgtgtgtcagctggcggacgcccgatacatgtcctctattttgtgacttttataacccacatggagggtgcgagtggcactatcagccatgcggtgccccgtgtctcaagacgtgcagaaacccatcggggcactgcctggtggatctcccgggtcttgagggctgctatcctaagtgccctccctcccagccattcttcaatgaggaccagatgaagtgcgtggcccagtgtggatgctatgacaaagatggcaactactatgatgttggagctcgggttccaactgccgagaactgccaaagttgcaactgcacacccagtggaattcagtgtgcgcacagcctggaggcatgcacctgtacatatgaggaccgcacttatagttaccaggacgtcatttataacacaacggatgggctgggtgcctgcctgatcgccatatgtgggtctaatggaaccattattagaaaagcagttgcatgccccgggacccctgcaaccactcccttcacatttaccacagcctgggtccctcactccacaacctcccctgcccttccagtatcaacggtctgcgtccgggaagtttgtagatggtcaagctggtataatggtcacagacctgagcccggcctggggggtggggactttgagactttcgaaaacctccgccagcgcgggtatcaagtttgccccgtgttagcagatattgaatgcagagctgcccagctccccgatatgccactcgaagagttgggccagcaagtcgattgcgacagaatgcgtgggttgatgtgcgcaaacagtcagcaaagccctcccctatgtcacgattatgagctccgcgtgctatgttgcgagtacgttccatgtgggcctagcccagcccctggaacctcccctcagccaagcctttcagcgtctacagaaccagccgtccctaccccgactcaaaccacggcaaccgagaagactaccctctgggtgactccgtcaatacggtctaccgccgctctgacaagtcagacaggcagttctagtggacccgtgacggttacgccaagtgcaccgggtaccactacatgtcaaccaaggtgccaatggaccgagtggttcgatgaagactatcccaagtctgaacagcttggtggggatgtggaatcatatgacaaaattcgggcagctggaggccacctgtgtcagcagcccaaggacatagaatgtcaggctgaatccttccctaattggacattagcgcaagtgggccagaaggttcactgcgatgtgcactttggcttggtctgtcgcaattgggagcaagaaggcgtatttaagatgtgctacaattaccgcatccgagtactatgctgctcggacgaccattgcaggggccgcgcaaccacgcctccacctacaaccgagttggaaaccgccactacgaccaccacacaagccctgttctctacaccacagcccacctcctcgccagggcttacccgggcaccaccggcctcgaccaccgcagtgcctacgttaagcgagggactcactagcccacgttacacgagcacgctgggcactgctaccacaggcggccctacaactcctgctgggtcaaccgagcccactgttccaggggtcgcaacctcaacattaccaactcggtccgcattgcctggtaccacaggtagcctggggacttggaggccgagccagccccctaccctggcacccacaacaatggcaacttcacgggcacggcctaccggtaccgcctcaacagcatctaaggaaccactcaccactagcctcgctccaacactgaccagtgagctgtccacatcccaagctgaaaccagcacacctcgcaccgagaccacaatgtctcccctgaccaacactaccacctcccagggcaccactcgctgccagccgaaatgtgaatggacagaatggttcgatgtcgacttccctacgtctggagtcgctggaggagacatggagacctttgaaaacatcagagctgcaggcgggaagatgtgttgggcaccaaagagcattgagtgcagggcagaaaattatcctgaggtttctattgaccaagtggggcaagttctgacctgttcgctggagactggacttacctgtaaaaacgaggaccagacgggtaggttcaacatgtgcttcaattacaacgtgcgcgtgctctgctgtgatgactattctcactgtcctagtactcctgcaacctcctccactgccacaccgtcgagcactcccggcactacatggatcctaaccaagcccaccaccacagctacgactacagccagcactggctcaacagcaacacccacgtccaccctccgtacagcgcctccacccaaggttctcaccactaccgccacgactccgacagtgacttcatcgaaagcaactccgtccagttccccagggacagcaacagcattgccggctctgcggtctaccgctactacgccaacggctacctcggtgactcctattccttccagctccctgggcactacatggaccaggttgtcccagacaaccacacctacagccaccatgtcgaccgcaacccctagttctacccccgaaaccgcacatacatcaaccgttctgaccgcaaccgcaaccacaacaggcgctaccggcagcgttgcaactccaagtagcacccccggtactgcccacacaacgaaggtgcctactactaccactacaggattcacagcgaccccatcaagctcaccaggtacagcgctgaccccacccgtttggatctctactaccactacacccacgacccgggggagcacggtcacaccatcatccattcctgggactacccacactgccacggttttaactactacaacaaccactgttgccacaggatccatggctaccccatcaagcagcacccagacgtctggtacgacacacactcctcctgttcctaatactatggcgaccacacacggcagatcactgccaccatcctcccctcacacagtgcgcactgcgtggacgagtgcaacaagcgggattctggggactacacacataacggagcctagcactgtgacatcacacaccctagcagccactacaggcactactcaacattccactccagccctgtcctctccccatcccagctcaagaacaactgaaagccccccatctcccgggaccacgacacccggacacactactgctacttcccggaccacagcaacagccactcctagtaagacaaggacttccactttgctgccatcttcccccaccagcgccccaatcaccacagtggtaacaatgggttgcgaaccacagtgcgcttggtctgagtggctggactactcctacccgatgccaggaccttcaggaggtgacttcgacacatatagcaacattcgggccgctggaggagctgtctgcgagcagcccctgggtctggaatgtagagcccaggctcagccaggtgtgcccttgagagagctcggccaagtggttgagtgttcccttgactttggactagtgtgtagaaaccgagagcaggtgggtaaatttaagatgtgtttcaattatgagatccgcgtgttctgttgtaattatggacactgcccctctacccccgctacttccagtaccgccatgccatccagtacccccgggactacctggatcctgactgaactgaccaccacagccactaccacagaatcaaccgggagtaccgctaccccttcttccacacctggcacaacctggattctaactgagccttccacgactgccactgtgaccgtcccgacaggctctactgccaccgccagttcaactcaggctacagctgggactccgcatgtgtccaccacagccaccacccccacggtgaccagttcaaaggccacgccattctccagtcccggcaccgctacagcacttccagcactccgtagcaccgccaccacgcccaccgccacttcttttaccgccattccatcctcttctttaggcaccacttggaccagactgagccaaactaccacgcccacagcgacgatgagcacagccacccccagttctaccccagaaacagtgcacacctccaccgttctcaccaccacagctactacaacaggggccacagggagcgtagccacaccctccagtacacctggcactgctcacacaaccaaagtgctcacaacaaccacaaccgggtttaccgcgaccccgtccagttctcctggcacagctcggactctgcctgtctggatcagcaccacgactaccccaacaacccgcggttcaaccgtaactccctcttctatccccgggacgacccacacgcctaccgtgctgactaccaccacaacaacggtcgctaccgggagcatggccactccgagctccagcacacagaccagcggcaccacccacactccgccagtgccaaatactactgcaaccacccatgggaggtctttgtccccttccagccctcataccgtgcgcaccgcatggacttcagccacgtctggcaccctcggtaccacccacattaccgaaccctccaccgggacatcccacacaccagctgctactaccggcactacccagcattcaacccccgccttgtcttcaccccacccgagctcccgaactacagagtcccctccgtcccctggaactaccacacctggtcacacaagagcaacatctcgaacaactgctactgcaaccccaagtaagacgagaacctcaaccctgctgccgtcctccccaaccagcgctcccatcaccaccgtagtcaccatgggctgcgaaccacaatgcgcatggagcgaatggctggactattcctatcccatgcctggtccttctgggggggattttgacacctattccaacattcgggccgcaggaggggccgtgtgcgagcaacccctgggccttgagtgtagggctcaggctcagccaggggtgccactcagggaacttggccaagtagttgagtgctcacttgatttcggcctggtttgtcggaatagggaacaggtggggaagtttaaaatgtgcttcaattatgagatccgagttttctgttgtaattatgggcactgcccctccacaccggcaacgagttctacagctactcctagttccactccaggaacaacttggattttgacagagcagacaacagctgctaccactacagctacgacaggtagcaccgcaattccatcctcaacacctggcaccgcccctcctcccaaggttctgacatccaccgcaaccacccctactgccacatcttccaaggcaacatcctctagctcccccaggacggcgacaacactcccagtccttaccagtaccgctaccaaatctaccgctacttcctttaccccaatcccttcgtttacactgggcaccactggtacactgcctgaacagacaactactccgatggcgaccatgtctacgatccacccttcttccaccccagagactacacataccagcacagttctgaccaccaaggccacaacaactcgcgcaacatcaagcatgagcacaccaagttccactcccggcactacctggatcctaacggagctcacgaccgccgctacaacaacagccgccacaggaccaaccgccaccccctcctcgactcccggtaccacgtggatcctgactgagccaagtacaaccgcaaccgtaacagtgcccactgggagcaccgcaacagcctcttccacccgggcaactgccggaactcttaaagtcctcacctccaccgctaccacacctacggtcatatcctcacgggctactccctcatccagtcccggcaccgccacggccctccctgccctgcgttccaccgccactactcccacagccacttctgtgacggccatcccaagcagttcactcggtaccgcgtggacacgccttagccagactacgacgcctacagctacaatgtctacagcgactcctagtagcacacccgaaacagtgcatacttcgactgtacttacaaccaccactaccactactagggccacagggtcagtggcaacaccatcatcaactcctggtacagcccacaccaccaaagtgcctacaactactactacagggtttaccgcaacgccaagctcaagccctggcactgctctgaccccacccgtttggataagtaccacaactacccctactacacgaggttcaactgtcacccctagcagcatccctgggacaactcatacagctacggtcctgaccacaaccacaaccaccgtggccactggctctatggctaccccctctagctcgacgcagactagcggcaccacacacacaccccctgtgcccaacaccaccgccacaactcacggaaggtcattgcccccaagctcccctcatactgttcgtactgcctggacctcagcgacctcaggcatactgggcacaacccacatcaccgagccgtccactgtcacatcccatacccctgcagccaccacctctacaactcaacacagcaccccggcactgtcctccccacatccctcaagccgcacaaccgaatcgccaccatctccaggcaccaccacaccagggcacacacgtggcacttcgagaactaccgcgactgcaaccccatcaaagacccggaccagcaccctcttaccgagcagcccaactagtgcacccatcaccacggtggtgacaactggctgcgagccacagtgtgcttggtctgagtggctcgattactcataccccatgcccggcccaagcggcggggattttgacacatattcaaacatacgggcagccggtggagcagtctgtgagcagcccttagggctcgagtgccgtgctcaggcacagcccggagtgccgttgagggaattgggacaagtggtcgagtgttcacttgatttcggtctcgtgtgccggaacagagaacaagtgggaaagttcaagatgtgctttaactacgagatccgtgtcttctgctgtaactatgggcattgtccaagcacacccgccacatcatccaccgcaactcccagttccacgcctggtaccacctggatactcacgaaacttaccacgaccgcaactactacagagtctacaggatccactgccactccgtcttctacgcctggcaccacttggattctgacagagccttccaccaccgcaaccgtcaccgtgcccaccgggtctaccgctactgcatccagtacacaggctacagccggcactcctcacgtttctacaacagccacgactccaaccgttacctctagcaaagccacaccatttagtagtcctggcaccgctaccgctctgcctgccctccgctcaactgctaccacccccacagcgacatcgttcaccgccattccatccagctctctgggtaccacatggacaaggttgagccaaaccacaacccccactgccacgatgagcactgccacccccagttccacgcccgagaccgcacacactagtactgtcctaaccacgaccgccaccaccacacgggcaacaggatcagtcgccactccctcttctaccccgggtaccgcccatacaacgaaagtgccaactacaacaacgacaggatttactgtgacgccttcctcttctcccgggaccgctaggacgccgcctgtgtggatatcaactaccaccaccccaactactagcggtagcaccgtcaccccttctagtgttcctggcactacccataccccaaccgtgctcactactactaccactactgtcgcaaccgggtccatggccacaccctcttcaagtactcaaacatctggcaccacgcatacccctccagtccccaataccaccgctaccactcacggcagaagcttgtcaccaagctcccctcacacggtacgcaccgcgtggacaagtgccacatccggtactctggggacaacccatattaccgaacccagcacaggcacttcccatacccctgccgcaactaccgggactacacaacactctacccctgccctgtcatcaccccatccctccagccgaaccacagagagtccaccttcaccaggaacaaccacccccgggcatacaaccgcgacttctagaaccacagcgaccgcaactccctctaagactaggacttccacactcctgccctcctcccccacatctgccccaattaccacagtggtcaccacaggctgcgagccacagtgtgcttggagcgagtggcttgactacagctatcctatgcccgggcctagtgggggcgactttgatacctacagcaacatacgagcagccggcggagccgtgtgcgagcagccattgggtttggagtgtcgggcccaggcccagcccggggtaccattgggcgaattaggccaagtcgtggaatgttctctggatttcggccttgtgtgtcggaaccgcgagcaagtcggtaaattcaaaatgtgcttcaattacgaaatccgggttttttgctgcaactacggacattgtccttccacccccgccaccagctcgaccgcgatgccctcatcaacccctggcacaacctggatcctgacggaactgacgaccaccgcaaccactacagccagtaccggaagcacggctaccccgtctagtactccgggcactgcccctcccccgaaagtgctgacatctccggccaccacccctacagccacctcttctaaagcaacatcgagctcttcaccccgcaccgcaacaacactgccggttctcacgtccacagcaacaaagtcaactgccacttccgtgacacctataccgagttcaacacttggcaccaccgggacgttgcctgagcagaccaccacccccgtcgcaactatgtctacgattcacccaagctccacaccggagaccacgcacacttctacggtactgaccactaaagccacaaccaccagagcaacatcaagcaccagcacccccagttccacacctggcaccacatggatcctgaccgaactgactaccgctgcaaccacaaccgccgctaccggccctacagctacaccttcctctacaccgggcactacgtggatcctgactgagctaactaccacagcaacaaccactgcatcaaccggcagcacagccactccttcttctacccctggtacaacttggatcctaacagagccttctactaccgcaaccgttactgtgccgacaggatccaccgcgactgcctccagcacccaggctaccgctgggacaccacacgtcagcaccaccgctacaaccccaaccgtcacatcttccaaagccactcccagtagttctcctggaacagccacagctctcccagctctgcggagtaccgcaacaacacccacagccaccagtttcaccgccatcccctcgtcctctctgggcaccacctggactcgcttatctcaaactaccacacctactgcaacgatgtccactgccacccctagcagtacacctgagaccgtgcacacctctactgtacttaccgctaccgctacaaccacgggcgcaacaggcagcgttgccactccgtctagtactccgggaactgcccatacgaccaaggttccaaccactaccacaaccgggtttactgcaacaccatcatcctctcccggtacagcgctcacaccccccaccaccacacccatgtctaccatgtcaactatacatacatccagtacccccgaaaccacccacacctccacagtgctcacgacaaccgccaccatgactcgggccaccaattcgacagccacaccgtcttccacgctcggtaccacaaggatactcaccgaactaactaccaccgccactaccaccgctgcgaccggctcgactgctactcttagcagcactcccggtactacctggattctcaccgagccgtccaccattgccacagttatggtgccaaccgggtccactgcgacagcctcatccactctgggcaccgcccatacaccaaaggtcgtgacaaccatggcgacaatgcctaccgctactgcctccaccgtaccaagctcttcaaccgtgggtaccacgaggacacccgcagtgcttccttctagccttcctacgtttagcgtcagcacagtatcttcaagtgtgctcacgaccctgaggcctaccggcttcccctcatctcacttttcaaccccgtgtttctgccgtgccttcggacaattcttcagcccaggcgaagtcatctacaataagacagaccgggctggatgccacttttatgccgtgtgcaatcagcattgtgacatcgaccgctttcagggggcttgtcccacctcacctccgccagtaagtagtgctcccctcagcagcccaagtccagccccgggttgtgacaatgccatcccactccggcaggtgaacgagacatggactctcgagaactgcactgtggctcggtgcgtgggggataaccgggttgtgctgttggatccaaaacctgtggcgaacgttacatgcgtgaacaaacatctacccatcaaagtgagcgatcctagccaaccctgtgactttcactacgaatgtgagtgtgaatgcgttggtggccgcggaatcacaccaggagcgggcatctgctccatgtggggagggtcccattattctacctttgacggcacttcttataccttccgggggaattgtacctatgtgctgatgagagagattcatgcccgatttggcaatctctctctgtatctggataaccactattgcaccgctagtgcgaccgcagctgctgctcggtgtccccgagctctgtctatccattataaaagcatggatatagtcctgaccgttaccatggtccacggtaaagaggagggcctgatcctcttcgaccagattcccgtgtcttcaggctttagtaagaacggggtgttggtgtctgtcttgggtaccacgaccatgcgcgtggacatccctgccctgggcgtgtcggtaaccttcaacggccaggtgttccaagctcgacttccgtactcactctttcataataatacagaaggacagtgtggaacctgcaccaataaccagagggatgactgcttgcaaagagacggcaccacagcggcctcttgtaaggatatggccaagacctggttggtaccagattctaggaaagacggatgttgggctcccaccggtaccccccctaccgcgagccctgcagcccccgtgtcctccactcctactcccactccttgtcccccacagccattgtgtgatctgatgctgagccaagtatttgccgagtgtcacaacctggtacccccaggaccgtttttcaatgcctgtatttccgaccactgccgcgggaggttggaagtgccttgccagtctctcgaagcatacgccgaactgtgcagggcccgcggcgtgtgttccgactggaggggcgccacaggtggactgtgtgacctgacctgtccccctactaaagtgtacaagccttgcgggccaattcagcccgcgacgtgcaacagccggaatcagtccccccaactagagggcatggctgaggggtgtttctgccccgaagaccaaattctgttcaatgcacatatgggaatctgtgtacaggcttgcccttgcgtcgggccagacggcttccctaagttcccaggagagaggtgggtatctaactgccaatcctgtgtttgtgatgagggtagtgtatccgtacagtgcaaaccacttccttgtgatgcccaagggcaaccacccccatgtaataggcctgggtttgttaccgtgacacgacctcgagcggaaaacccatgttgcccagagactgtgtgtgtctgtaacaccactacctgcccacagtctctcccagtgtgcccccccgggcaggaaagcatttgcacccaggaagagggcgactgctgcccaaccttccgctgccggccacagttgtgctcatacaacgggaccttctacggagtaggcgcgacgtttcccggggctctgccctgccacatgtgcacgtgtttgtcaggagacacccaagatcccacagtgcagtgccaggaggacgcgtgtaacaacacaacctgtccccagggattcgagtacaagcgtgtcgcaggccagtgttgtggcgagtgcgtgcagaccgcatgcctcaccccggatggccagcctgtgcagctcaatgagacctgggtcaattcccatgtggataactgcaccgtgtacttatgcgaggccgagggaggagtgcatttgcttaccccacagccagcatcatgccccgacgtcagttcatgccgagggtccctcaggaagaccggatgctgttactcctgcgaggaagactcctgtcaagttcggattaataccaccattctctggcaccagggatgtgaaactgaagtgaacatcaccttctgcgaggggtcgtgccccggggcctctaaatacagtgccgaagcacaggcaatgcagcaccagtgcacatgttgccaggagcggagagtccatgaggaaaccgtacctctgcactgtcctaacggtagtgccattctgcacacatatacccatgcggtacaggtgctctgtgggcttctcgcatggggcctacaggccggaggacacatcaggggggcagttcaagacccacagcaaccactgaaagatcaggaggcatctggcaaggctcggcaggggggcgggtatcgccaaacggttgcatggggagacaagtcaaacgctagagcctggctgcaaaaacccgttgtgtgggtgcagtcaggcgccttcccgaccccagggccggcgtccgcactgtgcccatggtag

SEQ ID NO: 195734 - DNA, 17298 bp, synthetic construct
  misc_feature 1..17298: note = Description of Artificial Sequence: Synthetic coding sequence
  source 1..17298: mol_type = other DNA
atgggcgcccccagcgcctgccggaccctggtgctggccctggccgctatgctggtggtcccgcaggcagaaacccaaggtcctgtggagccgtcttgggaaaatgctggccacactatggatggaggagctccaaccagtagtccaacacgtagggtgagttttgtcccccctgtgaccgtatttccttcactgtccccacttaatcctgcccacaatggacgggtgtgttccacttggggagatttccactataagacattcgatggcgatgtattccgcttccccggcctctgtaactatgttttctcagaacattgcagggctgcctatgaggacttcaatgttcaactcaggaggggcctggtgggcagtcgtcctgtcgtcacccgcgtggtcatcaaggcccaagggttagtactggaggccagcaacggctcagtcttgatcaatggccaacgcgaggaactaccctattctaggactggtctgttggtagagcagagcggagattatataaaagtgtcaatccggttggttctgacctttctctggaacggggaagactcggccttactcgaactggatccaaagtacgcaaaccaaacatgcggcctgtgtggcgacttcaacggcctgccagccttcaatgaattctatgctcacaacgctagattaacgcctctacagtttggcaacctgcaaaagctcgacggccccaccgagcagtgtcccgacccgctgccccttccagcgggcaactgtaccgacgaggagggcatctgccaccgtaccctccttgggccagcgttcgccgagtgccatgcgctcgttgacagcacagcatacctggccgcctgcgcccaggatctgtgtcgctgccctacctgcccctgtgcaacattcgtggaatattctcggcagtgcgcacacgctggcgggcaaccacggaactggcgatgtccagagctttgtccgcgaacatgcccgctgaacatgcagcaccaggagtgcggctcaccctgcaccgacacatgctcaaacccgcagcgagcccagctttgtgaggatcactgcgtggacggctgtttttgtcccccaggcagaagctgcaccgttcttgacgacattactcacagtggttgcttgcctctgggccagtgcccctgcactcacggcggacggacctactcccctgggacatcgttcaacacgacgtgcagctcttgtacatgttcagggggcttatggcagtgccaagacctgccttgcccggggacctgtagcgttcagggcggtgcacacattagcacatacgatgaaaagctatacgatctgcacggggattgctcttacgtgctcagtaaaaaatgcgcagactcttcattcacggttctggctgagttaaggaagtgtggcctgactgacaatgaaaattgcctgaaggcagtgacattatcactcgacgggggtgataccgcgatccgtgtgcaggccgatgggggagtgttcctgaactcaatttacactcagctgcctttaagtgctgctaatatcacacttttcactccgtctagcttcttcattgtggtgcagacagggcttggcttgcagcttttagtgcaacttgtccctcttatgcaagtttttgtaaggttagaccctgcccatcaagggcagatgtgcggcctgtgtggcaattttaaccagaatcaggccgatgacttcacagcactctcaggtgtcgtggaagctacaggtgccgccttcgccaacacatggaaggcccaggccgcctgtgctaatgctagaaattccttcgaggatccatgtagcctgagtgtggagaatgagaattacgccaggcactggtgcagcaggctgaccgatcccaactcagcatttagtcggtgccatagcatcatcaacccaaaacccttccactcaaattgcatgttcgacacctgtaactgtgaacgaagcgaagactgtctgtgtgcggctctgagcagctacgttcatgcctgcgccgcaaaaggtgtgcagctctcagactggcgcgacggtgtatgtaccaaatacatgcaaaattgtcctaagtctcagcgatacgcttacgtggtggatgcctgtcagccaacctgtcgaggcctctccgaagcagacgtgacttgctcagttagtttcgtcccagtggacggctgcacatgtccagccggaaccttcctgaacgatgccggggcttgtgtgccagctcaagagtgtccttgttacgctcacggcaccgtccttgcgcccggagaggtcgtccacgacgaaggcgccgtctgctcatgtaccggcggcaagttgtcctgcctaggtgcttcgctgcagaaatcaacaggatgcgccgccccgatggtgtacttggattgctctaactcctccgccgggacacctggtgctgaatgcctacggagttgccacaccctcgacgtcggatgcttctccacgcattgtgtgtctgggtgcgtttgccccccagggcttgtttcagacgggagtggcggctgcattgcagaagaggactgtccgtgcgtgcataacgaagccacttataaacctggggagaccatccgggtagactgcaatacctgtacctgtagaaacagaaggtgggaatgcagccatcgcctgtgtctcggcacgtgcgtcgcttacggcgacggccattttatcacatttgacggcgaccgttatagttttgaaggatcctgtgagtacattctggcacaagactactgtggcgataacaccacacatggcaccttccggattgttactgaaaacattccctgtggcacgacggggaccacctgctctaaggctataaagctgttcgtcgagtcttacgagctcatcctgcaggaggggaccttcaaggccgtggctcgtggtccaggtggcgatcccccatacaaaatacgctatatgggcatcttcctggttattgaaacacacggcatggcggtgagttgggatcggaaaactagcgtgtttattcgcctccaccaggattacaaaggccgagtttgtggtctgtgtggcaactttgacgataatgctattaatgattttgcaacccggtctagatcagttgtcggggatgctctcgagtttggaaacagttggaagctaagtcctagctgtcccgatgcactggcacctaaggatccttgtacagctaacccttttcgtaaaagctgggcccagaaacagtgctctatcctgcatggacctacgttcgccgcctgcaggagtcaggtcgacagtactaagtattacgaggcatgcgtcaacgacgcttgtgcttgcgacagtgggggtgattgtgaatgcttttgcacagcggtcgccgcatacgcgcaagcctgtcacgacgccggcttatgtgtgagctggcgcaccccagatacatgcccccttttttgcgacttttataacccacacggcgggtgcgaatggcactaccagccgtgtggtgccccatgcttaaagacctgtcgcaacccttctggacactgcttggtggacctgcctggactggaaggttgctatcccaagtgccctccttcacagcccttcttcaatgaagatcagatgaagtgcgtggctcagtgtggctgttacgataaagatggtaactactacgacgtgggggctagggtgcccacagccgagaattgtcaatcctgtaactgtacaccctctggaatccaatgtgcccattctctagaggcttgtacatgcacttacgaagatcgaacttactcctaccaggatgtgatttataataccaccgacggccttggagcttgccttattgccatctgtgggtcaaacggtacaatcatcagaaaggcagtagcatgccctggtaccccagccaccaccccatttacattcaccactgcctgggtgcctcattctaccactagcccagcgttgcctgtgtccacagtttgcgttcgcgaggtgtgcagatggtctagctggtacaacggacaccgtccggagcccggtctcggcgggggcgatttcgagacctttgagaacctccgtcaaagagggtatcaggtatgtccagtgcttgcagatattgagtgcagagcagcgcagctgccagatatgccccttgaagagctgggccagcaggtagactgtgaccggatgaggggcctgatgtgtgccaactcacagcagagcccacctttatgccacgattatgagctaagagtgctttgctgcgagtacgtaccctgtggacccagccctgctcctggcactagtccacagccatcacttagcgcctcgacagagcctgccgtccctaccccaactcaaaccaccgctactgaaaagacaaccctctgggtgacccctagtataaggtcaacagccgctctgactagccagactggcagtagctcaggcccggttaccgttacaccttcagcacctggcaccacgacctgtcagccaaggtgtcagtggactgagtggttcgacgaagattaccctaaaagtgaacagttagggggggacgtcgaaagctacgataaaattagagctgccggcggtcacctatgtcagcagcctaaggacatagagtgccaagccgaatcatttccaaactggaccttggcccaggttgggcagaaggtgcactgcgatgtgcactttggcctggtgtgccgcaactgggagcaagagggtgtgtttaagatgtgttataactacaggattcgcgttttatgttgctccgatgaccactgtagaggacgggccaccacgcccccccctacaacggaactcgaaaccgcgactactaccactacccaagctttgttttccacaccgcagcccacctcctcaccaggccttacacgagctcctcccgccagcaccaccgctgttcctaccctctctgaaggattgaccagccctaggtatacttccactctcgggaccgcaacaacaggaggcccgaccacccccgctgggtccaccgaacctaccgtgccaggagtggccacatctactttacccactaggagcgccctcccaggcactaccgggagtctggggacatggcggccgtcgcagcctccaacactagcccccaccactatggcaacctcacgcgcccggcccacggggactgcctcgaccgcgagcaaagagcctttgacaacttcactggcaccaacactcacatccgagctcagcacctcccaggccgagacctctacgcccaggactgagacaaccatgagccctttgacgaacacgacaacctctcagggcaccacccgatgtcaacctaagtgcgagtggaccgaatggttcgatgtggatttccctacttccggcgtggccgggggcgacatggagactttcgagaacatccgtgccgctggcggtaaaatgtgttgggctcccaagtccattgagtgtcgggctgaaaattaccctgaagtctcaatcgatcaggttgggcaggttctaacatgtagtctggagaccggactgacctgtaaaaatgaggaccagaccggtaggtttaacatgtgcttcaattataatgtgagagtgctgtgctgcgatgattattcccactgtcccagcaccccagcaacatcctccactgctaccccatcaagcacaccaggcacgacatggatcctgaccaagccaactaccactgccaccaccaccgcctccacagggtcaactgccacaccaacttcaacacttcggactgcccctcccccaaaggtgttgaccaccaccgccacaacccccaccgtaacatcaagcaaagcgacacctagctcctctccggggaccgcaacagccctcccagctctccggtccacagccacaactcctaccgctacttctgtgacccctatcccaagctctagcctgggcacgacatggacaagactgagtcagacaacgaccccgactgccaccatgagcacagcgaccccctcgtctacccccgaaaccgctcacacaagcacagtcctcaccgccacggccaccactactggggcaactggaagcgttgcaactccgagctccacacctggtaccgcacacacaacaaaggttccgaccacgaccacaactggatttaccgccactcctagctcgagtcccgggacggcgctcaccccgccagtgtggataagtacaaccactaccccaaccacaaggggcagcactgtgaccccctcttccattccggggactacgcatacagcgaccgtgctgacaactacaacaacaacagtcgccacgggctccatggctactcccagttcctctacccagactagcggaacacccccgtcccttaccaccacagccactacaataacggctacagggagcacaacaaatccctccagcactcctggaacaactccgattccaccagtcctgacaacaacagccaccacgcccgctgccacaagtaatacagtgactccatcctcagcgctaggcaccactcataccccccccgtcccaaacaccatggcaaccacccatgggaggagcttgccgcccagttctcctcatacggtaagaactgcctggacttccgcgacgtccggcattctgggcaccactcatatcacggaaccctccacagtcacctcacacacgctggcggccacaactgggacgacccagcatagcactcctgcgctgtcctcccctcatccatcttctagaaccaccgagtcaccaccctcccccggcactacaacaccaggccataccacagctaccagccggacgacagcaacagccacccccagcaaaaccagaacaagtactcttctgccttctagccctacctccgcaccaatcaccacggtggtcacaatgggatgcgaacctcagtgcgcttggtctgagtggctggactattcttaccccatgccgggcccaagtggcggagacttcgatacctattcaaacattagagccgcagggggtgctgtctgcgagcagccactaggattagagtgcagggctcaagcacagcctggggtccccctgcgcgagctgggccaggtcgttgagtgctccctcgactttggcctggtgtgtcgaaaccgggaacaagtgggcaagttcaagatgtgctttaactacgagatccgggtgttttgctgcaactacggccattgcccttctacaccagctactagctcgacagccatgcccagctcaaccccaggcacaacttggatcctgacggaactgactaccacagccaccactacggagtccaccgggtcgacagctaccccttctagcacccctggtactacgtggatcctgactgagccttccactacagcaacagtcactgtccctaccggcagtactgcgactgcatcctccacacaggccacagccgggaccccccacgtcagcaccactgctaccacacctactgtcacctccagtaaagccaccccattctcatcgccaggcacagctaccgccctgcctgccctgagatccacggcgacaactccaaccgccaccagcttcaccgcaatcccctcctcatcgctgggtaccacctggacccgcctctctcagactaccactccaaccgccacaatgtctactgcaacaccaagctccacccctgaaactgtgcacacttccacagtcctgactacaacggctacgacaacaggggcaactggctccgtcgctactccatcctccaccccaggaaccgcgcataccaccaaagtgttaactacaacaacaactggcttcaccgccactccctcctcgtcaccaggaaccgccagaaccctccccgtgtggataagtactaccaccacccccactactagaggcagtacagtcacaccttcttcaataccaggcacgacacacacccctaccgtccttacgactacaaccacaaccgtggccaccggctccatggccaccccttcatcttccacccaaaccagcggtactcctccgagcctgacaacaaccgctaccacaattactgcaactggctcaacgaccaatcccagctccacccccggaacaacacctatcccaccagtccttaccaccacagctaccaccccggcagcaacgtccagcaccgtaaccccctcatcagcgctgggtaccacacatactcctcccgtgcctaatactaccgccactacccacggtcggtccctcagtccgagctccccacacaccgttagaaccgcctggaccagcgcgacaagcggaacattaggaacgacccacattaccgaacctagcacaggcacctctcatactcccgctgcgacaacagggacaacccagcattccacgcctgccctgtccagtccacacccgtcttcacggacgactgagagcccccccagtccaggcaccaccactcctggccatacccgtgctacaagcaggactaccgccactgctacgcccagcaagaccaggacgagcactcttcttccaagctcgccgacatctgctccaatcaccacagtggtaaccatggggtgtgagccacagtgtgcatggtccgaatggctggactattcgtatccaatgccaggtccgtcaggaggggacttcgatacatattccaacatccgggccgccgggggggctgtttgtgagcagcccctgggactggagtgcagagcccaggctcagcccggggtgccacttcgtgagctgggtcaagtggtggaatgctccttggactttgggttggtttgtcgaaacagggagcaggtagggaaatttaaaatgtgttttaattatgagatcagagtgttctgctgtaactatggacactgcccgagcacacctgcaaccagctccacagcaaccccctcatctactccgggcacaacctggatcctgactgagcagacaacagccgccactacaaccgcaacaacaggctcgaccgcaattcctagttcaacacctgggaccgctcctccccctaaagtcctcacctctacagctacaactcctacagccacatcatctaaggctacatcgtccagcagcccaagaaccgctaccacgctgccagtgcttacgagcacggcaacaaagagcaccgccacctcttttacccctattccatcttttactctgggtacgacaggtacactgcctgagcaaacaacaacccctatggccactatgtctaccattcacccatcatccacccctgaaaccactcataccagcaccgtcctaaccaccaaggccaccacaactcgtgctacttctagtatgtcaaccccatcctccacacctgggaccacctggatcctgaccgagctgactactgcagctaccaccacggcagcgactgggccaacagccaccccctccagcacaccagggacaacttggatcctgactgagcccagcacgactgcgacagtgacagttcccacaggttcgaccgcaactgccagctccacccgcgcaactgctggtactctaaaagtgcttacttccactgccacaacaccgacggtcatcagtagcagagccaccccgagtagttccccagggacagctaccgcgcttcctgcgttaaggtccaccgcaaccaccccgaccgccacttctgtgacggctattccctcatccagcctcggaacggcttggacgcggttgagtcagactacaaccccgaccgcaactatgtcaaccgcaacccccagtagtactccagagacagttcatacttccaccgtgttgacaaccaccacaaccactacaagagccactggttccgtggctactccgtcttcaaccccaggaacagcacatacgaccaaggtccccacgactaccacaaccgggttcaccgcaacacccagttcttcacctggtactgctctcacaccccccgtctggatctccaccacaacaacacccacgacgaggggatccacagtcactccttcaagcatacctgggaccacgcataccgccacagttctcaccactacaacgaccactgtggcgactggatcaatggccaccccctcctcaagcactcagacaagtggaacaccaccctctttgaccaccaccgcaaccacaatcacggcaacggggtcaacaaccaacccaagctcgactcccggcacgacccccatccccccggtcctcaccacgactgcaactaccccagcggctactagctccaccgtaaccccatccagtgcgcttggaacaacccatactccccccgtaccgaatactacggccaccactcatggccgctcattaccacctagctctccacacacagttcgcaccgcctggacatccgcaacttctgggatccttggtacaacgcatatcaccgagccatctacagtgacgtcacataccccggctgctactacctccacgacccagcactcaaccccggccctgtctagtccacatccgtcaagccggactacagagagcccacctagccccggcacaacaacccctgggcatacacgtggaacaagccgcaccacagctactgccactccttcaaaaacaaggacgagcacacttctacccagttcgcctacatctgccccaattaccaccgttgttaccaccggctgtgaacctcagtgtgcctggtcagaatggcttgattattcctatccaatgccaggtcccagtggcggcgatttcgatacatattctaacataagggctgccggaggcgccgtttgcgaacagccactaggcctggagtgccgggcccaagcccagccaggcgtccctcttagagagctggggcaagtagttgaatgttctctggacttcgggcttgtctgtcggaaccgggaacaagttggaaaattcaagatgtgtttcaactatgaaattcgcgttttctgttgtaattacggccactgcccttccacacctgctacttcttctactgccactcccagctctacccctgggaccacctggatccttaccaaacttacaaccacagccactactacagagtcaaccgggtcaaccgctaccccctcaagcacacctgggaccacctggattctgaccgagccttctaccacggccactgttaccgtgccgaccggcagtaccgcaaccgcgtcctctacgcaggccaccgctggcactccccacgtgagcaccacagccacaacacctactgtgacatcctcaaaggcgactcccttctctagcccaggcacagccaccgccctgccagccttgcggtccacggctaccactccaaccgctacctcatttacagccatccccagtagttcgctaggtaccacatggacccgactgagccagaccacaacacctacagccacaatgtcaacagctacgccttccagcactcccgaaaccgcacacacttccacggtactcacaacaactgctactacgacccgggccaccgggagcgtcgccacaccatcctctactccgggcactgcacataccaccaaagtccccacaaccacaactacaggatttactgtgacacccagttcttcacctggcacagccagaacccccccagtgtggatcagcactacaaccactcccaccacgtcggggtctaccgtcactccttcatctgtgcccgggaccacacacactccgaccgtgctgacaacaacgacgacaaccgtggctactggcagcatggcaacccccagctccagcacacagacctccggaactcctccctctttgatcactacagctactaccattacagccaccggcagtacaacgaatccgtccagcacaccggggactacacccattccgcccgtgttaaccaccacggccaccacccctgcagcgacatcttccaccgtgactccgtcttctgcactgggaaccacgcatacgccccccgtgcctaatactaccgcaacgacacacgggcggagtctgtcaccctcatctccacatacggttaggaccgcttggacatcagctacatcaggaacactaggaacaacacatattacagaaccctctacggggaccagccacacccctgctgctacgacaggcacgactcagcactctacgcccgccctttcatcacctcacccaagctcacggaccaccgaaagtccgccttcccccgggaccaccacgcccggtcacaccacagctacaagtcgaacaaccgcaaccgcaaccccatccaagacccgaacctctacgcttttaccctcatctcctacctccgctccaattacgacggtggtgactactggttgtgaaccgcagtgcgcgtggagcgagtggctcgattatagttatcccatgccgggcccatccggaggtgacttcgatacctactctaatatcagggcggctggcggtgccgtatgtgagcagcctctcggcctggagtgccgagcccaggcacagccaggcgtccctttaggagagcttggtcaagtcgtggagtgttcccttgatttcggactggtctgtcgcaaccgtgagcaggttggtaagttcaaaatgtgcttcaactatgagattcgcgtattctgttgcaactatgggcactgtccatcgaccccagccacctcatcaacggccatgcccagctccactcctggcactacgtggattctgacagagctaacgacgacagcaacaacgaccgcatccaccggctcgacagctacccccagttccacccctggaaccgctccacctccaaaggtcctgacctcaccagccaccacaccgaccgccacaagctcaaaagccacttcctcctcttcaccacgcacagcaaccacattgcctgtgctcaccagcacggccactaagagcaccgccacttcggtgacccccataccttcctctaccctgggaactactggcactttaccggaacagactacgaccccagtggcaaccatgtccacaattcatccaagcagcactccagagactacgcatacctccactgtgctgacaacgaaggcaaccaccactagggccacctcgtcaaccagtacccccagctcaacaccgggcactacctggattctgaccgagctgaccaccgccgctaccacgactgcagcgaccggtcccacagccactccaagctctaccccggggacgacatggatcctgaccgaactgacgactaccgcaaccacaaccgccagcactggatctaccgcaaccccttcatctacccccggaaccacatggatactgactgagccttcaactaccgccaccgtgaccgtcccgacgggaagcacggcgacggcttcctctacccaggccacagctggcacaccccacgtctccacaacagccacgacacccactgttacttcgagcaaagctactcctagctcatcgcccggaacagctaccgccctaccagctctcaggtcaaccgcgactactcctaccgctaccagcttcaccgcgattccctcttcttcgctcggaacaacctggacgcggctcagtcagactactacacctaccgcaactatgtccacagccaccccatcttcgaccccggagacggtccacacatccactgtgcttaccgccacggcgacgaccaccggtgcaaccggctccgttgccactccatctagtacacctggcacagcccatactacaaaagtaccgacaactaccacgaccggatttacagctaccccttcctcatccccaggaacagcactgacccccccagtttggatctctacaactaccacacctactacgaccacacctaccacgtctggcagtacagtgacccctagcagcattcccggcaccacacacactgcccgcgtcctcacaaccacaaccaccaccgtcgccaccggcagtatggccacccccagctcctccactcagacctccgggacccctcctagtctgaccaccacagccaccaccataacagctaccggatctacgacgaatccctcttccacgcccggcaccacaccaatcacgcccgtcctaaccagtactgccactacacctgccgcaacttcatccaaggctacaagtagcagctcccccaggaccgcaaccactttgccagtgctgacttcaactgccacaaagtccacggccaccagttttacgcctatcccttcctccacattgtggactacttggacagttcccgctcagacaacgactcccatgtctacaatgagcaccattcacactagttctaccccagagactacgcatacgagtactgtgctgacaacgactgcaaccatgacaagagccactaactccaccgcaaccccgtcctcaacactcgggacgacacgaattctgactgagctcaccaccactgccaccactacagcagccactggatctacggccacattgtcgtccactcccggaacgacatggatcctgaccgagccttcaacaatcgcaaccgtcatggttccaacaggatccactgccaccgctagttccactctgggaactgcccacacaccaaaggttgtgacgactatggcgactatgccgacggcaacagccagtaccgtcccaagcagctccacagtagggacaacaaggacccccgctgtcctccctagttcactccccacattcagcgtgtccactgtgtccagcagcgtgctgactacactgagaccgaccggattcccaagttcccacttttctactccatgtttttgcagagcattcgggcagtttttctcacccggagaggtgatatacaacaagactgaccgggccgggtgccacttctacgcagtttgcaaccagcactgtgatattgaccgtttccagggtgcatgccctacatcccccccccccgttagctctgccccgttatctagccctagccctgcccctgggtgcgataatgcaatcccactacgccaggtaaacgagacgtggaccctggaaaactgcaccgtcgcccgttgtgttggggacaacagagtggtcctgctggatccaaaaccagtcgctaacgtcacatgtgttaacaaacacttgcccatcaaagtctccgacccctcacagccttgtgacttccactacgaatgcgagtgtatatgttccatgtggggtggcagccactattccaccttcgacggaacctcctatacttttcgggggaactgcacttacgtgcttatgcgggagatacacgctcggtttggtaacctgagcctttaccttgataaccactattgcaccgcgtccgctacagccgctgccgcaagatgccccagagcactctcaatacactacaagagcatggacatcgtgttgaccgtgaccatggtgcatggcaaagaagaggggctgatcctgttcgaccagattccggtgtccagtggattctccaaaaacggcgttctcgtgagtgttctggggacaaccaccatgcgggtagacatcccagcgctgggagtctcggtaacctttaacggtcaagtcttccaggcaagactcccctacagcctgtttcacaataataccgagggacagtgtggaacctgcacaaataatcagagggacgattgtcttcagagagacgggaccaccgccgcatcatgtaaggatatggctaagacctggctagtcccagattcgcgtaaggatgggtgttgggctccaaccgggacccctccgactgcctcccccgctgcaccagtcagtagtactcccactccaacaccctgtcccccgcagcccctgtgtgacctgatgttgagccaggtgttcgctgaatgtcacaacttggtcccccccgggcccttcttcaacgcttgtattagtgaccattgcaggggaaggctagaggtgccatgccagagccttgaggcctatgccgagttgtgcagggctcgcggggtctgtagcgattggcgaggggccaccggcggcctttgtgatcttacatgccctccgaccaaagtttataaaccctgtggcccaatacaaccagccacatgcaactctcgcaaccagtcaccacagctcgagggcatggcagaaggctgcttttgccctgaggatcagatcctgtttaacgctcacatgggcatttgcgtgcaggcctgtccctgcgtggggcctgatggctttccgaagtttcctggcgagaggtgggtctccaactgccaatcctgcgtttgcgatgaaggcagcgtgagcgtgcagtgcaaacctctgccttgtgacgcccagggccagccccctccttgtaatcgacccggatttgtcaccgttacgcggcccagggctgaaaatccgtgctgcccagagactgtttgcgtgtgcaacaccaccacttgccctcagagcttgcctgtgtgtccaccaggccaggaatctatctgcactcaggaggagggggattgctgcccaacattcagatgccgcccacaattgtgttcatacaacggaaccttctacggcgtgggggccacttttccaggagccctcccatgccacatgtgcacatgcctgagtggcgacacacaagaccctaccgtgcagtgccaggaagatgcttgtaataataccacttgtccccaaggattcgagtacaaaagagtggcaggacaatgctgcggggagtgcgtccagactgcttgtctaacacctgacggccagccggtgcaactgaatgagacctgggtgaacagtcacgtggacaattgtacggtttatctgtgtgaggcagaagggggtgtgcaccttctgaccccccaacccgccagttgtcccgacgtttcatcctgtcgaggatcacttcgcaaaacgggctgttgttacagctgtgaggaggattcctgccaggtgaggattaatactacaatattatggcaccagggatgtgaaaccgaggtcaacattacattctgtgaaggcagttgtcccggcgcgagcaaatactcagcagaagctcaggcaatgcagcaccaatgtacctgctgtcaggaaaggcgcgtgcatgaagaaaccgtgcccctgcattgccctaacggctcagctatccttcatacttatacccacgtggacgaatgcggatgcacccccttttgtgtcccagcacccatggctcctcctcacacacgaggtttccccgcgcaagaggccactgcagtttag

SEQ ID NO: 195735 - DNA, 17289 bp, synthetic construct
  misc_feature 1..17289: note = Description of Artificial Sequence: Synthetic coding sequence
  source 1..17289: mol_type = other DNA
atgggcgcccccagcgcctgccggaccctggtgctggccctggccgctatgctcgtggtgccccaggcggagactcagggaccggtcgagccctcttgggaaaacgctggacatacaatggatggaggagcaccaactagcagccctaccaggcgggtttcctttgtgcccccagttacggtgtttccaagcctgtcgcctctgaacccagcccataacggacgtgtttgcagtacttggggtgatttccactacaaaacattcgacggcgacgtgttccgcttcccaggcctctgtaactacgtgttcagcgaacattgtagagccgcgtatgaggacttcaacgtgcaactacggaggggtttggtgggcagcaggccagtggtaacccgagtagttatcaaagcacagggcttggtgttggaagcaagcaatgggagtgtccttattaatggccagcgggaggaactgccatattcgcgcacggggttgctggtggagcagagtggtgactacattaaggtttccatccggctggtccttaccttcctctggaacggagaagactctgctcttttagagcttgatccaaagtatgcaaatcaaacctgtggcctgtgtggcgatttcaatgggttaccggcattcaacgagttctacgcccacaatgccagattgacacccttacaatttggtaacctacagaagctggatggcccaactgagcagtgtcccgatccacttccgctgcctgctgggaattgcactgacgaggaaggcatatgccacaggaccctcctggggcctgctttcgccgaatgccatgcactggtagattcaaccgcatacctggcggcctgtgctcaggacctgtgtcggtgtcccacgtgtccctgtgccaccttcgtagaatactcccgacagtgtgcccacgccggtggtcaacctcgtaactggcgatgtcccgagttgtgtccaaggacctgccctttgaatatgcagcatcaagagtgcggaagtccatgcacagacacttgctcaaatcctcaacgagctcagctgtgcgaggatcattgcgtggacggatgcttttgtccacctgggaccgtgcttgatgacataacccattcagggtgccttccgctgggccagtgcccctgcacgcatggaggccgtacttactctccgggcactagttttaacacaacctgcagcagttgcacgtgctcggggggattatggcagtgccaggatcttccctgccccgggacttgctcggtccagggaggcgcccacatctccacctacgacgagaaactgtatgatctgcacggagattgctcttatgtcctctccaaaaagtgtgcagattcctcctttacggttttggcagagctccgaaagtgtgggctgaccgataacgaaaactgcctgaaggctgtcacactgagcttagacggcggggatacagctatacgtgtacaggcagatggaggagttttcctgaattccatttatacgcagctcccattatctgccgccaacattacactttttactccatcttcctttttcatcgtggtacaaacaggactagggctacagctgctagtacagcttgtccctctcatgcaggtatttgtccgactggatcccgcacaccagggacagatgtgcggcctctgcggaaatttcaatcaaaatcaagcagatgactttaccgctctcagtggagtggtggaggctacgggggccgccttcgcaaacacctggaaggctcaggccgcatgcgctaacgcaaggaacagctttgaggatccgtgctccctgtcagtcgagaacgagaattatgcccgccattggtgcagtcggctgacggacccaaattccgcattcagtcggtgccatagcatcattaatccgaagccgtttcatagcaattgcatgttcgatacttgtaactgcgagaggtcagaggattgcctttgcgccgctcttagcagttacgtgcatgcctgtgccgccaaaggagtgcagctctctgattggcgggatggagtttgcacaaaatatatgcagaactgtcctaagtctcagcgctacgcgtacgtggtggatgcatgtcagcctacctgtcggggtctgagtgaagccgacgtgacttgttcagtttcatttgttcctgtggacggctgcacctgtcctgcgggcacttttctgaacgatgctggtgcctgcgtccccgcccaagagtgtccatgctacgcgcacggcactgtgcttgcccccggcgaagtcgtacatgacgagggagctgtgtgctcctgcacgggagggaagttatcctgtctgggagcatcactgcagaagtccactggctgtgcagcgccaatggtgtacctggactgttcgaattcttctgccggaaccccaggagccgagtgtctgcgtagctgtcacacactggatgttgggtgcttttctacgcactgcgtgtccggctgcgtttgtcctccaggtctcgtgtctgatgggagtgggggctgtattgctgaagaggactgtccctgcgttcacaacgaagcaacctacaaacctggagagacaattagggtcgactgtaacacgtgtacgtgtcgaaatcggcggtgggagtgttctcaccgactgtgcctaggaacctgcgtcgcctacggcgatggccacttcattacatttgacggagaccgatattcctttgaaggctcctgtgaatatatcctggcccaagattactgtggggataacaccacgcacggtacatttaggattgtgacagagaacattccttgcggaaccacaggcactacatgttctaaagcaataaaactgtttgtcgaaagttacgagctcattttgcaggaggggacttttaaagctgttgcgagagggcctggtggtgaccccccttacaagatccggtacatgggcatatttcttgtcatagagacacacgggatggccgtaagctgggacagaaagacatccgtcttcatccgactgcaccaggactataaaggcagagtgtgcgggttgtgcggcaatttcgacgacaatgctatcaatgatttcgcaacccgcagccgatcagtggtgggggacgccctcgagtttggaaatagctggaagcttagccctagttgtcccgacgcacttgcaccaaaggatccgtgtaccgccaaccctttccgaaaaagttgggctcagaagcagtgctccatcctgcatggtccgacattcgcggcttgcagatctcaggtggattcaacaaaatattacgaagcctgcgtgaatgacgcttgcgcatgcgattctggaggagactgtgagtgtttttgcacggcagtggccgcgtacgcacaggcctgtcacgatgcaggcctgtgtgtgtcttggcgcaccccggacacttgtccccttttttgtgatttctataatccccacggtggatgcgagtggcactatcagccctgtggagccccatgtctgaagacctgtcggaacccttctgggcactgcctcgtagatctgcctggtttggagggatgctaccccaaatgcccacctagccaaccattttttaatgaggatcaaatgaaatgcgtggcccagtgtggttgctacgataaagacggaaattactacgatgtgggtgcacgcgtgcctacagccgagaactgtcagtcttgtaactgcacaccatccggaattcagtgtgcacatagtctggaagcgtgcacgtgcacctacgaagaccgtacctatagctatcaggacgttatctacaacaccactgatgggcttggcgcctgtctaattgccatctgtggttctaatggtaccatcatcagaaaggctgtggcttgtccgggaactccagcaacaaccccattcacattcacaactgcttgggtaccacactcaaccacaagcccggccctcccagtgtccaccgtctgcgtacgggaagtgtgcaggtggtcatcctggtataacgggcataggcccgagcccggtctgggaggaggcgacttcgagacgttcgagaatctaaggcaacggggctatcaggtctgccccgtcctcgccgacatagaatgtagagcagcacagctgcctgatatgccgctggaggaactgggacagcaggttgactgcgataggatgagggggttgatgtgtgctaatagccagcaatctccaccattgtgccacgattacgaactgcgggtgctgtgctgcgagtatgtgccttgcggcccctcccctgcgcccggcacctctcctcagccttccttgagcgctagtaccgagccagcagtccccacacccacgcagaccactgctaccgagaagactaccctgtgggtgacaccaagcattaggtccaccgcagcgctaaccagccaaacaggcagttcttcaggccccgtaaccgttaccccctctgcacccgggacaactacctgtcagccccgctgccaatggacagaatggtttgatgaagactatccgaagtccgagcagctcggcggcgatgttgagtcctatgacaagattagagcggctggggggcacctttgccagcagccaaaggatatcgaatgccaggctgagtcctttcccaactggactctcgcccaggtggggcagaaggtgcactgcgacgtccacttcggtctcgtgtgtcggaattgggaacaagaaggagtcttcaaaatgtgttataattacagaatacgggtcctctgctgctccgacgaccattgcaggggccgggccacaacgcccccaccaaccaccgagcttgagactgctactacgacaacgacccaagccttattttctacaccccagcctacaagctccccaggactcaccagggctcctcccgccagtacaacggctgttccgactctttccgagggcctgacgagtccaagatacacctccaccctggggactgccacaacaggaggacccacaactcccgcaggttcgaccgagccaaccgttcccggggtcgctacaagcacgctgcccacaaggtcagcattaccaggtactaccggctctcttggaacctggaggcctagccagcctcctactcttgcacctactacaatggctacctctcgggcccggccaaccggaaccgcgtccacagcttctaaagagccactgactaccagtctagcccctactttaaccagtgagttgtcaacgagccaagccgagaccagcaccccacggacagagacaacgatgtctcccctcactaatactacgacctctcagggtacgacaagatgtcagcctaagtgcgaatggacggaatggtttgacgtggattttcccacgtcaggggtggcgggaggggatatggaaacattcgagaacatccgagccgcaggcggaaagatgtgttgggccccaaaatcaatcgagtgtcgggccgagaactatcccgaggttagcatcgaccaggtgggacaagtgcttacctgctcactggaaaccggcctgacctgtaagaacgaggatcaaaccgggcggttcaacatgtgcttcaactacaatgtgagggtgctctgttgtgacgactactcccactgtccgtcgacccctgctacttcctccactgcgacccccagctcaacacccggcaccacctggatccttactaagcccacaaccacagctactactacagcaagcactggcagcacagccacccccacttccacccttaggactgcacctcccccaaaagtgctgaccacgaccgccaccacccctactgtgacctcaagtaaagcaacccccagttcttctccgggaactgcgacggctttaccagctctgcgcagtacagctacgacacccacagctacatcagtaactccaattccgtcatcctccctggggacgacatggactaggctgtcacagaccaccacaccgaccgcaacgatgagtacggcaacacctagcagcacaccagagacagcacatacttcaaccgtactcaccgctacagccacaaccacaggcgccaccggtagcgtggccacaccctcaagcaccccggggacagcacacactaccaaagtccccacaacaaccaccaccggattcaccgcgacgccatctagcagcccggggacagcactcacacctccagtgtggatatccactacaaccacccccaccacccgcgggagcacagtgaccccgtcgtctatacctggaaccactcataccgccaccgtactgaccaccaccacaacaaccgtggctaccggcagtatggctacaccctcttcgagtacccagactagcggaacccctccaagcctgaccactactgccactaccatcaccgctactggctctaccacaaatcccagctccacccctggcacgactccgatcccaccagtgctgaccacaacagctaccacccctgctgctacttctaatacggtcacacccagtagtgcactcgggactactcatacgcccccggtgccgaacacgatggcgaccacccatgggagaagtctgccccccagcagcccccacacggtgagaacggcctggacttcggccacgtctgggattcttgggacgactcatatcaccgagccaagcactgtgacatcacacactctggctgcaacgaccgggaccacacagcacagcacgcccgctctctcatccccccacccaagtagtcggacgactgaatcacctccttcccccggcactactacaccaggacataccaccgctacaagcaggacaaccgctaccgctaccccttcaaagacacgaacaagtacactgctccccagtagccccacatctgctcctattacaaccgtcgtcacaatgggatgcgagcctcagtgtgcctggtcagaatggttggactactcttacccaatgcctggaccaagcggaggagactttgatacgtactccaatatccgagctgcagggggagcagtgtgtgagcaacccctgggtcttgaatgtagggcccaagcccagccaggggtgccattgagggagctgggccaggtggtggagtgctctctcgatttcggcctggtctgccgtaatcgggaacaagtgggtaagtttaagatgtgcttcaattacgagattagagtcttctgttgtaattacggacactgtcctagtacaccagctacgagctccactgccatgccctcaagcacgccgggtaccacctggattctgacggagctcactacaaccgctacgaccaccgagagcacggggtctaccgctacccccagttctacaccagggactacatggattttaactgaacccagcaccacggccactgtgactgttcccactggaagcacagccactgcgtcgtccacacaagctaccgccggcactccacatgtgtcgaccaccgctactactcctacagtgacaagctccaaggcaacaccttttagttcccccggcactgcaacagcactgcctgccctcagatccacggcaactactcctactgctacaagtttcacggccatacccagttcctctctcgggacaacctggacacgcctgtctcagactacaacgcctactgcaaccatgtccactgctacgcccagctcaactccagaaactgttcacacctctactgtcctgacaacgacagcaaccaccactggtgctacaggaagtgtcgctacccccagctcgaccccaggcacagcccatacgactaaagtgcttacaaccaccaccaccggttttactgctactccctcatcaagtccagggaccgcgaggaccctgcccgtgtggatcagcacaactacaacccccaccacgcgtggttctactgtgactccgtctagtatacccggcaccactcacaccccgaccgtattgaccacaacaaccaccaccgtggctaccggatccatggccactccgagctccagtactcagacatcaggcacgcctccatccctgacaactactgccacaactattactgctaccggtagtactaccaacccttcttccacccctgggacgactccaatcccacccgtgcttactaccaccgccaccacccccgccgctacaagtagcacggtgacaccatcctccgcccttgggaccactcacactccccctgtgccaaataccacagcaacaactcatggacggtccctctcgccatcctccccgcacaccgtacgcacagcctggacatccgcaaccagtggaacgttagggaccacacacatcaccgaaccttccacaggcaccagccacacgccggcggccactacaggcacaacccaacatagtaccccagcactgtcatcaccacacccaagcagcaggacaaccgaatcgcctccatctcctgggaccacaactccaggccacactcgggccacaagcagaactactgcaacagctaccccgtctaagactcgtacaagcactcttctcccttcaagccccacctctgctccaattaccacagtcgtgacgatgggttgcgagccgcagtgtgcgtggtccgaatggctggactattcttatccgatgcccggaccaagtgggggcgattttgacacctactctaacatcagggccgccggtggggctgtgtgtgagcagccactggggctcgaatgcagagctcaggcccagcctggtgtgcctctccgtgaattgggccaggtggtggagtgtagcctggacttcggtctggtgtgccgcaatagggaacaggtaggtaagtttaaaatgtgttttaactacgagatcagggtcttttgctgcaattacggacactgcccaagcacacccgcgacctctagcaccgccaccccttcttcaaccccaggcacgacatggatcctgaccgaacaaaccactgcggcaaccaccacagccacaaccggaagcacagcaataccttcttcaactcccggaacggctcccccccctaaagtgcttacaagcacggccacaacccctaccgccactagcagcaaagcgactagctcctccagccctcggactgccactactcttccggtattgacgtctaccgccaccaaatcaacggcaacatcctttacacctattccctcatttacgctggggacaacagggactctgccggaacagaccaccacacccatggcaactatgtcaacgattcatccctcttcgacacccgagacaacacacacatcaaccgtgctcacaaccaaggccacgactacaagagcaacatcatctatgagcacaccatctagcacgccaggtaccacatggatcctgactgaacttactaccgcagctactaccacggcagcaaccggtccaacggctaccccgagtagcacacctggcactacctggatcctaacagaaccctcaaccactgcaaccgtaacagtgcccacaggatcaaccgccactgccagctctacacgggccacggctggcaccctaaaggttttaacatcaacggctacaactcccaccgtgatcagctcacgggccactcccagcagctcccccggtaccgcaactgctctgcccgctcttaggagcacagcaacaactcctacggccaccagtgtaacagcgataccctcttccagcctgggcaccgcctggacacgactgagtcagaccactacccctacggcaacaatgagtaccgccaccccttcaagcactccagagactgtgcacacaagtacagttctgacaaccacgacaacgacaacaagagcaacaggctcagtggccaccccgtcctccacccctggcacagcccacaccacgaaggtcccaaccacaaccactacaggcttcaccgccactccatcgagctctcccggaacggccttgactcccccagtgtggatctcaacaaccaccacgccgacgacccgaggctccaccgttacgccatcaagtatccccggaactacgcataccgcaaccgtattgactaccacaaccactacagtcgcaactggctcaatggcaacccccagttccagtacacaaacctccgggacccctccctccctaaccaccaccgctacaacaatcacagccacagggtccaccactaacccatccagtactcccggcaccaccccaatcccgccggtactgacaacgaccgccaccacgcctgcggcaacatcatctaccgtaacaccctcaagcgctctgggaaccacgcatacaccccccgttccaaacacaactgccacaacacatggccgctccctgcccccttccagtcctcacacggtccgcacagcctggacatccgctacctccggaatcctcggcacgacccacatcaccgaacccagcaccgttacatctcatacgcctgccgctacaacctctactacacagcatagcactccagcactcagctcaccccatccatccagcaggaccacggaaagtcctccaagccctggtacaaccaccccgggccatacacgcggcactagccgaaccaccgcaaccgctacaccaagcaagactcggacatctacattgctcccaagctctcccacctctgccccaattacaaccgtcgtgaccaccgggtgcgagccacagtgcgcgtggtctgagtggttggactatagctatccaatgcctgggcccagcggcggagacttcgatacctattcaaacatccgcgctgctggcggagccgtctgcgagcaacctctcggactggagtgtcgggcacaggcccagccaggcgtgccgctccgagagttaggacaagtagtcgagtgctctctggatttcgggctggtttgtcgaaaccgggagcaagtgggcaagttcaagatgtgtttcaattatgagattcgcgtgttttgttgtaattacggtcactgtccttccacccctgctactagcagcacagcaacacccagcagtacacccggaaccacctggatcctgactaagctgacaaccaccgccaccacaactgagtccactggctctacggctacgcccagttccactccagggacaacatggattctgacagagccgagcaccacagcgacagtgacagttcctaccggatcaactgctaccgcgagcagcacgcaagcgacagcaggcacgccccacgtgagcactacagcaactacccctaccgtcacttcatccaaagccacaccattttcaagcccggggaccgcaacagcgctgcccgccttacggtccactgcgacaactcccactgcgaccagcttcacagccatcccttcttcgagcttgggaactacctggacccgcctcagtcagacaactacaccaaccgcgacaatgagcaccgcgacccccagttccacaccagagaccgcgcatacgagcacagtgctgaccaccacagcaacaactacaagggcaaccggatctgtcgcgacaccctcatcgactcccggcacagcacacacaactaaggtgcccacgaccacaactacaggcttcactgtgacgccctcctcctccccaggaaccgctcggactccgcctgtttggatttcaactaccactacgccaactacaagtgggtcgacggtcaccccctcttctgttccaggcaccacacacactcctactgtgttgactaccaccactaccacagtagccaccggctctatggcaacgccatctagctctacacaaacatcaggaacacccccgtctctgattactacagctaccacgattaccgcgacggggtcgaccaccaacccatcttccactccaggaacaacccccatcccacccgtgctcacgactaccgcgaccacccctgccgctacttcttcaactgtgaccccctcatcagctctaggaacaacacacactccgccagttcccaacactacagccactacacacgggaggtctctttccccgtccagtccgcacaccgtgcgcaccgcatggacctccgcgacttccggcactttggggaccacccatatcactgagccctccaccggcacaagccataccccagcagccaccacaggcaccacccagcactctacacctgcgctttcctcaccccacccctccagcagaacaacagagtctccaccctctcccggtactacaaccccaggccataccacagccacatccaggacaaccgcaacagctaccccttcaaaaacccggacttcaactctgctaccttcgagcccaacctccgccccaattaccacagttgtgacaactggatgcgaaccccagtgtgcgtggtccgagtggctggactacagctacccaatgcccggtccttccggcggtgacttcgacacttactctaatatccgcgcagcgggaggcgccgtttgcgagcagccacttgggttggagtgtagagcccaggcacagccaggcgtgcctctgggagaactcggtcaggtggtggagtgcagtctcgacttcgggctggtgtgcagaaatagagagcaagtagggaagttcaagatgtgcttcaattatgagatcagggtgttttgctgtaattatggccactgcccctccacgcccgctacctcttccacggcaatgccctcctctactcctggcactacttggattctgaccgagctcaccaccaccgctacgacaactgctagcacaggcagtacagctactccatcttccactccaggaacagcgccccctccaaaggtactaacttctccagccacaacgcccacagctactagctcaaaagctactagttcgtcttcacccagaaccgcgaccaccctgcccgtcttgacgtccactgccaccaaatcaaccgcgacgtccgtaactcccatccctagctccaccctgggaactacaggcaccctgcctgaacagaccacaacgcccgtcgccactatgtctactatccaccctagctccacccctgaaaccacccatacatccactgtcctcaccactaaagcaaccacaactcgtgctactagctcgacctccactccttccagcaccccaggtacgacttggatcctgacggagcttaccaccgccgcaactactaccgcggcgactggccctaccgcaactccgtcttcaacacccgggaccacatggatcttgacggagctcaccacaactgccactactacggccagtaccggctccactgcaacccccagttctacacccgggaccacttggatcttgaccgaaccttctacaactgcaacagtgaccgtgccgactggctccaccgccacagccagctccactcaggctactgctggcacgccacatgtttccaccaccgctacgacccccactgtgacttcaagtaaggcgacgccatcatcctcgcccggtacagctaccgccctgcccgcactgcgtagcactgccaccacccccacggccacatcttttaccgctataccaagttcctcattaggcacaacctggacccggttgtctcagaccacgacgcctacagcgactatgagcacggcgacaccttccagtacccctgagacagttcacacgtccaccgtactgactgcaacagccactaccactggggctacaggttccgtcgccacgccgagctcaacccctggaaccgcccacacaacaaaagtccctacaaccactacaacaggattcaccgccacaccatcttcctccccagggacagcactgactccacctgtctggatctccaccacgacaacccctaccacaactacaccgacaactagtggcagtacggtaacaccttcttccattcccgggacgacccacacggccagagtccttacaacaacaacgacgaccgtggcaacaggcagcatggctacacccagcagctcgacccagacgtctggtacccctcctagcttgaccactacagctactacaataacagccactggctccaccaccaaccctagcagtaccccgggcaccacacccatcacccctgtgcttacctctactgcgaccacgcctgcggcaacatcaagcaaggcaaccagcagcagttccccacggacagctactacgttgccagtgctcacaagtacggccaccaagtccaccgccacgtccttcacgccaatcccaagctctactctgtggactacttggacagtaccagcacagacaaccacacccatgtccacaatgagtaccatccatactagttctacgcccgaaacgacccatacctcaaccgtgctaaccacgaccgcaacaatgactagggccaccaacagcacggccacccccagttcaacactcggcaccacccggatccttacggaactgacgactactgccacgacaaccgccgcaactgggagcaccgctactctgtcatcaacccccgggaccacctggatcctcactgaacccagtactatcgccaccgtcatggtgcccaccggtagcactgccacagcttcgagcacacttggcactgcccatacgccaaaggtggttaccaccatggctacaatgcctaccgctacagccagtacggttccgtcatctagtactgtgggcacaacaagaactcccgctgtgctcccgtcttcgctgccaacattctctgtttctaccgtaagctctagtgtgctgactacacttcgacccaccggttttccgtcctcccacttcagcacgccttgtttctgtcgcgcttttggccagtttttctctccgggagaggtgatctacaacaaaacagatcgcgccgggtgccatttttatgcagtgtgcaatcagcattgtgacatagatagatttcagggtgcttgtccgacctctccccctcccgtcagcagtgcccctctctcgtccccgtcccctgctcccggctgtgataatgccattccactgagacaggtcaatgagacctggactctggaaaactgcactgtagcgcgctgcgtcggtgacaatagagtggtcctccttgaccccaagccagttgccaacgtgacatgcgttaacaagcacctgccaattaaggtttccgacccctcacagccatgtgactttcactatgaatgtgaatgcatctgctcgatgtggggggggtcccattacagtacattcgatggtacatcttatactttccgtggaaactgtacatacgttctgatgagggaaatccacgcacggtttggcaacctgtctttgtacttagataatcattattgtaccgcctccgcaaccgccgccgctgcacgctgcccccgggcactcagcattcattacaaaagtatggacatcgtgcttacggtgactatggttcacgggaaagaagaaggcctgattctgttcgatcagatccccgtgagcagcggctttagcaagaacggggtcctggtgagcgttcttggcacaaccaccatgagggtagacatccccgcgctgggagtctctgttacattcaacgggcaggtctttcaggcccgactgccatatagcctcttccataataacaccgagggacagtgtgggacatgcacaaataaccaaagggacgactgcttgcaaagagacggtaccacggccgcttcatgtaaagacatggcaaaaacctggctagtgcccgattcacggaaggatggctgttgggctccgactgggactccacctactgcaagccctgcagcccccgtttcttcgacacctacacccaccccttgtccgccccaacctctgtgtgacctgatgttgtcgcaagtctttgctgaatgccacaatctggtgccgcctgggccattctttaatgcctgtattagtgatcactgtagaggacggctggaggttccctgtcagtcacttgaagcctacgcggaactgtgccgtgccagaggggtgtgtagtgattggcggggcgctactggcgggctgtgcgatctgacatgcccccctactaaagtgtataaaccttgtggtcccatccagcctgcaacatgcaattctaggaaccaatccccacagctcgaagggatggccgagggctgtttctgtccagaggatcaaattctgtttaacgcccacatggggatttgtgttcaggcatgcccgtgtgtggggcccgatggcttccccaagtttccaggcgagcgctgggtgagcaattgccagtcatgcgtctgcgacgagggctctgtttctgtccagtgtaagcctctgccctgtgatgcccagggacagcctcccccgtgcaaccgccctggattcgtgaccgtgactaggcctagggccgagaacccttgttgcccagagacagtgtgcgtgtgcaataccaccacttgtccacaatcattgccggtttgtcctcctggccaggagtctatatgcactcaggaagaaggagactgttgtcctactttcagatgccgacctcaactctgctcctataacgggactttctacggggtgggggccacctttcctggcgccctcccatgtcacatgtgtacctgtctaagtggggatacccaagatcctactgtgcagtgtcaggaggatgcctgtaacaatacaacctgtccccaaggtttcgagtataagcgcgtcgcgggccagtgctgcggggagtgtgtgcaaacagcatgtctgaccccggatgggcagcctgtccaactaaacgagacctgggttaatagtcatgtggataactgcacagtctatctttgtgaagctgagggcggcgtccacctgttgacccctcagcccgctagttgcccggatgtctcgagctgtaggggttccctcaggaaaactggatgctgctactcatgcgaggaggattcttgtcaggtgcggataaatactaccatcctttggcaccagggatgtgagactgaagttaatatcactttttgcgagggctcgtgtcccggagcaagtaaatacagcgccgaagcacaggcaatgcagcaccagtgcacatgctgccaggaacggcgggtgcatgaagagactgttccgttgcactgtccaaatggatctgcaattctccacacttatactcatgtcgatgaatgtggctgcacccctttttgcgtcccagcacccatggcccccccccacacccggggatttcctgctcaggaggcgaccgccgtctag

SEQ ID NO: 195736 - DNA, 1611 bp, synthetic construct
  misc_feature 1..1611: note = Description of Artificial Sequence: Synthetic coding sequence
  source 1..1611: mol_type = other DNA
gtgttctgctgcaactacggccactgccccccccggccccccgcccttcgaccctgcccccctcccctccgcggacgacctgggtctaccgaactgacaactacagccaccacgaccgccagcacaggaagcacggctacccctagctccacccccgggactgctccccctccgaaggtactcaccagccctgctactacgccgacggccactagctcgaaagctacgagttcttccagtccaagaacggccactacgctgcctgtgctcacgtccaccgcaaccaagagcactgcaacttctgtgacgccaattccgtcctccacactcgggaccactgggactctccctgagcaaacaactactcccgtggccacaatgtccaccatccatcccagcagcacacctgaaactactcacacgtcaacggtccttacaactaaagctaccacgactcgcgctacatcctccacgagtacccctagtagcactcctgggacaacttggattctgacagaacttacaactgccgccactacaaccgcagctaccggacccaccgcgacacccagctctacaccaggcaccacctggatccttacagagctcaccaccaccgccacgacgaccgcaagtacggggtctaccgctacccctagttccacaccgggcacaacttggattttaacggaaccttctaccacagctacagtcacagtgcctactggctctacggccactgcctcaagcacacaggcgaccgcgggcacaccacacgtgtccacaaccgctaccacccctacggttacctcttcaaaggctaccccgagttccagtccaggtactgcaacggccctccccgctctccgcagtaccgctacgacccattcctaccagctgtacagccaccccctgctgctgcccactacatggactagactttctcagaccacaacacctaccgccaccatgtcaactgctactccatcttctactccggagactgtacatacaagcactgtcctcacggccaccgctaccactactggcccagccctctggcctccgccccccccaccacaagagcagctgacacttccaaagtgccggctgccacagccaagacatagtcatccattgctgcagccaagagatggcacacacgcgagttccgtggaccagcacaatcatcacacacacaaccaccacacccacaaccaatggcttcacggagaccctctattgcatcctggagaccacccccaccgccagtctgcagatcaccatcaccacaactgcacaggaagtatggctacaccaagttcaagcactcagacttctggaacacccccgagtcttactacgactgccaccacaatcaccgcaaccggcagcacaactaaccccagtagcacaccagggacaactcccattacacctgtgctgacctctactgctaccacccctgccgctacatcgagcaaggctaccagttcatcctccccacggactgcgacaactctgccggtgcttacctctactgcgacaaagtctacagctacctcatttacccccatcccaagcccttgcggcccccgaggtccctcttag

SEQ ID NO: 195737 - DNA, 561 bp, synthetic construct
  misc_feature 1..561: note = Description of Artificial Sequence: Synthetic coding sequence
  source 1..561: mol_type = other DNA
agcagcacccccggcaccacctggatcctgaccgagcccagcaccaccgccaccgtcacggtccctaccgggagcacagcgacggcatccagcacacaggccacggctggtacacctcacgtttcgaccactgccaccactcccacagtaacgtcaagtaaggccaccccctttagcagcccaggaacagccaccgccctgccggcactgcgctcaaccgccacaactcctaccgccacttcattcaccgctattccaagttcttgggcccccccagggcccgcatatcaccgcccaccacatccccgcccaccttgccctcagcctcaccctcctcctctgcaaagactctccaccccccctcagtgtctgcctccaaggcctccccgtggtcatagactctgcggccatcccttgctgcaccctcgaaacagctctcattatcagtccgcggattaccacaaccatttcaccgccactcctagcagctccccagggactgccaggaccttacctgtttggattagcaccaccactacacccaccactcgagggagttag

SEQ ID NO: 195738 - DNA, 960 bp, synthetic construct
  misc_feature 1..960: note = Description of Artificial Sequence: Synthetic coding sequence
  source 1..960: mol_type = other DNA
accaaggccaccaccacccgggccaccagcagcatgagcaccccctcctctactcctggtactacttggatcttaaccgaactgaccacggcggcaaccaccaccgccgccacacctcacggccaccctgtgctgcatcccagagaccatctggaccctcaccgggctcagcactacacagtgactgtgcccaccgggagtacagccactgcaagttcaactcgtgctacagcaggaacactgaaggttttaaccagccatcatactcacagtcatcagctgcagagtcacagcctcctgcagagtcgggattgtaacagacccagctctaccgaaaaacatagccatcacacccacagctaccaacggtactcacaccctctattcttgcctacggcctggactcgcctctcccaaacaaccacgcctacagctacaatgtctacggccaccccaagcagcactcccgaaaccgtacatacttccactgttttgacaacaactactaccaccacgcgagctaccctgtggccacctccccctcccccccaggagcagttaacactgccaaaatgtaggttgccacaacccaggcacagccatccactcctccagcctagggacggcactcatgcatctagtgttgaccagcacaatcaccacacacacaaccaaagattacacggtgatcctctgctgcatccaacaactcatacagcaaccgtcctgacgacaacaactaccactccactcgtcctgtggcagcatcctccactggcccatagacctgttgtaccccccagtttaaccacaactgccaccacgatcacagctaccggcagtactaccaaccccagcagcacaccaggtactactccgattccccccgtccttactacgacggcacatacgtgttcacatcaacaacattccgattcactcttatgcccacgcgattag

SEQ ID NO: 195739 - DNA, 2007 bp, synthetic construct
  misc_feature 1..2007: note = Description of Artificial Sequence: Synthetic coding sequence
  source 1..2007: mol_type = other DNA
atgcgggagatccacgcccggttcggcaacctgagcctgtacctggacaatcactattgcactgccagtgccaccgctgccgcggcaaggtgtccacgcgctctgagcatacactataaatccatggacattgtcttaaccgtcacaatggttcatggaaaggaggagggcctgattctgtttgatcagatccctgtatctagtggatttagcaagaacggggttctggtatctgtgctagggactacgaccatgagagtcgacataccggccctgggagtatcagtgaccttcaatggacaggtgtttcaagcaagactgccatatagcttatttcataacaacaccgaagggcagtgtgggacctgcaccaacaaccagagggatgattgtctgcagagggatggtacgaccgcagcatcctgcaaggacatggcaaagacttggctggtccccgattcccggaaagacgggtgttgggccccgactgggacacctccgaccgcgtcaccagctgcccctgtgtcaagtaccccgacccccaccccttgcccccctcagccactgtgcgatctcatgctttcccaggtctttgccgaatgccacaacctcgtgccacctggccccttcttcaacgcttgcatttccgatcactgtagaggccgattggaagtaccatgtcagtcactggaggcttatgccgagctctgccgagcgaggggagtgtgctcagactggcgtggagcgacaggggggctttgcgacctcacttgtccccctacgaaggtgtacaagccatgtggacccatccaaccagccacctgtaattccagaaatcagagcccacagctcgaaggcatggcagagggctgcttttgccctgaagatcaaattctctttaacgcgcatatgggcatctgtgtgcaggcttgtccatgcgttggaccagacggatttcccaagtttccgggagaacggtgggtttccaattgtcagagttgtgtctgtgatgagggctccgtgagcgtgcagtgcaaaccattaccatgtgatgcccaaggccagccccctccatgcaacaggcctggattcgtgacagtcaccaggccacgcgccgaaaatccctgctgccctgagaccgtatgtgtctgcaacacaacaacctgtccacagtctctgcccgtttgcccgcccggccaggaatccatctgcacccaggaagagggggactgctgtccaactttcagatgccggccacaactttgctcctacaacggtactttttatggggtgggagccacttttccgggggcactaccctgccacatgtgcacctgcctttccggcgatacgcaggatcctacagtgcagtgccaggaggacgcatgcaacaatacaacttgtccgcagggtttcgaatataagagagtggccgggcagtgttgcggggaatgcgtccagacagcatgcctcacacccgatggacaaccggtacagctaaacgagacttgggtgaattctcatgttgataactgtaccgtctacctgtgcgaagcagaaggcggcgtgcatttactgacaccccaacctgcctcttgccctgatgtatcctcttgcagaggcagtctaaggaagaccggatgctgttatagctgcgaagaggactcgtgtcaggtgaggattaataccaccatcctttggcaccagggatgcgaaacagaagtgaatatcactttctgcgaggggagttgtcccggagcttcaaagtattctgcagaggcacaggccatgcagcatcagtgcacctgctgccaagagcgaagagttcacgaggaaaccgtacctctgcactgccccaacggcagcgcaatacttcacacatatacgcacgtcgatgaatgtggatgtactcccttctgcgtgcccgcccccatgagccctccagcatgcgtgtggcaccccgcattgagggcgcctgccgctcacttggggctggccccgccgtag

SEQ ID NO: 195740 - DNA, 7320 bp, synthetic construct
  misc_feature 1..7320: note = Description of Artificial Sequence: Synthetic coding sequence
  source 1..7320: mol_type = other DNA
atggtgcagcggtggctgctgctgagctgctgcggcgccctgctgagcgctggcctagcgaacacttcttacacaagtcctggacttcaacggctgaaggactctcctcaaaccgcacccgataaaggacagtgttcaacctggggagccggccactttagtacttttgaccaccacgtgtatgactttagcggtacatgcaattacatcttcgccgccacctgcaaggatgcctttcctacattttccgtccaactgcgccgtggcccagacggctccataagtcggatcattgtcgagctcggcgcatcagtggtcaccgtttcagaggcaataatctctgtgaaggacataggagtgatatccttgccctacacttccaacgggttacagatcactccttttggccaaagcgtaagactggtcgccaaacagctcgagctcgaattagaagttgtgtggggccccgatagtcatctgatggttctcgtcgagcggaaatacatgggacagatgtgcggactgtgtggcaatttcgatggcaaggtaactaatgagtttgtctccgaggagggcaaattcttggaaccccacaagttcgcagcactacagaagctggacgatcctggagagatctgcacgttccaggatattcctagtacccatgtgagacaggcccagcacgcgcgaatttgcacccagctgttaacactcgtcgcacctgagtgttccgtgagtaaggagccttttgtgttatcctgccaggctgacgttgccgcagcaccacagccagggccccagaactcaagctgtgccaccctaagtgaatactcccgacagtgtagcatggttggacagcctgtacgcaggtggcgcagccctgggttgtgcagcgtcggacagtgcccggctaatcaagtataccaggagtgcggcagtgcttgcgtgaaaacgtgctctaacccgcaacattcttgcagttcgagctgcacttttggatgcttttgtcctgagggtaccgttctgaacgacctttctaacaatcacacttgtgtccccgtgacgcaatgtccttgtgtattgcacggagcaatgtatgccccgggtgaagtcacgattgctgcctgccagacctgtcgctgtactcttggacgatgggtctgcaccgagagaccctgtcctggtcactgctctctggagggcgggtcgtttgtgacgacatttgatgcacgtccctaccgctttcacggaacctgtacatacatcctgctccagtctccgcagctgccagaggatggcgccctgatggcagtatacgacaagtccggcgtctctcacagtgagacttcactagtggctgttgtgtacctgtctcgccaggacaaaatagtcatatcgcaagatgaggttgtaacaaacaacggcgaggccaaatggttaccttataagacccgaaatataactgtttttagacagacgtcaactcaccttcagatggccacaagttttggattggagttggttgtgcagttgaggcccatctttcaggcttacgttacagtgggcccacagttccggggacagactcgcggcttatgtggaaactttaacggtgacacgacggatgatttcaccacctctatgggaatcgccgaaggcacagcctcactcttcgtcgacagttggcgagccggcaattgccccgccgcccttgagagagagacggacccatgcagcatgagtcagctcaataaagtctgcgctgagactcattgctctatgctgcttcggacgggcactgtgttcgagagatgccacgcgaccgtaaaccccgccccattctacaagcgatgcgtgtaccaggcctgcaactacgaggagaccttcccccatatatgcgcagccctcggagattatgtgcacgcctgcagtctgagaggtgtgctgctgtggggatggcggagctccgtggataactgcactatcccgtgcacgggcaataccaccttttcatacaacagccaggcttgcgagcgaacttgtctatcccttagcgatcgggccacagagtgtcaccacagcgctgttcccgtcgacggctgcaactgcccagacggcacctatctgaatcagaaaggggagtgtgtgagaaaagcacagtgtccatgcattctcgaagggtacaaatttatcctcgccgagcagagtacagtcataaatggcataacttgccattgcatcaacggtcgactcagttgtcctcagcgcccgcagatgtttttggcctcttgtcaggcccccaagacgttcaagtcctgctcccaaagttcagagaacaagttcggtgctgcatgcgctccaacttgccagatgctagcaacaggcgttgcctgcgtccctacaaagtgtgaacccgggtgtgtgtgcgccgagggactgtatgagaatgcagacggacaatgcgtccctccggaagaatgtccctgcgagttttccggtgtgtcttatccaggaggggccgagctccacacagactgcagaacttgttcctgctccaggggacggtgggcctgtcagcagggcactcactgcccaagtacttgcaccttatacggagaaggccacgtgatcactttcgacgggcagcgatttgtgtttgatggaaactgtgagtacatcctggctactgacgtgtgcggagtcaatgatagccagcctacgtttaagatcctgactgagaatgttatttgcgggaattccggcgtcacctgttctcgggcgataaagatttttctgggcggtttgtctgtcgtgctggccgatcggaattatacagtcactggggaggaacctcacgtgcagttaggagtgacccctggagcactgtctctggtcgtcgacataagtattccgggtcgatataacctgacactgatttggaaccgccacatgaccatccttatccggatcgctcgggcatcccaagaccccctttgcggtctgtgtggaaatttcaacggaaacatgaaggacgactttgaaacccgcagcagatacgtggcctcgtccgagctcgagcttgttaatagttggaaagagtcacccttatgtggagatgtgtcctttgtcaccgatccatgtagcctgaacgccttcagacggagctgggccgagagaaaatgctctgtgataaacagtcagacatttgcgacctgtcactctaaggtatatcatctgccctactacgaggcctgcgtgagagacgcatgtgggtgcgattctggaggcgattgtgaatgtctgtgcgacgccgtggctgcatacgcacaagcgtgcctggataagggagtttgtgttgactggcgcactcctgccttctgccctatatactgcgggttctacaacacccacactcaggatgggcatggagagtatcagtatacccaagaagctaattgcacttggcactaccagccgtgcctgtgtccttcccagcctcaaagtgtgcctggtagcaatatcgaaggctgctataattgttcacaggatgaatactttgaccatgaagagggggtgtgcgtgccctgtatgccccccactaccccccagcctcctaccacccctcagctcccaactaccggcagtcgccctactcaggtttggcctatgactggtacttcgaccacaatcgggctgctatcctctacggggccctcccccagctcaaatcatacaccagcatctcctacacagactcctctgcttccagcaaccctgacatcctctaaacccactgcaagtagtggcgaacccccgcggcccacaaccgccgttaccccccaagcaacaagtggccttccccccacagctacgctgcgttccactgcaaccaagcctaccgtcacacaggccacaactagagctaccgcttctacagcgagtcccgccacgacctctacagcccagtccacgactcggacgactatgacactgcctactccagccacgtccggcacgagcccaaccctgccaaaaagcacaaaccaggagctgccaggaaccaccgctacacaaaccacgggcccccgacctacccctgcttcaacaacaggtccgaccactccccaacccggacagcctacccgccccacagcgaccgaaaccacccagacccgtactaccacagaatacactaccccccagaccccccatactacacactcaccgcccacggctggtagtcccgttccatcgactgggccagtgacggccaccagcttccatgctaccacaacttacccaaccccttctcatcccgagacaactctccccacacacgtcccacctttttccacatccttggtaactccctcaacacacacagtgataacacccactcatgcgcagatggccacttctgcatctaatcacagcgcaccaactgggactatccctccccccactacgctgaaagccacaggttcaacacatactgcccctcccattacacccactacatctggcacaagccaggcacactcttctttctccaccaacaagacacctacttcccttcattcccatacaagtagtacccaccatccagaggtcactccaaccagtacaactacaatcactcccaaccccacaagcactaggacccggacacctgtggctcataccaacagtgccacctcatctagacccccccccccgtttactacacattcacctcccaccggctcttcgccgttctcatctactgggccaatgacggctacttcgttcaaaactactacaacctatccaaccccatcccacccacagactacacttcccacccatgttcccccattttccactagtctcgtgactcccagtacacatacggtgattacacccacacacgcccagatggctacttctgcttcaatccattctatgcctaccggcacaatccccccccctacgacattaaaagcgactggtagcactcacaccgctcctaccatgacattaaccacgtccggtacatcgcaggccctctccagcctaaatacggctaagacttccacctcactccacagtcacacaagctcaacccaccacgcagaggccacatccacatcaacgacaaacataacgccgaatcccacctccaccggcaccccgccaatgaccgttacaacaagtgggacgtctcagagcaggtcctctttctcgactgcaaagacttcaacctccctgcattcccatacaagttcgacacaccatccggaggtgaccagcacatctacaactagtattacacccaaccacacatccaccggtacacgtacccccgtagcccatactaccagcgcaactagttcacgtctccccactccattcaccacccattcaccccccacaggaaccaccccaatctccagcaccgggccagtgaccgcaaccagcttccagacgacgacaacctaccctactcctagccaccctcacaccactctgccaactcatgtgccatccttcagcactagcctcgtgactccaagtacccacacagtcatcatcccgacccatactcagatggcaacgtcagctagcatccatagcatgcccacaggaacaataccccccccaacaaccattaaggcgaccgggtccacccataccgcacctccaatgacccccactacttcaggcacaagtcagagtccctcttcctttagtacggccaagaccagtacctcccttccctaccacacaagcagtacacatcatcctgaagtaactcccacctctactaccaatataactccgaaacacacgtctaccggaacgcgcacccctgtggctcacacaacctctgcatccagctcacgtttacctacgccgttcactacacattctccacccactgggagctccccttttagttccaccggccccatgacagctacctcattccagactactaccacatacccgacaccttcacaccctcaaacaactctcccaactcatgtgcccccattttccaccagtctcgtaaccccgagcacccatacggtcatcatcactacacacacccagatggcgacttcagcaagtattcacagcacgcccaccggaacagtcccaccacctaccactctgaaagccaccggatccacacatacggcccccccgatgacagtcactacatccggcaccagccagactcactcctcgtttagtacagcgacggcatcgtcaagctttataagctcctcaagctggctgcctcaaaattccagcagtcggcctccgtctagccccattacaacccagctacctcacttgtcgagtgcaaccacccctgtgtcaaccaccaatcagctgagttcttctttctctccctctcccagtgcaccaagcaccgtgagctcttacgtgcccagcagtcactcgagcccacagacgtccagcccaagcgtgggcaccagctcttctttcgtttccgcgcccgttcactcaacaaccttgtcatccgggagccattcatctctcagcacccacccgacgaccgcctctgtgtcagcatcccccttgtttcccagtagtccagccgctagcacaactattcgggccacactcccacacacaatttcctcacctttcaccctgtctgccctcctgcctataagtaccgtgaccgtctcacctactcccagctcacatctggcttcttctacaattgcctttcccagcacccctcgtacaacagcgtccacccacacagccccagcattttctagccagagcacgaccagcaggtccacttccctcaccacccgggttcctaccagcggtttcgtgtctttaacctccggcgtcaccggtattcctactagtcctgtgaccaacctcacaactcggcaccctgggcccactctatctcctacgactaggtttttaacttcctcgttgacggcccacggatccacacccgcatcagcacccgtcagttcgctcggaacaccaacccctacatcccccggagtgtgtagcgtaagagaacagcaagaggaaatcaccttcaagggctgcatggcgaacgttaccgtcacccgttgtgaaggcgcctgcataagcgccgccagcttcaacatcataacccagcaggtcgacgccaggtgctcttgttgtaggcctctccacagttatgagcagcagttggaactaccatgtccggacccaagcacccctggacggaggctggttctgacgttgcaggtgttcagccattgcgtgtgcagttctgtggcatgtggcgattag

SEQ ID NO: 195741 - DNA, 1134 bp, synthetic construct
  misc_feature 1..1134: note = Description of Artificial Sequence: Synthetic coding sequence
  source 1..1134: mol_type = other DNA
atgaagaccctgcccctgttcgtgtgcatctgcgccctgagcgcctgcttcagcttttctgaaggcagagagagggatcacgagctgaggcatcgaagacaccaccatcaatctcctaaatctcacttcgaactgcctcattatccaggcctgcttgctcaccagaaacccttcattcgcaaatcttataaatgcctccataaaaggtgcaggcctaagctcccaccatcaccaaataatccaccaaagttccctaatcctcatcagccgccaaagcacccggacaaaaattccagcgtggtgaatccgaccctcgtggccacaacccagatccccagcgtaacctttccttctgcaagcacaaagattacgacactccccaacgttacatttctgccccagaacgcgaccaccatctcctcaagggaaaatgtgaacacaagctcaagcgtcgcaactttagctcccgtgaatagcccagccccacaagatacaacagcggcccctcccacgccttccgcgactacccctgccccgccatcttcgtcagcccccccagagaccaccgcagcccctcccaccccctcagccactactcaagcgccacctagctcttcagcccccccagaaactactgctgctcctccaactccgccagctaccactccagcccctccaagttcttcggctcccccagaaacaaccgcagcccctcccacccctagtgccactactccagccccccttagctcttcagccccaccagaaacaacggccgtgcctcccactccatctgcaacaacattggatcccagctctgcaagcgctcctcctgagacgacagccgcacccccaactccatccgccaccacaccggctccacccagcagtccagctccccaggagacaaccgcagcaccaattaccacacccaattcctctccaaccacactggctccagacaccagtgaaaccagtgcagctccaacacaccaaacgacgacctctgtgactacccagaccacaactactaaacagcccacatccgcaccaggccagaacaagatttcccggtttttactgtatatgaaaaacctcctcaatcgcatcatcgatgacatggtggaacagtag

SEQ ID NO: 195742 - DNA, 1134 bp, synthetic construct
  misc_feature 1..1134: note = Description of Artificial Sequence: Synthetic coding sequence
  source 1..1134: mol_type = other DNA
atgaagaccctgcccctgttcgtgtgcatctgcgccctgagcgcctgctttagtttctcggagggcagagaaagagatcatgagctccgccacagacgtcaccaccaccaaagccccaagtcacatttcgagcttccacattatcccggacttctggcacaccagaagcctttcatcaggaaatcatacaagtgtttgcacaagagatgcagacccaagcttcctccgtcccccaataacccacctaagttccctaatcctcatcagcccccaaaacaccccgataagaatagtagtgttgttaacccaacgctggtcgctaccacccagattcccagcgtgacctttccatcggctagcacaaaaataactactttacccaatgttacatttctaccccagaacgccaccactatctctagcagggagaacgtgaatacctctagttctgtggccaccctcgctccagttaacagtcctgcccctcaagatactactgctgctcctcccacaccctccgccacaacacccgctccgccgtcgtcatctgccccccccgaaaccacggcagcaccaccgacgccttctgcgaccacacaggccccaccctcctcctccgcccctcctgagactacagcagcccctcccacgccgcccgccaccactcccgctcctccatcgagttcggctccaccagagaccaccgctgcaccccccacgcctagcgccaccactccagcccctttgtcatctagtgcacctccagagaccacagctgtcccaccaacaccaagtgctactacactagacccatcctcggcctcagccccaccagaaacaaccgctgcccctcctaccccgagcgcgactacaccagctccgccttcgtccccggccccacaggaaactacggcagcacccattacaactcccaacagcagccccacaacactggcacccgacactagtgaaacatccgccgcgcctacacatcagaccactacttcagtgacaacgcagacaaccactactaagcagccaacctccgcccctgggcagaataaaattagcagattcctgctgtatatgaaaaatctgttgaatagaatcatagatgatatggtggaacagtag

SEQ ID NO: 195743 - DNA, 1134 bp, synthetic construct
  misc_feature 1..1134: note = Description of Artificial Sequence: Synthetic coding sequence
  source 1..1134: mol_type = other DNA
atgaagaccctgcccctgttcgtgtgcatctgcgccctgagcgcctgcttttccttttccgagggccgggagagagatcacgagctgcggcatcgccggcaccatcaccagtctcctaagtcccatttcgaactgccccactatcctggtcttttggcccaccaaaagccgtttattcgcaaatcatataagtgtctgcacaaaagatgtcggccgaagcttccgccatccccaaataacccacccaagttcccaaacccacaccagccacctaagcatcctgacaagaatagcagtgtggtcaacccaaccctggtagcaaccacccagatcccctccgtgaccttcccctctgctagtaccaagatcaccacactgcccaacgtcacgttcctccctcagaatgcaaccaccatttcaagccgcgaaaacgtaaacaccagcagctcagtagccacgctggcaccggtaaattccccggctcctcaggacaccaccgcagccccgcccaccccatcagcgacaacccctgcccctcccagttcttcagccccccccgagacaacagcagcgccccctacgccctctgcaaccactcaggcgcccccttccagtagcgccccacccgagactacagctgccccgcccacacctcccgctaccacacctgcaccgccttcctcatccgccccaccggaaactaccgccgcgccccccaccccctccgcgactactcctgctcccctcagttccagcgccccacccgagaccactgcggttcctcctacaccctccgctactacccttgatccgagtagcgcgagcgcacctccagagacgaccgccgcccccccgaccccatcagccaccactcccgccccaccttcgtctccggcccctcaggagactactgctgcacccatcactaccccgaattcgtctccaacaactttggctccagataccagcgagacctctgcggcccctactcatcagaccacgacgtctgtaaccacacagactacgacgacaaaacagccaacgagcgctcccggtcaaaacaagatcagcagatttctcctctatatgaaaaacctcttgaatcgaatcattgatgacatggtggaacagtag

SEQ ID NO: 195744 - DNA, 411 bp, synthetic construct
  misc_feature 1..411: note = Description of Artificial Sequence: Synthetic coding sequence
  source 1..411: mol_type = other DNA
atgaagaccctgcccctgttcgtgtgcatctgcgccctgagcgcctgtttctcgttcagtgaaggaagagagcgggaccatgagctgagacaccgcaggcatcaccatcagtctcccaaatcacatttcgaactgcctcactaccccggcctcttggcccaccagaaaccgttcatcaggaaatcatataagtgtctgcacaagcggtgtcgcccgaagctgcccccgtctcccaataacccgcccaaattccctaatcctcaccagcctccaaagcacccggataagaacagctccgtcgtcaatccaacgttagtcgccacgacacagataccgtctgtgacgttccccagcgccagcacaaagatcaccacattacccaacgtgacatttctcccacagaatgcttag

SEQ ID NO: 195745 - DNA, 1743 bp, synthetic construct
  misc_feature 1..1743: note = Description of Artificial Sequence: Synthetic coding sequence
  source 1..1743: mol_type = other DNA
atgaccgcccccgccggcccccggggcagcgagaccgagcggctgctgactccaaacccgggttatggcacacaggccggcccatctcccgccccacccacaccccctgaggaggaggacctccgccggaggttgaaatacttctttatgtcaccctgcgacaagtttagagccaagggacgcaaaccatgtaaactgatgctgcaagtagtgaaaatattagtcgtgacagtgcaactgatcctgtttggcctctccaaccagctggctgttacgtttagagaggagaataccatcgcctttaggcatttgttcctactcggctactcagatggtgctgatgacaccttcgccgcgtacaccagagaacagttataccaggcgatcttccacgctgtcgatcagtacctggccctcccggatgtttctctagggaggtacgcctacgtgaggggcggcggagacccttggacaaacggctcgggactggcgctgtgccagagatactatcatcgtggtcacgtcgaccccgcaaatgacacgttcgatatcgaccccatggtggtgactgactgcattcaggtagacccccccgagcgccctccccctcctccaagtgatgatctgaccttgctggaatcaagtagcagctacaagaacttaacccttaagtttcataaactcgtaaacgttacaatccattttcgtctaaagacaatcaatttgcagagtctgattaataatgagatccctgattgctacaccttttccgtccttattacattcgataacaaggcacattccggccgcataccgataagtcttgaaacacaagctcacatacaagaatgcaagcatccctcagtcttccagcacggggacaattctttccgacttctgtttgatgtggtagttattctgacgtgttccctgagtttcctattgtgtgctagaagccttctgcgggggttcctcctgcaaaacgaattcgtgggcttcatgtggagacaaaggggaagagtgatcagcctttgggagcggctcgagttcgtaaacggctggtacatcctcctggtgaccagcgacgtcctgacgattagcggcactataatgaagataggcatcgaagccaagaatttggctagctacgatgtttgtagtatcttgctgggcacctcgacccttctggtgtgggtgggggtgatacggtatctcacattcttccataactacaatattctcattgccaccctcagggtggctcttccatccgtcatgaggttctgctgctgcgtggcagtgatctacctcggctattgtttttgcgggtggatagtgctggggccgtaccatgtgaaattccgaagtctgagcatggtttcagaatgcctcttttcccttatcaatggggatgacatgttcgttacattcgccgcaatgcaggcgcagcagggtcggagttctctggtgtggttgttctcacaattatacctatacagctttatctcactcttcatttatatggtgctgtccctattcatcgccctgattacgggggcttacgacaccataaaacaccctggtggagcgggagcggaggaatctgagctacaagcatatatcgcccagtgccaggatagcccaactagtgggaaattccggcggggctctggcagcgcgtgcagcctcttatgctgctgcggaagagacccgagtgaggaacattctttgctcgtgaactag

SEQ ID NO: 195746 - DNA, 1638 bp, synthetic construct
  misc_feature 1..1638: note = Description of Artificial Sequence: Synthetic coding sequence
  source 1..1638: mol_type = other DNA
atgacccccagccagcccacccggggcagcagctgcacccggccctcatccatgctgtggacgagcacgtggcgttgcctgacctgccattgggcaggtatgcgcatgagcgtggtgggcgtaaccctcggcccgatggcccagggcctgctatctgcgtccgggacaactacggaggcaacatggactcgaccaaccacccatctcacattgattcggtggtggctactaacagcctctcgctggatcccacctagcggacccctccgcccacccgcgaccatctccccgagttggaaagcggctccagtgaccagaacatctagaagcaatagtacttcaaccgcctgctctctagaaggtggcccaggatggggaaggcagcatacacgacatagccatccgtctaattacttcccaaaggtgggaaccgggccaccccgccctcgttggtgcctcctgggagagcattttccgtgccagctccagtctcagcacgtggccggggacgccggtacatggggcaggaagggaccagaggatgcacctgaccctcacccctccttgctccccaggctagttaacgtcacaattcactttcgcttgaaaacaatcaatcttcagagtttgatcaataatgagataccagattgctacacatttagcgtgctgattaccttcgacaacaaagcccatagcgggcggatccccatcagcctggaaactcaggcccatattcaagagtgcaaacatccatcggtttttcaacatggggacaatagcttcagactccttttcgatgtggtagtaatcctgacctgtagcttatccttcctgctgtgcgcccgcagtctgctccgggggttcttgcttcaaaatgaattcgtcgggttcatgtggcgacagcgggggcgagtgattagcctgtgggaaaggctggagttcgtgaatggctggtacatacttctggtcacctctgatgtgctaactatttctggaaccatcatgaaaatcggaatcgaggctaagaatctggcatcatatgacgtgtgttctattctgttgggaacttcaacgctgctcgtctgggtgggggtgattcgttaccttacattcttccataattataatatcctgattgcaacgctgagggtcgctctgccctcggttatgagattctgctgttgcgtggcagtgatctatcttggatattgtttctgcgggtggatcgtcctcggcccttatcacgttaaattccgatccctatctatggtctctgagtgccttttctcccttatcaatggagacgatatgttcgtcaccttcgccgcgatgcaagcccagcagggtcggagctcactggtgtggttattcagccaactgtacttatactccttcatctccctctttatctatatggtgctgagcctattcattgccctcattactggcgcttatgatactattaaacaccctggcggcgcgggggccgaagagagtgagctgcaggcgtatattgcacaatgccaggacagcccaactagcgggaaatttaggcgcggcagcggctccgcttgttcactgttgtgctgttgtggtagagacccatccgaggagcacagcctgctcgtgaactag

SEQ ID NO: 195747 - DNA, 1701 bp, synthetic construct
  misc_feature 1..1701: note = Description of Artificial Sequence: Synthetic coding sequence
  source 1..1701: mol_type = other DNA
atggcccggcagccctaccggttcccccaggcccggatccccgagaggggaagcggcgtctttagactgacagtgcggaatgccatggctcacagagacagtgaaatgaaggaggaatgccttcgggaggacctgaagttctattttatgagcccttgcgagaaatacagagctcgcagacagattccatggaaactggggctccagatcttgaagatagttatggtgacaacccagctcgttcgcttcggcctaagtaaccaattggtcgtggcctttaaggaagataatacagtcgccttcaagcatctcttcctgaagggctattccggaacagatgaggatgattattcttgttctgtgtacactcaagaagacgcttatgaaagcattttcttcgctatcaaccagtaccaccagctgaaggatattacactgggcacgctgggctacggtgagaacgaagataacaggatcggcctcaaggtatgtaaacagcattataaaaaggggactatgttcccctctaatgaaaccttgaatattgataacgacgtggaactggattgcgtccaactcgacttgcaggatctcagtaaaaaacccccagactggaaaaactcatcatttttccggttagaattctaccgcctgctgcaggtagaaatctcttttcatctcaagggtatcgatctgcagaccatacacagtcgcgagctgcctgactgttacgtgtttcagaacaccatcatcttcgataataaggctcacagcggcaagatcaaaatttattttgactccgatgcaaaaatcgaggagtgcaaagacctcaacatctttggaagcactcagaagaacgcccagtatgtgctagtgttcgacgcgttcgtgatcgtcatatgtcttgcctctctgattctctgcacccggtccatcgtgctcgccctccgattacggaaaaggtttctgaacttcttcctcgagaaatacaaacggccagtttgcgacactgaccagtgggaatttatcaacggttggtacgtcctggtgattatatccgatctgatgacgataatcggtagcattctcaaaatggaaattaaggcgaagaacctgactaattacgatctatgctcgattttcctcggcacgagcacactgctggtctgggtgggtgtgattaggtaccttggttatttccaggcatacaatgtgctgatcttaactatgcaagccagtcttcccaaggtgcttaggttctgcgcttgtgctggcatgatctatttaggatacactttttgtggctggatcgttcttgggccgtatcacgacaagtttgaaaatctgaacaccgtggccgagtgtctcttctccctggtgaacggcgatgatatgtttgctacctttgcccagattcagcagaaaagcatccttgtgtggcttttttccagactatatctgtacagcttcataagcctgttcatctacatgattctttccctgtttatagccctcattacggacagctacgacaccatcaaaaaattccagcagaacgggttccctgagactgacctccaggagtttctgaaggaatgctcttctaaagaggaataccaaaaggagagcagcgcatttttgagctgtatctgctgcagacggaggaaacgctctgacgatcacctgatccctatctcctag

SEQ ID NO: 195748 - DNA, 1662 bp, synthetic construct
  misc_feature 1..1662: note = Description of Artificial Sequence: Synthetic coding sequence
  source 1..1662: mol_type = other DNA
atggccgaccccgaggtggtggtgagcagctgcagcagccacgaggaggaaaaccgctgcaatttcaaccagcaaaccagccctagcgaagaactcttgctggaagatcaaatgaggaggaaactgaaatttttcttcatgaacccgtgcgaaaaattttgggcgcgtggccgcaaaccatggaagttggcgatccagattctgaaaatcgcgatggtgaccattcagctggtcctctttggactgagtaaccagatggtggttgcttttaaagaagagaatactatcgcgtttaagcacctcttcctaaaaggttacatggacaggatggacgacacatatgctgtgtacactcagagcgacgtatacgatcagctgatctttgccgtgaatcagtacctccagctgtacaacgtgagtgtcggcaaccatgcttatgaaaataaaggcacaaaacagtccgcaatggccatctgccagcatttctataagcgggggaacatctatcccgggaatgacacctttgatattgaccccgagatcgagacagaatgtttctttgtcgagcctgacgaaccatttcacattggcacccctgccgaaaacaaacttaatctcacgttggatttccaccgtctgttgactgtggaacttcagtttaagctcaaagctattaatctacaaactgtacggcaccaagaactgccggattgttatgacttcacgctaacaattacttttgacaataaggcccatagcggcagaattaagatctctcttgacaacgatatttctatcagggaatgtaaagattggcacgtttccggatccattcagaagaatacccactacatgatgatcttcgacgcatttgttatcttaacctgcctcgtcagtctcattctttgtatcaggtccgtcatccgcggactgcagttgcagcaagaattcgtgaacttctttctgctgcactataagaaagaggtttcggtgagcgaccagatggagttcgttaacgggtggtatattatgattatcataagcgacattttaacaatcataggctccatcctgaaaatggagattcaggccaagtcactgacctcctatgatgtgtgttccatacttttggggacatccactatgcttgtttggcttggcgtaatcagatatttggggtttttcgccaagtataacctgctcatcctgaccctccaggctgccctgcctaacgttatacggttctgctgttgcgcagcgatgatttacttgggatactgcttttgtggctggattgtgctgggaccataccatgataaattcaggtcactgaacatggtgtccgaatgccttttctctctgattaatggtgatgacatgttcgcgacatttgcaaagatgcaacagaagtcttacctggtgtggctattctcgagaatctatctgtacagcttcatctcgctatttatttatatgatccttagtctatttatagcattaattacagacacttacgaaactatcaaacaataccagcaggatgggttccctgaaaccgagctgcgcacatttatttctgagtgtaaggacctccccaactctggtaagtatcggctggaagatgatccacctgtaagccttttttgttgctgtaagaagtag

SEQ ID NO: 195749 - DNA, 1494 bp, synthetic construct
  misc_feature 1..1494: note = Description of Artificial Sequence: Synthetic coding sequence
  source 1..1494: mol_type = other DNA
atggccgaccccgaggtggtggtgagcagctgcagcagccacgaggaggagaatcggtgcaactttaaccagcagacttctccctccgaagaattgctgctggaggaccagatgcggcggaagcttaagttttttttcatgaacccatgtgagaagttttgggctagaggaaggaagccatggaaactcgcaattcagattctcaaaatcgccatggtgacaatccagtatctgcagctgtataatgtatccgttggaaatcacgcctatgagaacaagggtaccaaacagagcgccatggcaatttgccagcatttttacaagcgcggtaacatctacccgggaaacgatacgtttgatatagaccccgaaatcgaaaccgagtgctttttcgtagaaccagatgagccctttcacataggcaccccggcggagaataagcttaatctcaccctggatttccacagattgttaacagtcgagctgcagttcaaactcaaggcaattaatctccaaaccgtacgccatcaagaactgccggactgctatgatttcacacttaccataacctttgacaacaaggcgcactccggcagaataaaaatatccctggataatgatatatccatcagggaatgcaaggactggcacgtcagcggatctatccagaagaacacccactatatgatgatctttgatgcatttgtcatcctcacttgcctcgtgagcctcatcctctgcattagatctgtcatcagaggccttcagctgcagcaggagtttgttaacttttttctgctgcattataaaaaggaagtatctgtgagcgatcagatggaatttgtgaacggttggtatattatgattatcatttctgatatactgacaatcattgggtctattctcaagatggagattcaggcaaaatcacttaccagctatgacgtgtgttccattctgttggggaccagcactatgctcgtgtggttgggggtcatcagatacttaggcttttttgcaaagtataatctgctgatcttgacgctgcaagctgccctgcctaacgtcattagattttgttgctgcgcagctatgatttacctcgggtactgtttctgcgggtggatcgtgctgggtccgtatcatgataagtttcgttctctgaacatggtgtcagagtgtctgtttagcctcatcaatggagacgacatgtttgccactttcgctaaaatgcagcagaaaagttacctggtgtggttgttctcccgcatatacctgtacagctttatttccctctttatctatatgatcctctccctgttcatcgctctgatcaccgacacatatgaaacaatcaagcagtatcaacaggatgggttccccgaaaccgagttgaggacgttcatatcagaatgcaaggacctaccaaactcaggtaagtaccgactggaggacgatccgccagtatccctgttttgctgctgcaaaaaatag

SEQ ID NO: 195750 - DNA, 966 bp, synthetic construct
  misc_feature 1..966: note = Description of Artificial Sequence: Synthetic coding sequence
  source 1..966: mol_type = other DNA
atggccgaccccgaggtggtggtgagcagctgcagcagccacgaggaggagaaccgctgcaacttcaatcagcagacctctccatctgaagaactacttctagaggatcagatgcggcggaagctgaaatttttcttcatgaacccttgtgaaaagttctgggccaggggccgtaagccgtggaaacttgcaatccagatacttaaaatagccatggtgaccattcaactcgtgctgttcgggctgtcaaatcaaatggttgttgctttcaaggaagagaatactatcgcattcaagcatctgtttctgaaagggtacatggacaggatggatgatacatacgctgtgtatacccagtctgatgtctatgaccaacttatcttcgcggtgaatcagtacctgcagttgtacaacgtaagtgtgggtaaccatgcttatgagaataaaggaaccaaacaaagtgccatggcaatttgccagcatttctacaagagaggaaacatatatcccggcaacgatacttttgacattgatccagaaatcgaaaccgagtgcttttttgtggagccggatgagcccttccacattgggacacccgccgaaaataaattaaatctgacattggacttccaccggctactgaccgtggagctgcaatttaagctcaaagcaatcaatttgcagaccgtaagacaccaggagttgcctgactgctacgacttcaccctgacaattaccttcgataacaaggcccactctggtagaattaagatctccctggataatgacatcagcatcagggaatgcaaagactggcacgtctccgggagtatccagaaaaatacccactatatgatgatattcgatgcattcgtcatcctcacctgcctagtaagtttgattctctgtataaggagcgtaattagaggactccagcttcaacaagtaggaaatgtcgcattttag

SEQ ID NO: 195751 - DNA, 1494 bp, synthetic construct
  misc_feature 1..1494: note = Description of Artificial Sequence: Synthetic coding sequence
  source 1..1494: mol_type = other DNA
atggccgaccccgaggtggtggtgagcagctgcagcagccacgaggaggagaaccgatgcaacttcaatcagcagacgtcaccttcagaggagctgctgctagaagatcagatgagacggaagttgaaatttttttttatgaatccctgcgaaaaattttgggcccgtgggagaaagccctggaagttagcaatccagatccttaaaatagctatggtgacaatccaatacctccagctctacaacgtgtctgtagggaaccacgcttacgaaaataagggtaccaaacagtcagccatggcaatctgccagcatttctacaagagaggcaacatttatcccggcaacgatacctttgacatcgaccccgaaatagaaaccgagtgctttttcgtcgaacctgacgagcccttccacatcggaactcccgccgagaataaactaaatttgactctggacttccaccgtctactgactgttgaactccagttcaaacttaaggctataaatctccagaccgtgagacaccaggaactaccggactgttacgactttacgctgaccataacattcgacaacaaagcacacagcgggaggattaaaatcagcctcgataatgatatcagtatccgtgagtgtaaggactggcacgtgtcgggcagcattcagaagaatactcattacatgatgatctttgacgcattcgtcattctgacctgcctggtaagcctaattttatgtatccggtcagttattcgaggcctccaactgcaacaggaatttgtgaacttctttcttctccactacaagaaagaagttagtgtttcagatcagatggagttcgtgaatggctggtatataatgattataatctctgacatcctgacaattatcggcagtatattgaagatggagatccaggcaaaatctcttacttcctacgatgtttgtagcatactgttgggcacttcgaccatgcttgtgtggctgggagtgattcgatacctgggattttttgctaaatacaatctgctcatcctgaccctgcaggcagccttaccgaatgtcatccggttttgttgttgcgctgctatgatctacctggggtactgcttctgtggctggatagtcctcggaccctatcacgacaaattcagatccctgaacatggtgagtgagtgcttgtttagcctgattaacggagacgatatgtttgctacattcgctaaaatgcagcagaaaagctacctagtgtggttgttctcacgaatctatctatactctttcatatcactatttatttatatgattctgtccctcttcattgcattgattaccgatacctatgaaactatcaaacagtatcagcaagacgggttcccagagacggagctgagaacatttatatcagagtgtaaggatctgcctaatagtggcaaatatcgtctggaggacgatccccccgtgagcctgttttgttgctgcaagaaatag

SEQ ID NO: 195752 - DNA, 1662 bp, synthetic construct
  misc_feature 1..1662: note = Description of Artificial Sequence: Synthetic coding sequence
  source 1..1662: mol_type = other DNA
atggccgaccccgaggtggtggtgagcagctgcagcagccacgaggaggagaacagatgcaactttaatcaacagacctcaccgagtgaggagcttctcctggaagatcaaatgagaaggaagttgaagttcttctttatgaacccttgcgaaaagttttgggcacgaggcagaaaaccctggaagcttgcaattcaaattctcaaaattgctatggtgaccatccagcttgtgttattcgggctgagtaaccagatggttgtggctttcaaggaggagaatactatcgcttttaaacacttgtttctgaaagggtatatggatagaatggatgacacctatgcagtctacacacagtctgacgtgtacgatcaattaatctttgcagtaaatcagtatcttcagttgtacaatgtgagcgtaggcaatcatgcttatgagaacaagggcaccaagcagtctgcaatggctatctgccagcatttctacaagaggggtaacatctatcccggcaatgatacattcgacatcgatccagagatcgagaccgaatgttttttcgttgaaccggacgaaccttttcatataggaaccccagccgagaacaaattgaatctcactttggacttccacagactgctgacagttgagctccagttcaagctaaaagctatcaatctccagacagtccgccaccaggaactgccagactgctacgactttacacttactatcacctttgacaataaggctcacagcggacgcattaaaatttccctcgacaacgatattagcatccgggaatgcaaagactggcatgtctcggggagtatccagaagaacacgcattatatgatgattttcgacgcattcgttatcctgacctgcctagtgtcactcatactttgcatccgatcagtcatccgggggctccagctccagcaggaattcgttaacttttttctactgcattataagaaggaagtaagtgtctctgaccagatggaattcgtcaacggttggtacataatgatcataatttctgatatccttacaatcatcggaagcatactgaaaatggagatccaggcaaagagcctcacgtcttacgatgtctgcagcatcttgcttgggaccagcacaatgctggtttggttgggcgtgatcaggtatctgggcttcttcgccaaatacaatctcctaatcctgacactgcaggcggctctgccaaatgtgatcagattttgctgctgcgccgcaatgatatatctgggatactgtttttgcggctggatagttttaggaccttaccatgataagttccggtcgctcaacatggtcagcgaatgcctgttcagcctgatcaatggagatgacatgtttgctactttcgccaagatgcagcagaaatcctatctcgtttggctgttttcacgtatctacttgtattcctttatttctctttttatctatatgattcttagtcttttcatcgcactgataaccgacacctatgaaacaatcaaacagtaccagcaggacgggttcccggagaccgagttgagaaccttcatctccgaatgtaaggacctccctaactcaggcaagtaccgccttgaggacgatccaccagtgtctctgttctgctgttgcaaaaagtag

SEQ ID NO: 195753 - DNA, 2442 bp, synthetic construct
  misc_feature 1..2442: note = Description of Artificial Sequence: Synthetic coding sequence
  source 1..2442: mol_type = other DNA
atgagcctgctgggcgaccccctgcaggccctgccccccagcgccgctccaaccgggccgctgttggccccaccagcaggcgcgacactgaaccggctccgggaacccctactccggagactcagcgagctgttggatcaggcccccgaagggagagggtggcgacgactggccgagctcgcaggctcacggggcagacttcgcttgtcatgtctggatctggaacagtgtagcctcaaagtgctggagcctgagggaagccccagcctttgcctgctcaagctgatgggagaaaagggatgcaccgtgactgaactgagtgacttccttcaagctatggaacatactgaggtgttacagcttttatctccgcctgggataaaaataacagtgaacccagagagtaaggctgtgctggccgggcagtttgtcaagctgtgctgtcgagcaacaggccacccttttgtccaataccagtggtttaagatgaataaagagatccccaacggaaacacaagtgaattgatttttaatgctgtgcacgttaaggacgccggattctacgtgtgcagggttaataataatttcacgttcgagttctcgcagtggagtcagctcgacgtatgcgacatcccggaatcgttccagaggtcagtggatggagttagcgagagtaagttgcagatatgtgtggagccaacatcacaaaagctcatgcctggatcaactttggtcttacagtgcgtcgccgtgggctcgccaattccacactatcaatggtttaaaaacgagttgccattgacccatgagacgaagaaactgtatatggtcccatacgtcgacctggagcatcaaggtacctactggtgccatgtgtacaacgatagagatagtcaagacagcaagaaagtggagataatcattgatgagctaaataacctgggccacccagacaataaggagcagacaacagaccagccgctggccaaggataaggtggccctgctgatcggaaatatgaattaccgcgaacatcccaagcttaaggccccacttgtagacgtgtatgaactaaccaaccttcttagacaacttgatttcaaggttgtttcactgttggatctgacagagtacgagatgagaaatgccgtagacgagttcttgctccttctcgacaaaggtgtatacggactcctttattatgcaggacacggttacgagaattttggtaacagctttatggtgccagttgacgctcctaatccgtatagaagcgagaactgtctatgtgttcagaatattctcaaacttatgcaagagaaggagaccggtctgaacgtgtttctcctggatatgtgccggaagcgaaatgactacgatgataccattcccattctggatgccctgaaagtgacagcaaacatcgtgtttggatatgcaacatgtcagggagccgaagcctttgagatccagcacagcggcctcgcaaacgggatcttcatgaaatttctgaaggatcggctactcgaagacaaaaagattacagttctacttgacgaggtggccgaggatatgggcaaatgtcatctgactaagggcaaacaggctctggagatacggtccagcttgagtgagaagcgagccctgaccgacccaattcaaggcacagaatactcagcagagtcattggtccggaatcttcaatgggctaaggcccacgagctcccagagagcatgtgcttgaaattcgactgtggcgttcagatccaactcggcttcgcagccgagttctccaatgtcatgatcatctatacatcaatcgtctataagcctccggagattattatgtgcgacgcctacgtgacagattttcccttggatctcgacatcgatcctaaggacgcaaacaaaggtactcctgaggagactggaagctacctggtttccaaagatttgccgaagcattgtctctacactaggctcagctccttgcaaaagctgaaagagcatttagtgtttactgtttgtctcagctaccagtatagcggactggaggacaccgtggaggacaaacaggaagttaacgtcggtaagccacttatcgccaaactggacatgcacaggggactcggccggaaaacctgtttccagacatgtctcatgtcaaacggcccttaccaatccagcgctgccacgtcagggggcgctggacactaccattcactacaggacccctttcatggggtgtatcacagtcaccccggcaacccctcaaacgtgacaccagcagacagttgccactgttccaggactcctgacgccttcatttcatcatttgcccaccatgcctcatgccacttctctcgcagcaacgtccccgtagaaactaccgacgagattccattttctttcagtgatcggctccgcatctccgagaagtag

SEQ ID NO: 195754 - DNA, 2475 bp, synthetic construct
  misc_feature 1..2475: note = Description of Artificial Sequence: Synthetic coding sequence
  source 1..2475: mol_type = other DNA
atgagcctgctgggcgaccccctgcaggccctgccccccagcgccgcaccgacaggccccctccttgctccccctgccggtgctaccctgaataggctgagggagccccttctcagaaggttgtcagagctgctggatcaagcccctgagggccgaggatggagaagacttgccgagctagccggaagtcgcggtcggcttcgtttgtcatgcttggacctggagcagtgctccctgaaggttcttgagcctgaagggagcccctccctctgcttgctgaagctcatgggtgaaaaggggtgcaccgttaccgagctgtccgactttctacaggccatggagcataccgaggtgctgcagctgctgagcccacccggaatcaagatcaccgtgaacccagagtcgaaagccgtgttagctggacaatttgtaaagctttgctgcagggcaaccggccacccgtttgtgcagtaccaatggtttaagatgaacaaggaaatcccaaatggtaacacatctgaattaatatttaacgcggtgcacgtgaaggatgctggcttttatgtgtgccgggtgaacaataactttacttttgagttcagccagtggtcacaactggatgtatgcgatataccagaaagtttccagagaagcgttgacggtgtgtctgaatctaaactccagatctgtgtggaaccaacatcacagaaactaatgccaggcagtactttggtgctacagtgcgtggctgtgggatcacccataccgcactatcaatggtttaagaatgagcttccactgacgcatgaaactaaaaaactgtacatggtgccctatgtggatctggagcaccaaggaacatactggtgccatgtctataacgatcgcgatagtcaggatagcaagaaggtggagatcatcataggccgcactgacgaagcagtggaatgcacggaagatgagctaaataacctcggacacccggataataaggaacagaccacagaccagcccttagcaaaggacaaagtggcattgcttatcggcaatatgaactaccgggaacaccctaagcttaaagcacccctggtcgacgtatacgagctgactaatctgctgagacaattagactttaaggtcgtgtcgttgcttgacctgacggagtacgagatgcgcaacgctgtagacgagtttctgcttctcctggacaagggggtgtatgggctgctctactatgcaggtcacggctatgaaaatttcgggaatagcttcatggtccctgtggatgcgcctaatccgtacaggtccgagaattgcttatgtgttcagaacattctgaaacttatgcaggagaaagagaccggcctcaatgtatttctgctcgatatgtgtcggaagcgaaatgattatgacgacactattcctatccttgacgccctcaaagtgaccgctaacattgttttcggttacgcaacgtgccagggagccgaggcctttgaaattcagcattcgggcctagccaacggaatcttcatgaagttcctgaaagaccgcctactcgaggataagaaaattacagtgctgctggacgaagtcgccgaagatatgggcaagtgccaccttacaaaggggaagcaggccttagagatccggagcagtctttcagagaagagggccctgaccgaccccatccaaggtacagaatacagcgccgagtctttagtcaggaacctgcaatgggccaaggcacacgagctgcctgagtccatgtgtttaaaatttgactgtggtgtccaaattcagttaggttttgctgcagagttttccaacgtcatgataatctatacctccatcgtttataaaccccctgagatcataatgtgcgacgcatatgtaacagacttccccctcgacctggacatagatccgaaagatgccaacaaagggactccagaggagacggggtcctacctggtgagtaaggacttacctaagcactgcctttacacaagactgagttctcttcagaaattgaaggagcacctcgttttcacggtgtgcctcagctatcagtatagcggactagaggacacagtggaagataaacaggaggtcaacgtgggcaagccgcttatcgccaagctggacatgcaccgaggcctgggacgaaagacgtgcttccagacatgtctcatgtctaatggcccataccagtctagcgccgcaacatccggaggcgcagggcattaccattctctccaggacccgttccacggcgtgtatcactctcatccggggaatccctcaaatgtgacacccgccgattcatgtcattgctccaggactccagatgcctttatcagttcttttgcccatcatgcctcatgccactttagtcggtcgaacgtgccagtggagacaactgacgagattccattctcgttctccgacaggctgcgaattagcgagaagtag

SEQ ID NO: 195755 - DNA, 441 bp, synthetic construct
  misc_feature 1..441: note = Description of Artificial Sequence: Synthetic coding sequence
  source 1..441: mol_type = other DNA
atgaccatgcggagcctgctgcggacccccttcctgtgcggcctgctctgggccttttgcgcccccggggcaagggcggaggagccagctgcctcatttagccagcctggttccatgggcctagacaagaacacagtacacgatcaagagcacatcatggaacaccttgaaggagtgatcaataaacccgaagcagagatgtccccccaggaacttcaactgcattatttcaagatgcatgattatgacggcaataatctgctggatggtctcgaacttagcactgctatcactcacgtgcataaggaggagggtagcgaacaagcaccactcatgtctgaagacgaattgataaatataattgacggggtactgcgagatgatgataagaacaacgatggttacatagattacgccgagtttgctaaatcattgcagtag

SEQ ID NO: 195756 - DNA, 441 bp, synthetic construct
  misc_feature 1..441: note = Description of Artificial Sequence: Synthetic coding sequence
  source 1..441: mol_type = other DNA
atgaccatgcggagcctgctgcggacccccttcctgtgcggcctgctctgggccttctgcgcacccggggcccgagccgaagagccagcagcctctttctcacaaccgggctctatggggcttgacaaaaataccgtgcacgaccaggagcatatcatggagcacttggagggcgtcattaataaaccagaagctgagatgagtcctcaggaacttcagctgcattactttaaaatgcacgactacgacggcaataatctgcttgatgggctggagcttagtactgccatcacacatgtgcacaaagaagaaggcagcgaacaggcccccctgatgtctgaagatgaactgatcaacattatagacggcgtgctacgcgacgatgacaaaaacaatgacggatatattgattacgccgaattcgccaaatctcttcaatag

SEQ ID NO: 195757 - DNA, 285 bp, synthetic construct
  misc_feature 1..285: note = Description of Artificial Sequence: Synthetic coding sequence
  source 1..285: mol_type = other DNA
atggagcacctggagggcgtgatcaacaagcccgaggccgagatgagtccccaagaattgcagttgcactatttcaagatgcacgactacgacggcaataacttgctcgacggattggaattaagcacagccattacccacgtgcacaaggaagaaggctctgaacaggcgcccctgatgtccgaagacgagctgattaacataatcgatggggttttgcgcgacgatgacaagaataacgacggttacattgactacgccgagttcgctaagagtttgcaatag

SEQ ID NO: 195758 - DNA, 441 bp, synthetic construct
  misc_feature 1..441: note = Description of Artificial Sequence: Synthetic coding sequence
  source 1..441: mol_type = other DNA
atgaccatgcggagcctgctgcggacccccttcctgtgcggcctgttgtgggctttttgtgcaccaggcgcccgggctgaagaaccagctgcttcattctcccagccaggatcaatgggcttggataaaaacaccgtgcatgaccaagaacatatcatggaacacctggagggtgtcataaataaacccgaggctgagatgtccccgcaggagttgcagctgcattactttaagatgcacgattatgacgggaataatttgctggacggacttgagctaagcactgctatcacgcacgtccataaagaggagggctccgagcaagcacccctcatgagcgaagacgagttaattaacataatcgatggtgttcttagggacgatgataagaacaacgatggatatatagactacgcagaattcgccaaatccctgcaatag

SEQ ID NO: 195759 - DNA, 441 bp, synthetic construct
  misc_feature 1..441: note = Description of Artificial Sequence: Synthetic coding sequence
  source 1..441: mol_type = other DNA
atgaccatgcggagcctgctgcggacccccttcctgtgcggcctgttgtgggccttctgcgcacccggagcccgcgcggaggagcccgccgctagcttctcacagccaggcagcatggggctcgataaaaacactgtgcacgaccaggagcacatcatggagcacttagagggcgttatcaataagccagaggctgagatgtcaccccaagagctacagttgcactactttaaaatgcatgactatgatggcaataacttactcgatggactcgagttgagcaccgccattacccatgtgcacaaagaagaaggtagcgaacaggctccgctcatgagcgaagacgagctcattaacataatcgatggcgtacttcgagacgacgacaagaataatgacgggtacatcgactacgccgagttcgcaaagtctcttcagtag

SEQ ID NO: 195760 - DNA, 285 bp, synthetic construct
  misc_feature 1..285: note = Description of Artificial Sequence: Synthetic coding sequence
  source 1..285: mol_type = other DNA
atggagcacctggagggcgtgatcaacaagcccgaggccgagatgtccccccaggagcttcagctccattatttcaagatgcatgactatgacggcaacaacctgttagacggcttagagctaagtactgcaatcacccatgtgcataaagaagagggatccgagcaagcgccactgatgagtgaagacgagttaatcaacatcattgatggtgtgttgcgcgatgacgacaagaacaacgacggatacattgattacgcggagtttgccaagtctctccaatag

SEQ ID NO: 195761 - DNA, 285 bp, synthetic construct
  misc_feature 1..285: note = Description of Artificial Sequence: Synthetic coding sequence
  source 1..285: mol_type = other DNA
atggagcacctggagggcgtgatcaacaagcccgaggccgagatgtctccacaggaacttcaactgcattactttaagatgcacgactacgatggaaacaatctgctcgacggtctggagctctctactgccatcactcatgtgcacaaggaggagggctctgaacaggccccattgatgagtgaggacgagctgattaatatcatcgacggggttttgagggacgacgacaagaacaacgatggatatatagattatgcagagttcgcaaagtcactgcaatag

SEQ ID NO: 195762 - DNA, 441 bp, synthetic construct
  misc_feature 1..441: note = Description of Artificial Sequence: Synthetic coding sequence
  source 1..441: mol_type = other DNA
atgaccatgcggagcctgctgcggacccccttcctgtgcggcctgttatgggctttttgtgcaccaggcgcacgggccgaggagcccgcagcaagcttttctcaaccaggatcaatgggcttggacaagaatacggtccacgatcaagaacatattatggagcatctggagggtgtgatcaacaagccagaagccgaaatgtctccccaggagctccagctccactactttaaaatgcatgactatgatgggaacaatctccttgacggtcttgaactgagcacagcaattactcatgtgcacaaggaggaagggtctgagcaggctccacttatgagcgaagatgagctgatcaatatcatcgacggcgtgctccgtgatgacgataaaaacaacgacggttacatcgattacgccgaattcgctaagagcctccagtag

SEQ ID NO: 195763 - DNA, 441 bp, synthetic construct
  misc_feature 1..441: note = Description of Artificial Sequence: Synthetic coding sequence
  source 1..441: mol_type = other DNA
atgaccatgcggagcctgctgcggacccccttcctgtgcggcctgctctgggcgttctgtgcgccaggggccagagccgaggagccagcagcaagcttttcgcagccaggatcgatgggcttagacaagaacactgtgcatgaccaagagcatatcatggaacacttagaaggggttatcaacaagccagaagctgagatgagccctcaggaactacaacttcactacttcaagatgcacgactacgacggcaacaacttactcgacggtttagagctaagcacagctatcacccatgtacacaaggaagagggctcagagcaggccccacttatgtcggaggacgaactgattaatataatcgacggcgtgctccgtgatgatgacaagaataatgacggctacattgattacgcggagttcgctaagtccctccagtag

SEQ ID NO: 195764 - DNA, 186 bp, synthetic construct
  misc_feature 1..186: note = Description of Artificial Sequence: Synthetic coding sequence
  source 1..186: mol_type = other DNA
atgaccatgcggagcctgctgcggacccccttcctgtgcggcctgctgtgggccttttgtgccccaggcgcacgggccgaggagcccgccgcatcattttcacagcccggctctatgggactcgacaaaaacacagtgcacgaccaggagcatattatggagcacctcgaaggggtgattaactag

SEQ ID NO: 195765 - DNA, 384 bp, synthetic construct
  misc_feature 1..384: note = Description of Artificial Sequence: Synthetic coding sequence
  source 1..384: mol_type = other DNA
atgctgagcgtgtgcagctgccggaccagcagcggcatgcggagccagtggccttccgcgcgtcagcggagcagttcgctgtctacgttcagacatataatggaacacctggaaggcgttatcaataagccagaggcagagatgagcccccaagagctgcaactgcactacttcaaaatgcacgactacgatggcaataacctccttgacggactcgaacttagcaccgccatcactcacgtacacaaagaggaagggagtgaacaggcaccactgatgtcggaggacgaactcatcaacatcatcgacggagtgctacgagatgacgacaagaacaacgacggttacatagattatgcggaatttgcaaaaagtctccagtag

SEQ ID NO: 195766 - DNA, 3423 bp, synthetic construct
  misc_feature 1..3423: note = Description of Artificial Sequence: Synthetic coding sequence
  source 1..3423: mol_type = other DNA
atggtgatcagcctgaacagctgcctgagcttcatctgcctgctgctctgtcattggataggcacggcatcacctctcaatctagaggatccgaatgtgtgttcccactgggaaagttattctgttacagttcaggagtcgtacccgcaccccttcgaccagatttactacacaagttgtacagatatcctgaactggttcaagtgcaccagacaccgggtctcttatagaaccgcctatcgacatggagaaaaaacgatgtatagacgcaaaagtcaatgctgtcccggcttctatgagagtggagagatgtgcgtcccacattgtgctgacaaatgtgtccacgggaggtgcattgcaccaaatacatgccaatgcgagcccggatggggcgggaccaactgcagttccgcttgtgacggggatcactggggcccgcactgtacctcaagatgtcaatgtaagaacggcgcactgtgcaacccgatcactggagcctgccactgtgccgcggggtttagaggatggcgctgcgaggacagatgcgaacaggggacatacggtaatgattgtcaccagagatgccagtgccagaatggtgccacatgtgatcatgtgactggtgaatgtcggtgcccacctggatataccggtgcgttttgtgaggatctctgtcccccaggtaaacacggtcctcagtgcgaacagcggtgtccttgtcaaaatggcggggtctgtcaccacgtcacaggcgagtgttcctgcccttccggctggatggggacagtgtgcggccagccttgtcctgaaggcagatttggcaaaaactgtagccaggaatgccagtgtcacaacgggggcacctgcgacgcagctactgggcagtgccactgtagtccagggtacactggcgagcgatgccaggatgaatgtcccgtgggcacatatggtgtactgtgcgccgagacttgccagtgcgttaacgggggcaagtgttaccatgtgagtggcgcctgtctatgcgaagcagggttcgctggtgaacgatgtgaggcaagactgtgtcccgagggcctgtacgggatcaagtgcgacaagcgttgtccctgtcatctggagaacacacatagttgccaccctatgagtggagaatgcgcgtgcaagccaggttggtctggcctgtattgcaacgagacttgttcccccggattctatggcgaggcctgtcaacagatctgtagctgccagaatggcgctgattgtgacagcgtgaccggaaagtgtacttgtgcacctggtttcaaaggcattgattgttccacaccatgtcctctgggcacctatggaatcaattgttcatctcgctgtgggtgcaaaaacgatgcggtctgctcacctgtggacggctcttgtacatgtaaggctggctggcatggcgtggattgtagtatccgctgccctagcggtacctggggatttgggtgtaatttaacatgtcagtgccttaacggtggagcttgcaataccttggatggtacttgcacctgcgcccccgggtggcgaggagagaaatgcgagctgccgtgccaggacggtacatacggattgaactgtgccgagagatgtgattgttcacacgccgatggctgtcaccccacaactggtcactgtcgatgtctccccggttggtccggcgtccattgcgacagcgtctgcgctgagggcaggtggggacctaattgttcactgccttgctattgtaagaacggcgcgtcttgctcacccgatgatggcatttgcgaatgtgctcctggattccgaggcacaacgtgccagcgcatttgctctcctgggttttatggacacaggtgtagccagacatgcccccagtgtgtccactcgtcaggaccctgtcatcacatcacaggcctgtgcgattgtctgccagggttcaccggtgctctgtgcaatgaggtatgcccaagcggcagattcggcaagaattgcgccggtatctgtacctgtacgaacaatggcacctgcaaccccattgatcgctcatgtcagtgctaccccggctggatcggcagcgactgttcacagccatgtccccccgcacattggggcccaaactgcattcacacttgcaattgtcacaacggcgcattttgtagcgcttatgatggcgagtgcaaatgcaccccagggtggaccggcctctactgtacacaaaggtgtccactgggtttctatgggaaggattgcgcgctgatctgtcaatgccagaatggtgcagattgcgaccacatttccgggcagtgcacgtgtcggactggtttcatgggacggcactgcgagcaaaaatgtccttccggcacatatggatatggctgcagacagatttgtgactgcttgaacaactccacatgtgaccacatcacggggacatgctactgtagcccagggtggaagggcgcccgttgcgatcaggctggcgttatcatcgtgggcaacctgaatagcctgtctcgtacttctactgcccttcccgcggacagctaccagataggagctatcgcaggcatcatcatccttgtcctggttgtgctgtttctattggcactctttattatctatcgacataaacaaaaaggaaaagagagttcaatgccagcagttacctacacccccgcaatgagggtggttaacgctgattacaccatatccggcactctcccacactcgaacggagggaacgcgaactcacactattttaccaatccctcttaccacacactgactcagtgcgccaccagccctcatgtgaacaatagggaccggatgaccgtgacaaagtccaaaaataaccagttgtttgtcaacttgaaaaacgtgaaccctggtaaacgtgggcctgtcggggactgcactggaactcttccagctgactggaagcacgggggctacctgaatgaactgggagcgttcggcttagatcggtcgtacatgggtaaatccctgaaggatctcggaaaaaactcagagtacaactcaagcaactgtagtctgtcctcaagtgaaaacccgtacgctaccattaaggatccaccagtgctcatccctaagtcatctgaatgtggctacgtggaaatgaagtcaccagccagacgggattctccttatgcagaaattaacaatagcacgtcagccaatagaaatgtgtacgaggttgagcctacagtttcagttgtgcagggtgtcttttctaataacggacgactgagccaggatccatatgatcttccaaaaaactcccatattccttgtcattacgatctgttgcctgtgcgggacagttcctcatcgcctaagcaagaggactctggaggatcgtcctccaatagttcttcttcctcagaatag

SEQ ID NO: 195767 - DNA, 1704 bp, synthetic construct
  misc_feature 1..1704: note = Description of Artificial Sequence: Synthetic coding sequence
  source 1..1704: mol_type = other DNA
atggtgatcagcctgaacagctgcctgagcttcatctgcctgctgctgtgccactggatcggtacggcttcccccctgaacctggaggatccaaacgtgtgttcccactgggagtcctacagcgtgacagttcaagagagttaccctcacccatttgaccagatttattatacatcttgcacagacattctaaactggttcaaatgcacccggcatcgggtgtcatacagaaccgcctatcggcatggcgaaaaaactatgtacaggcggaaatcccagtgttgtccgggattttatgaatctggagaaatgtgcgtaccccactgtgcggacaaatgcgtacacggtaggtgcattgcaccgaatacatgccagtgtgaacccgggtgggggggtactaactgtagtagtgcttgtgatggagaccattggggtccccactgcacctcaagatgtcagtgcaagaacggggcgctttgcaaccccataactggagcctgtcactgcgctgcagggttcagaggttggcgctgtgaggacaggtgcgaacaaggaacctacggtaatgactgtcaccagcggtgtcagtgccagaacggcgccacgtgtgatcatgttaccggggaatgtcgatgtccgcctggttatacaggagcgttctgcgaagacctgtgccccccagggaagcacggacctcagtgcgaacaacggtgtccttgccagaacgggggcgtgtgccatcatgtgacaggtgaatgcagttgtcctagcgggtggatgggcactgtctgcggccagccttgccctgaagggcgcttcgggaagaattgctctcaggaatgtcagtgccataatggtggtacttgtgatgccgctacaggtcagtgtcactgcagcccagggtacacaggtgaaagatgtcaggacgaatgtccagtgggcacctacggagttctgtgcgccgagacttgccagtgtgtgaacggagggaagtgttaccacgtgtcaggcgcctgcctttgcgaagccggcttcgctggagagaggtgtgaggcaagactgtgcccggaaggcctgtacggtattaagtgcgacaaacggtgcccttgtcatttagagaatacccattcttgtcacccaatgtctggagagtgcgcctgcaagcccggctggtcggggctctactgtaatgaaacctgttctcccggtttctacggagaggcttgtcagcagatctgctcatgtcagaacggggccgattgcgacagcgttaccggcaagtgcacctgtgctccaggtttcaagggtatcgactgctctaccccctgtcctctgggcacttacggcatcaattgcagctccagatgtgggtgcaaaaacgacgctgtgtgcagcccagttgatggtagctgcacgtgtaaggccggatggcatggcgttgactgtagcattaggtgcccaagcggtacttggggtttcggttgtaatctgacgtgtcagtgcctgaatgggggtgcctgcaacactcttgacggcacctgcacatgtgcacctggctggcgaggggagaagtgcgaactgccgtgtcaggatggtacttatgggttaaattgcgctgagcggtgtgattgcagtcatgcagatggatgccatccaaccaccgggcactgccgctgcctgccaggctggtctggtctgttttag

SEQ ID NO: 195768 - DNA, 3423 bp, synthetic construct
  misc_feature 1..3423: note = Description of Artificial Sequence: Synthetic coding sequence
  source 1..3423: mol_type = other DNA
atggtgatcagcctgaacagctgcctgagcttcatctgcctgctgttatgtcactggatcggcaccgcttctcctctcaatctggaggatccaaatgtatgcagccactgggaatcgtatagcgtaacagtgcaggagtcctacccgcatccgttcgaccaaatttattacacatcatgtaccgacatcctgaactggtttaaatgcacccggcaccgtgtctcctaccgaaccgcttatcggcacggtgagaaaaccatgtatagacgtaagtcccaatgttgccccggtttctatgagtctggcgagatgtgtgtaccacactgtgccgacaaatgtgtccacggaaggtgcatcgcccccaacacttgccaatgtgaacctggctggggcggcaccaactgttcatccgcgtgtgatggagatcattggggtcctcactgtacatctcgctgccagtgcaagaatggcgcactgtgcaaccccataacaggagcttgtcattgcgccgcgggattccgcggttggcggtgcgaagataggtgtgaacaagggacgtatgggaacgactgccaccaaagatgccagtgccagaatggtgcaacgtgcgaccatgtgacaggcgagtgtagatgtccccctggttacacgggcgcattttgcgaagacctgtgcccccctggcaaacacggacctcagtgcgagcaaagatgtccatgtcagaacggcggtgtatgccatcacgtgactggggagtgtagctgtccctccggatggatggggacagtgtgtgggcagccctgtcctgaagggagattcggtaagaattgtagccaggagtgccaatgccataacgggggaacatgtgatgcggcaactggacaatgtcactgttctcccgggtatactggcgagcgctgccaggacgaatgccccgtgggtacttacggcgtgctgtgtgccgagacctgccagtgcgttaatggaggtaagtgttaccacgtgagtggggcctgcctctgcgaagccgggttcgccggcgagaggtgtgaagctagactgtgccctgaggggctgtatgggataaaatgtgataagaggtgcccttgtcacttggaaaatacacactcatgccatcctatgtccggcgagtgtgcttgtaaacccggatggagcgggctgtactgcaacgagacatgttcacccggcttctatggcgaggcgtgccagcagatctgttcatgccagaacggggccgactgcgattccgtgactggcaagtgtacttgtgcccctggtttcaaaggaatagattgctcgactccctgtcctctagggacctacgggattaattgctcatcaagatgcggttgcaagaacgatgcagtttgctctcctgtcgacggatcctgcacctgtaaggcaggatggcacggggtggactgctccattcggtgcccaagtggtacgtggggttttggctgtaacctgacatgccagtgtctaaacggaggagcatgtaacactctggatggcacttgcacatgtgcccctgggtggagaggagaaaagtgcgagttgccttgccaagatggaacctatggccttaactgtgccgaaagatgtgattgtagccacgcagacggctgccatcccaccacggggcactgcagatgcctgccaggctggagtggagtgcactgcgacagcgtctgtgccgagggccgctggggcccgaattgttctttaccatgctactgtaagaacggggctagttgcagtcccgacgacggcatatgcgagtgcgctcctggcttccgcggtaccacttgccagcgcatctgtagtccggggttttatggccatcgctgcagtcagacctgtccccaatgcgtgcattcatctggaccctgtcatcacataacaggcctctgcgactgcctgcctggtttcaccggagcgctgtgcaatgaggtttgcccctcaggcagattcgggaaaaattgtgctggaatctgtacatgcaccaataacggcacttgtaatcccattgatagatcttgccagtgctatcctgggtggatcggtagtgactgcagccaaccctgtccccctgcccactggggccctaattgcatacatacttgtaattgtcacaacggggccttttgctccgcgtatgacggtgagtgtaaatgcacccctgggtggacaggcttgtactgcacccaaagatgcccactggggttttatgggaaagattgtgcgcttatctgccagtgccagaatggggccgattgcgatcatatcagtggtcaatgtacatgtagaactgggtttatgggtcggcactgtgagcaaaagtgtccttctggaacatacgggtatggctgcagacagatctgtgattgcttgaataactcaacttgcgaccacataacagggacatgctactgttctcccggctggaaaggggctaggtgcgaccaggcaggtgtaattatcgttggtaatttaaactctttgagccggacgagtaccgccctgccggcggattcctaccaaataggagcgattgctgggattatcatactggttcttgtggtgttattcctgctcgctctgtttattatctacaggcataagcaaaagggcaaggaatcttccatgccagcagtgacttacacccccgcaatgcgggtggtgaatgctgactataccatcagtggcactctgccacactccaacggaggtaatgctaatagccattacttcactaatccgtcctaccatacgctgacgcagtgtgccactagccctcacgtgaacaatagagacaggatgacagttaccaagtctaaaaacaatcagctcttcgtgaacctaaagaacgtgaacccaggaaaacggggccccgtgggggattgcacaggcaccctccctgccgactggaagcatggagggtacctcaatgaactgggggccttcggactggacagatcctacatggggaaatctcttaaggacctgggtaagaactcggagtacaattcatcaaactgtagtctctcaagtagcgaaaacccatatgccacaattaaagaccctccagtcttgattcctaagtcatccgaatgcgggtatgtggaaatgaaaagtcccgcacggcgggattctccctatgcggagatcaataattctacctctgccaatcggaatgtctatgaggtcgaaccaacagtgtccgtggtgcagggggtgttttccaataacggcaggctatcccaggacccatacgatctgcccaaaaattcccacataccctgccactacgatctgctgcccgtgagagattcaagtagctcgccaaagcaggaagacagcggaggctcttcaagcaatagctcctcatctagtgagtag

SEQ ID NO: 195769 - DNA, 2910 bp, synthetic construct
  misc_feature 1..2910: note = Description of Artificial Sequence: Synthetic coding sequence
  source 1..2910: mol_type = other DNA
atgcacacccccagcatccggagcatcacccacgacgcccagacctctagcacgggctcctcagcgcctggcaccgctctgtgcacagaagagtgcgtgcacggtaggtgcgtttccccagatacctgtcattgcgagcccggatggggcggccctgattgcagctctggctgtgactcggaccactgggggccccactgctcaaatcggtgtcaatgccagaacggggcattatgcaatccaatcacaggtgcatgcgtgtgtgctgcaggatttcgaggttggcgatgcgaagagctgtgcgcacccggtacccatgggaagggttgccagctgccctgtcagtgcaggcatggggctagttgcgaccccagggccggcgaatgtttgtgcgcacctggatacactggtgtctactgcgaagagctgtgtccgcccggtagccacggagctcactgtgagctgaggtgcccatgccagaacggtggaacctgccaccatattacaggggagtgcgcctgcccaccaggatggactggggcagtgtgtgcacagccatgcccccccggaactttcggtcagaactgtagtcaggactgtccgtgtcaccatggtggccaatgcgatcatgtgaccggtcagtgccactgcaccgccggctacatgggcgatcgatgtcaggaagagtgccccttcggaagcttcggctttcagtgttcacagcattgcgattgccacaacggcgggcagtgtagccctactactggtgcgtgcgaatgcgaaccgggatacaagggaccgaggtgccaagaacggctgtgccctgagggcctccacgggccaggatgtactctgccgtgcccatgtgatgccgataataccattagctgccaccccgtcaccggcgcatgtacatgccagcctggatggagtggacatcattgtaacgaaagttgcccagttgggtactacggggatggttgccagcttccttgtacatgtcagaacggggccgactgccacagtatcacgggcggttgtacgtgcgccccaggatttatgggtgaggtatgcgccgttagctgtgctgccgggacttacggtccaaactgctctagcatttgctcgtgtaacaatgggggcacatgcagccccgtggacggctcatgtacatgcaaagaggggtggcagggcctagattgtacactgccctgcccaagtggaacatgggggttaaattgcaacgaatcctgcacatgtgccaatggcgccgcttgtagccccatcgacgggtcatgctcatgcacacctggctggctgggagatacatgcgagttgccctgtccggacgggacttttggacttaattgctctgagcactgtgattgttcgcatgccgacgggtgtgaccctgtaaccggccattgttgctgcttagccggctggacaggcatacgctgtgactcgacatgcccaccaggccgctggggaccaaattgcagcgtaagttgttcttgtgaaaatggtggctcttgctccccagaggacggctcctgcgaatgtgctccggggtttcgggggccactttgtcaacgaatttgcccccccgggttttatggtcacggttgcgcccagccttgcccgctctgcgtccattcatcccggccgtgccaccatatttcagggatctgcgagtgcttacctggcttttctggagcattgtgcaaccaagtatgtgccggggggtatttcggccaggactgtgctcagctttgctcatgtgcgaacaatgggacatgctcaccaatagatgggagttgccagtgcttcccagggtggattggaaaggactgtagtcaggcctgtcctcccggcttctgggggccagcctgttttcacgcctgctcctgccataacggtgcatcatgctcagccgaagacggagcatgtcattgcactcccggatggaccgggttgttctgcacccaacgttgccccgctgccttttttggtaaagactgcggccgggtgtgccagtgccagaacggcgccagctgtgatcacatttccggcaaatgcacatgtaggacgggttttactgggcagcactgcgagcaaagatgtgcgcccgggaccttcggatacgggtgccagcagctttgcgagtgcatgaacaactctacatgcgaccatgtgaccgggacttgctactgctcgccaggctttaaaggcattcggtgcgatcaggctgcactgatgatggaggagctgaatccttataccaagatctcacctgcacttggtgccgaaagacattcagtgggggcagtcacgggaatcatgttactgctgtttttgatagtggttttactgggcttattcgcatggcatcggcgccggcagaaggagaaagggagagacctggctccgagggtctcctacacacctgctatgcggatgacctctactgattactcactttctggtgcctgcggtatggataggcggcaaaacacctatatcatggataaagggttcaaagactacatgaaggaaagcgtctgctctagtagtacctgctctctgaacagttctgagaatccctacgctactatcaaggatccaccgattctgacgtgtaaacttcccgaatcctcttatgttgagatgaaatcacctgtacacatggggagcccatatacagatgtaccatctctgagcacctctaataagaacatatacgaggtggagccaaccgtctcggtggttcaggagggctgcggccataattcttcctacatccagaatgcctacgacttgcctcgcaactcccacatcccaggtcattatgacctgctcccggttagacaatctccagctaatggaccaagccaggacaagcaatcatag

SEQ ID NO: 195770 - DNA, 2628 bp, synthetic construct
  misc_feature 1..2628: note = Description of Artificial Sequence: Synthetic coding sequence
  source 1..2628: mol_type = other DNA
atggtgctgagcctgaccggcctgatcgccttcagcttcctgcaggcgaccctcgcccttaaccccgaggatcccaatgtctgttctcactgggaatcttatgcagtgaccgtccaggaatcatacgcacatcctttcgatcagatctactatacacgatgcaccgacattctgaattggtttaagtgtacccggcaccgcatctcgtataaaaccgcttacagacgaggattgcggaccatgtatcggcggcgctcacagtgctgccctgggtactacgagagtggcgacttttgcatacccctgtgcactgaagagtgtgtgcacggcaggtgtgtcagccccgacacttgccattgcgagccaggatggggagggcccgactgttcctccggttgcgatagtgatcactgggggccccactgctccaatcggtgccagtgccaaaatggagcactgtgtaatcctattaccggcgcttgtgtttgcgctgcgggatttcgagggtggcggtgtgaggaactgtgtgcccctggtactcacgggaaaggctgtcaactgccttgtcaatgtaggcacggcgccagctgtgaccctagggctggggagtgtctttgcgctcccggttataccggggtatactgcgaggaactgtgccccccaggcagccacggggcccactgcgaattgcggtgcccctgccagaacggcgggacctgccaccacattacaggcgagtgcgcctgtccccctggatggactggcgcggtctgtgcccaaccttgcccccctgggactttcggacagaactgttcccaggactgtccttgtcaccacggtggacaatgcgatcacgtgactgggcagtgtcactgtaccgccgggtacatgggcgaccgctgccaggaggagtgccccttcggaagttttggctttcagtgctctcagcactgtgattgccataatggcggtcaatgcagcccaactaccggtgcctgtgagtgtgaaccgggatacaaaggtccaaggtgccaagaaaggctctgcccggagggcttacatgggccaggttgcacgctcccctgtccttgtgatgcagataacactatctcctgccacccggtcactggcgcttgtacgtgccagccaggctggtcaggacaccactgcaacgaatcctgtcctgttggatactatggcgacggctgtcagctaccatgcacctgccagaacggcgccgactgccactctatcactggaggctgtacttgcgcccctggcttcatgggcgaagtctgcgctgtttcctgcgccgccggaacttatggtcccaactgtagcagtatttgctcttgtaacaatgggggaacatgttcgcccgtcgacgggagctgcacctgcaaggagggatggcaggggctcgattgcacactcccctgcccttccgggacatgggggttgaactgcaatgaatcctgcacctgtgccaacggtgccgcttgttcccctatagacggaagttgttcttgcactccgggctggctgggggatacgtgtgaactgccatgtcctgacggaacttttggccttaattgcagtgaacattgcgactgttctcacgccgatggctgcgatcccgtgacaggccactgctgttgtctggcaggttggactgggattcggtgcgactccacttgccccccagggagatggggtcccaattgctctgtcagttgctcttgcgagaacggagggtcgtgttctccggaggacggtagttgcgagtgtgcaccggggttcagaggtcctttatgtcagcggatatgcccgcccggattctacggacacgggtgtgcacagccatgtcctttgtgcgtgcactcttctaggccctgtcaccacatttccggtatctgcgaatgcttacctggttttagcggtgcactgtgtaaccaggtttgcgccgggggctacttcgggcaagattgcgctcagctgtgtagttgtgctaataacggcacttgcagtcccatagacggcagttgtcagtgctttcccggctggattggcaaggattgcagtcaagcctgtcccccagggttttggggcccggcctgttttcacgcgtgtagctgccacaacggtgcctcatgctctgcagaggacggagcttgccactgcaccccaggctggacaggactgttttgcacccaaaggaagccccacctgctcgctagccagcctctgcgaatcccttgttgcgggctccttgccactgtcggcattgttcagacatcgagagaaggtgggatgcaggcagccccagggctagtcgtgcccgattcatgtcccacaaggacagaggagctttgcaggggatctagccggcctgattggattcaggggatagataagccaaaggtcttagagggtcagggctgcaaggctgcacagcagcacttcctcgggagaaccgtgggcgcttacgcgagtgttcggatggcccccgcggtaacgacatcagtcgcctccgcccctgcggctcaggcttccccaggtaacaccgtgagccgtgatgttccccaagagcccctggccatgggcgtgtctagctacgtcagcgcctag

SEQ ID NO: 195771 - DNA, 414 bp, synthetic construct
  misc_feature 1..414: note = Description of Artificial Sequence: Synthetic coding sequence
  source 1..414: mol_type = other DNA
atgatggaggagctgaacccctacaccaagatcagccccgccctgggtgcagagaggcactcagtgggggctgtaaccggaataatgcttttgctgttcctaatcgttgtattgctcggtttgttcgcctggcaccgtcggcgtcagaaggagaaaggcagagatctggcccccagagtatcttatactcccgccatgcgcatgacatctactgactacagccttagcgctagcactaccccatggtggccggtcatggagcacctcgctcggcccttctcccagagaccccgcacacagctctccaacaagtcactggaccgagacactgccggatggaccccgtactcatacgtgaacgtcctcgatcaatgtccggggggtcaggtgccggcacgtggccttctgcactag

SEQ ID NO: 195772 - DNA, 2910 bp, synthetic construct
  misc_feature 1..2910: note = Description of Artificial Sequence: Synthetic coding sequence
  source 1..2910: mol_type = other DNA
atgcacacccccagcatccggagcatcacccacgacgcccagaccagtagtacaggctcctctgcacctggaactgccctatgcacggaagagtgcgtacacggcagatgcgtatcacccgatacatgtcattgcgaaccgggctggggggggccggactgttcctccggttgtgatagtgaccactggggtccacattgctcaaaccggtgccagtgccagaacggagcactgtgcaaccctatcactggggcttgtgtatgcgcagctggtttccggggctggcgatgcgaggagctgtgcgctcccggaacacacggcaaagggtgccagctgccttgtcagtgcagacatggggcctcttgtgacccaagggccggcgagtgcctgtgcgccccaggctatacaggcgtatactgcgaggaactttgccctccggggagccacggtgctcactgcgagctgcgctgcccatgccagaacgggggaacatgtcaccacattactggtgagtgtgcttgcccaccgggctggacaggtgcggtttgtgcacagccatgcccccccggcaccttcggacagaactgtagtcaagactgcccatgccaccatggcggacagtgtgatcacgtgaccggacagtgccactgtacggctgggtatatgggtgatcgctgccaagaggagtgcccatttggatcgtttggcttccagtgttcacaacactgtgactgccataacggaggacagtgtagtcctacaaccggcgcatgtgaatgtgaaccaggatataaaggtcctagatgtcaggagagactttgtccggaagggctccacggcccaggctgtacactgccttgtccctgcgacgctgacaataccatttcctgccatcctgtcactggcgcctgtacctgtcagcccggatggtctggccaccattgcaacgagtcatgtcctgtgggttattacggtgacggttgccaactgccttgcacttgccagaatggtgcagattgccattcaataacgggaggatgtacgtgcgcccctggattcatgggagaggtgtgtgcagtttcttgcgctgccgggacgtatgggccaaattgttcttctatctgttcatgcaataatggcgggacttgctcaccagttgacggcagctgtacgtgcaaggagggatggcaaggactggattgcactcttccctgcccgtccggcacgtggggactcaattgtaacgagtcatgcacctgcgctaatggagcggcatgcagtccaatagatggttcctgcagctgtacacctggatggttaggagatacatgtgaattaccatgtccggacggcacttttgggctgaattgttccgaacattgtgactgtagccacgcagatgggtgcgaccccgtgacagggcattgttgctgtctcgctgggtggacagggattcgctgtgactcaacctgtcctcctgggcgctggggacccaactgtagcgtcagctgttcgtgtgaaaatggtggttcctgcagccctgaagatggctcctgcgagtgcgccccaggattccgtggtcccttatgtcaacgaatctgcccacctggattctatggccatggctgcgctcagccatgccctctctgcgtgcactcctctcggccttgtcaccacattagcggcatctgcgaatgtcttcccgggttcagcggcgcactgtgcaatcaggtctgcgcaggcggttacttcgggcaggactgcgcccagctttgctcctgcgcaaacaatggcacctgctcacctatcgatgggtcctgccaatgcttcccaggctggatcgggaaggattgctctcaggcctgtccaccaggattctggggcccagcctgtttccatgcgtgcagttgtcataacggagccagctgctctgctgaggatggagcttgtcactgtactcccggatggactggactgttttgcacgcagcgttgcccggcagccttttttggaaaggactgcgggcgcgtatgtcagtgccagaatggagccagctgcgatcacatctccggcaagtgtacttgcagaactggtttcacaggccagcattgcgagcagaggtgcgccccaggtaccttcggatacggctgccaacagctgtgtgagtgtatgaacaattcaacctgcgatcacgtgactggcacctgttactgctctcctgggtttaagggcattagatgtgaccaggcagccctgatgatggaagaactgaacccatacacaaaaatcagccccgccttgggcgccgaacggcactccgtgggggccgtgacaggcattatgctactgttattcctgatcgtggtgctgcttggcctgttcgcctggcatcgacggaggcaaaaggagaagggtagggatctagcaccacgcgtaagctatactcccgctatgcgcatgactagcaccgactactctctcagtggcgcctgcggaatggatcgacgtcagaatacttatatcatggacaaggggtttaaggattatatgaaagagtcagtgtgtagcagctcaacttgcagcctcaattcctcggagaatccatacgccactattaaggaccctccaattctcacctgtaagctgccggaaagttcttatgtagagatgaaatccccagtgcacatggggtctccctacacggatgttccctctttatccacgtccaacaagaatatatatgaagtggagcctacagtgtctgtggtacaagaaggttgcggccacaatagcagctacatccagaacgcttatgatctgcctagaaattcccatatccctggtcattatgatctgctgcctgtacggcagagccccgcaaacggaccgtcccaggacaagcagtcgtag

SEQ ID NO: 195773 - DNA, 3135 bp, synthetic construct
  misc_feature 1..3135: note = Description of Artificial Sequence: Synthetic coding sequence
  source 1..3135: mol_type = other DNA
atggtgctgagcctgaccggcctgatcgccttcagcttcctgcaggcaacactggctcttaacccagaggaccccaatgtgtgctcacattgggaaagctatgccgtgacagtgcaggagagctacgcacacccatttgaccagatatattatacaagatgtaccgatatcctcaactggttcaaatgcactcgccatagaatcagctataaaaccgcctataggcggggcctgagaaccatgtataggcgacgaagtcagtgttgcccaggctattacgaaagcggcgatttctgtataccactgtgtaccgaggaatgtgtccatggccgctgcgtcagcccagacacgtgtcattgtgagcccggttggggcggacccgactgtagctccggatgcgattctgatcactggggccctcattgtagcaacaggtgtcagtgccagaacggcgccctgtgtaacccaattacaggagcttgtgtttgtgccgcagggttccgcggatggcggtgcgaggagctgtgcgctcccgggacgcacggtaaagggtgtcagctgccctgccagtgcaggcatggcgcttcttgtgacccacgggcaggagaatgtctgtgcgcccctggctatactggagtttactgtgaagagctgtgcccacctgggagccacggtgctcactgcgaactcaggtgcccatgccagaatggaggcacttgccatcacatcaccggggagtgtgcctgccctcctggctggactggggcggtctgcgcccagccctgccctcccggcacctttggtcagaactgttcgcaggactgtccatgtcatcatggtgggcagtgcgaccatgtcaccgggcagtgtcactgcaccgctgggtatatgggagaccgttgccaggaggagtgtccatttggatcctttggattccaatgtagccagcattgcgattgtcacaacggcggacaatgcagtcccaccactggtgcctgcgaatgcgagccagggtacaagggccccagatgccaagagagactgtgccccgaaggattgcacggtcctgggtgcaccctaccatgtccttgcgacgccgacaatactattagttgccatccggtgactggtgcctgcacctgccagccgggatggtctggacatcattgcaatgagagttgtccagtggggtactatggcgacggatgtcagctcccatgcacttgccagaacggcgccgactgccactcgataacaggcggctgtacttgtgctcctggttttatgggcgaggtttgcgcagtgtcctgcgctgccggaacatacggcccaaactgctctagcatctgctcttgcaataacgggggtacatgctcaccagtggacggcagctgcacttgcaaagaaggctggcaggggcttgattgcacgctgccttgtcccagcgggacttgggggttaaactgcaatgagtcctgtacatgcgcaaatggagctgcctgctctcctattgacgggtcttgttcctgtaccccaggatggcttggggacacatgcgagctgccctgcccggacggcaccttcggcctcaattgttccgaacactgcgattgctcacacgcagacgggtgtgatcccgtcaccggtcactgctgctgtcttgccgggtggaccggaatcaggtgtgatagcacgtgtccaccaggacgatggggaccgaattgctctgtgtcgtgctcttgtgagaatggaggctcatgctccccagaagacgggagctgcgaatgtgcgcctggtttcaggggacccttgtgccagagaatctgtccaccgggattttacggacatgggtgcgcacagccatgtcccttgtgcgtgcactcatccagaccctgtcaccatatttcaggcatctgtgagtgtctccctggcttctcaggggccttgtgtaatcaggtctgcgccggcggctacttcggtcaagattgtgctcagttatgttcttgtgcaaataacggtacctgttcacccatagatggctcctgccagtgcttccctggctggatcgggaaggattgttcccaagcctgcccaccagggttttggggccctgcttgcttccatgcttgttcttgccacaatggggcgtcctgtagtgcagaagacggcgcatgtcactgcactcccggctggactggcctcttctgtactcagagatgtcctgccgcattctttggcaaggactgcggaagagtgtgtcaatgtcaaaacggggcctcctgcgaccacatcagcggtaaatgcacctgccggactggtttcacgggtcaacattgcgagcagcgctgtgctcctgggacgtttggttatggctgccagcaactgtgcgagtgtatgaataacagcacctgcgatcatgtcaccggaacctgctactgctcaccaggtttcaaaggtatccggtgtgatcaggctgcgctcatgatggaggagctcaatccctataccaagatatccccggcactgggggccgagcggcactctgtgggggccgtgaccgggatcatgcttctactgttcttgatcgttgtgctgctcggcctcttcgcctggcacaggagaagacagaaggagaagggccgtgaccttgctccccgcgtctcatatacaccggcgatgcgaatgacttcaactgattacagtctgagcggggcctgtggcatggaccgcagacaaaatacttatattatggacaagggattcaaggattacatgaaggagagcgtatgcagctcaagcacctgttccctcaatagttccgaaaatccgtacgctacaatcaaagaccctcctatactgacatgtaagttgcctgaaagtagttatgttgagatgaaaagccctgtgcatatgggctctccctatacagacgttccaagcctttctacttctaacaagaatatttacgaggttgagcctacagtgtcagtggtgcaagaaggttgcggccacaattcctcctatattcaaaatgcatatgatcttcccaggaacagtcacattccaggacattatgacctgctgccggtgaggcagagccccgctaatggcccgtcacaggacaaacagagctag

SEQ ID NO: 195774 - DNA, 3135 bp, synthetic construct
  misc_feature 1..3135: note = Description of Artificial Sequence: Synthetic coding sequence
  source 1..3135: mol_type = other DNA
atggtgctgagcctgaccggcctgatcgccttcagcttcctgcaggcaacactcgcactgaatcctgaggacccaaacgtgtgcagtcactgggagagctatgcggtgacggtgcaggaatcatacgcccatccttttgaccagatatactatacaagatgtactgacatccttaactggttcaaatgcactagacacagaatctcttacaagaccgcctatcgacgcggattgaggacaatgtacagacgacggagccagtgctgtcctggatattacgagagtggggatttttgtatccctctttgtactgaagagtgcgtccacggaagatgcgtctcaccggacacctgccactgcgaaccgggctgggggggtccagattgctcctcaggatgtgatagcgaccattggggcccccactgttctaatagatgccaatgccagaacggggctctttgcaaccccattaccggcgcatgcgtctgcgccgccggatttcgtggctggcggtgtgaggagctatgcgcgcccgggacccacgggaaagggtgtcagctgccatgccagtgtcgccatggtgcgagctgcgacccccgggccggggagtgcttgtgcgcacctggatacaccggagtatattgtgaagagctttgtccaccaggctcccacggcgcccattgcgaattacgctgcccatgccagaacggaggcacctgccatcacatcaccggggagtgtgcctgtccgccagggtggactggtgctgtttgtgctcagccttgtcctcccggtacattcggacaaaactgctcccaagattgtccttgccaccacggggggcagtgcgaccacgtaactggccagtgtcactgcacggctggctatatgggcgatagatgtcaagaagaatgccccttcgggagctttgggtttcagtgtagtcaacactgcgattgccacaacggaggacagtgctcacccactacaggggcatgtgagtgtgagcccggctataaaggcccaaggtgccaggaaagactgtgccccgaggggctccacggcccagggtgtactttgccgtgcccctgtgatgctgataatactatctcgtgccacccagttaccggagcctgcacatgccagcctgggtggtctggacatcactgcaacgaatcttgtcccgtcgggtactatggagatggttgtcagctgccgtgtacttgccagaatggcgcggactgtcatagtatcactggcggctgcacttgtgcccccggctttatgggcgaggtttgtgccgtttcatgtgccgccgggacatatggaccgaactgtagttccatttgcagctgtaataacggcggaacatgctcaccagtcgacggctcttgtacttgtaaagagggatggcaaggattggattgtacgctcccatgcccttcaggcacctgggggctcaattgcaatgagtcctgcacttgtgctaacggagcagcgtgcagcccaattgacggctcctgtagttgcacacccggttggctgggtgatacgtgtgagctgccatgcccagatggcacatttgggctgaattgctcggaacattgtgattgttctcatgccgacgggtgcgaccctgtcacaggacactgttgctgtttagcggggtggaccgggatcagatgtgactccacatgcccaccaggacgctggggccccaactgcagcgtgtcctgctcttgcgagaacggcggcagctgttcacctgaagatggcagctgtgagtgcgccccgggattccgaggccccctctgccagaggatatgccccccgggattctacggtcacggttgcgcgcagccttgtcctctatgtgtgcattcgtccaggccttgtcatcatatttccggcatttgcgaatgtcttcctgggttctctggcgctctgtgcaaccaagtatgcgcgggagggtattttggacaggactgcgcacagctatgtagttgtgccaacaatggaacctgctcccccatcgatggcagctgccagtgctttccggggtggatcggaaaagactgcagccaggcatgccccccgggcttttggggacccgcatgtttccacgcttgcagctgtcacaatggagcatcttgctccgccgaggacggcgcgtgccactgcaccccgggatggaccggtctcttttgcacccagagatgccctgcagcattttttgggaaggattgtggcagagtgtgtcaatgtcagaatggggctagctgcgatcatatcagcgggaaatgtacgtgccgtaccggattcactggtcagcactgcgagcaaagatgcgctcctggaacatttggatatggctgtcaacaattgtgcgaatgcatgaataattctacttgtgatcatgtcaccgggacatgctattgttctcccggatttaagggcatccgatgtgaccaagctgctctcatgatggaggaactgaacccgtataccaaaatttccccggccttgggcgctgaaaggcacagcgtgggcgctgttactgggattatgctgttgctttttctcattgtagtactgctgggcttgttcgcctggcatcggcgccgacaaaaggaaaagggtcgggacctggctccgcgtgtcagctatacccctgcaatgaggatgaccagcaccgattactccttatccggagcttgcggtatggatcgacgccagaacacatatattatggacaagggattcaaggactacatgaaagagtctgtgtgtagcagcagcacctgctctttaaattcttccgagaacccctacgctacgatcaaggacccacctattctgacctgcaaacttcctgaatcatcttacgtggaaatgaagtcccccgtacacatgggtagcccttacacggatgtgccaagcttgagtacatcaaataaaaacatttacgaagtcgaacctacagtatcggttgtgcaagagggctgcggccacaactcttcctacatacagaatgcctacgacttgcctcgcaactctcatatcccggggcattacgatctcctgcctgtgaggcagtcccctgctaacgggcccagccaggataagcagtcatag

SEQ ID NO: 195775 - DNA, 3690 bp, synthetic construct
  misc_feature 1..3690: note = Description of Artificial Sequence: Synthetic coding sequence
  source 1..3690: mol_type = other DNA
atgggcgccagccgggaccggggcctggccgccctgtggtgcctggggcttttgggggggctggctcgggtcgcaggcacccattaccgctacttgtggagagggtgttacccttgccacctgggccaagcaggatatcccgtatcagctggggatcaaaggcccgacgtggatgaatgccgcactcataatggaggctgtcagcatcggtgcgtgaatacccccggctcatacctctgcgagtgtaagccagggttccggctacacaccgacagccgcacctgccttgccatcaactcgtgtgccttgggaaatgggggatgccagcaccattgcgtgcagctgacaattacccgccatcgctgccaatgtcggcccggcttccagctgcaagaagatggacgacattgcgttcgtcggagcccttgcgccaatcgcaacggttcgtgtatgcacagatgtcaggtcgtgagaggcctggcccggtgtgaatgccacgttgggtatcagttagctgccgacgggaaggcgtgtgaggatgttgacgaatgtgctgctggcttggcacaatgcgctcacggatgcctgaatacccaggggtcattcaagtgtgtgtgccatgctggctatgagctcggggctgatggaagacagtgttatcgcattgaaatggaaatcgtcaactcttgtgaggcaaacaacggtggctgtagccatgggtgttcgcacacttctgctggaccattatgtacatgtcctcgcgggtacgagctggacacagatcagcgaacatgcattgatgtggatgactgtgctgatagtccgtgctgtcaacaggtgtgcacaaacaatcccggaggctatgagtgcggctgttatgcaggctaccgtctcagcgcagatgggtgcgggtgcgaggatgtagatgaatgcgcctcgtcacggggagggtgcgagcatcactgcacgaacctcgcagggtctttccagtgctcctgcgaggccggctatcgactgcacgaagatcggcgcgggtgctccccgctggaggaacccatggtggacttggacggggaattgcctttcgtcaggcccttgccccatattgccgtgttacaagatgagctacctcagcttttccaggatgacgatgttggagcggacgaagaggaggccgagctgcggggggaacataccttaaccgaaaagttcgtgtgtctcgatgattcctttggccatgactgctccctcacatgtgacgactgtagaaacgggggcacctgcctcttggggttagatgggtgcgattgccccgagggttggaccggcctgatctgtaatgaaacctgccccccagacactttcggaaagaattgttcattcagttgtagttgtcagaatgggggaacttgtgattctgtcacaggcgcgtgccgttgtccgcctggggtaagtggtacgaattgcgaggacggatgtcctaaggggtactacggtaagcactgccgcaaaaagtgtaactgcgcaaaccgcggccggtgccatcgcctttatggggcctgtctgtgcgatcctggactatacggccgtttctgtcacttgacatgtcccccatgggccttcggccccggctgcagtgaggaatgccagtgtgttcagccccacactcaatcttgtgataaacgggacggatcctgctcatgcaaagccggtttcaggggggagaggtgccaggccgagtgtgaattgggctactttgggcctggttgctggcaggcttgcacctgcccggtgggcgtggcatgcgactccgtgtccggtgagtgcggcaagcgttgtcccgctgggtttcagggggaagattgcggacaggaatgccccgtgggtacgtttggagtgaattgctcctcatcatgctcgtgtggaggggctccctgccatggcgtaactggccaatgccgctgccccccgggcagaaccggcgaggactgcgaggccgactgtccagaaggaagatggggcctgggctgtcaagaaatctgtcccgcgtgtcagcatgcggcgcggtgtgacccagagaccggcgcgtgtctatgtctcccaggattcgtgggatcaagatgccaggacgtctgcccagctggatggtacggaccctcctgccagacaaggtgctcttgcgccaatgacggtcattgtcatcccgccaccggccactgtagttgtgcacctggttggacaggcttctcatgccagcgggcatgtgacaccggtcattggggcccagattgtagccacccctgcaattgcagtgcaggacacggaagctgcgatgcaatatcaggcctgtgtctctgtgaggccggctatgtagggcctcgctgtgagcagcagtgtccccaggggcattttgggcccggatgcgagcagcggtgtcaatgccagcacggcgcagcctgtgaccatgtgtccggagcgtgcacgtgtcccgccggttggcgcgggactttctgcgagcacgcttgtccagccggtttttttggactggattgccgaagcgcttgcaattgcaccgcaggcgcagcttgcgacgccgtgaatggcagttgcttgtgtccggctggcagaagggggccacggtgcgccgagaagtgcttgccccgtgacgttagagctgggtgccgccactccggtggttgccttaacgggggactttgcgacccccataccggacgatgtctgtgtccggcagggtggactggagataaatgccaaagcccctgcctccgcggatggtttggcgaagcatgcgcccagagatgcagctgcccgcctggcgcagcttgccatcacgttactggtgcatgtcgatgccctcctgggtttacaggatcgggttgcgagcaaggctgcccacccggccgttatgggcctggttgtgagcagttgtgtggctgtctcaacgggggatcatgcgacgcggctaccggcgcctgcaggtgtcctacaggcttcctgggtacagactgcaacttgacttgtccccagggcagatttgggccgaactgtacgcatgtatgtggctgtggacagggtgccgcctgcgacccagtaactggaacgtgcctgtgccctcctgggcgcgccggcgttcgatgtgaacgtggatgcccccagaaccggtttggggtcggttgtgaacacacctgcagctgtcgcaatggcggactctgccatgctagcaatggaagctgttcttgcggcctgggctggaccggcagacattgcgagctggcctgtccccccgggaggtacggcgctgcttgtcacctggaatgcagttgccataataatagtacgtgtgagcccgccacaggaacatgcaggtgtggaccagggttctatggccaggcctgcgaacacaggaggagcggcgcaacatgcaatctagattgccggagaggtcaattcgggccatcttgcaccctgcattgtgactgtggggggggagcagattgtgacccagtatccgggcagtgtcactgcgtggacggatacatgggcccgacatgtagagaaggcggaccccttcgtctgcctgagaatccgagtctcgctcagggatccgccgggacactcccggcctcaagcaggcctacttcaagaagtgggggccctgcacgccattag

SEQ ID NO: 195776 - DNA, 4626 bp, synthetic construct
  misc_feature 1..4626: note = Description of Artificial Sequence: Synthetic coding sequence
  source 1..4626: mol_type = other DNA
atgagcttcctggaggaggcccgggccgccggccgggccgtggtgctggccttggttttactcctcctgcctgccgtccccgtcggggctagtgtgccccctcggcctctgcttcctctccaaccaggcatgccacacgtgtgtgccgagcaggaactgactctcgttggtcggaggcagccatgcgtccaggccttaagccatactgtgcctgtctggaaggccggctgcggctggcaagcctggtgtgttggccacgagcgcaggacagtctactatatggggtaccgacaggtatataccaccgaggcaaggacggtgctgcggtgttgccggggatggatgcagcaaccagacgaggagggatgcttatcagccgaatgctccgccagtctctgttttcacggaggaagatgcgttcctggcagtgcacaaccctgtcactgccctccaggatttcagggtccacgatgccagtacgacgtcgatgagtgccgcacacataacggaggatgtcagcaccgatgcgtaaacactccaggttcttacctgtgcgaatgcaagccagggtttagactgcataccgacagcagaacatgtctggcaatcaactcatgtgcacttggcaacggaggctgtcaacaccattgtgttcaactaacaatcaccaggcaccggtgccagtgcaggccaggatttcagctgcaggaggacggccgccattgcgtgcggcgaagtccctgcgccaataggaacggttcttgcatgcaccggtgtcaggtggtaagggggctggcgcgctgcgagtgtcatgtgggatatcaactggccgcggatggcaaagcctgcgaggacgtcgacgaatgtgccgccggactggctcaatgtgcacatggctgcctgaacactcagggctcattcaagtgcgtctgccacgcagggtatgagttaggggctgatgggcggcagtgctatcgcatcgagatggaaattgtgaatagttgcgaagcaaacaatggagggtgcagtcacggatgctcccataccagtgcaggcccgctgtgtacatgccccagggggtacgagctggataccgatcagcgcacctgcatagacgttgacgattgtgcagactccccctgttgccagcaggtatgcacaaacaatcccggaggttacgaatgcggctgttatgccggctacagattgtcagccgatggatgcggctgcgaagatgttgatgagtgtgctagctcacggggggggtgcgagcatcattgcactaacttggcaggaagcttccagtgttcatgtgaagccggctacagattgcatgaggaccgaaggggatgctcacctctggaggagcccatggtagatttagacggcgagttgcctttcgttcgacccttacctcacatcgccgtgttgcaggacgaactcccccagctctttcaggatgacgacgtaggggctgacgaggaggaggccgaactccgtggagagcacacactcaccgagaagttcgtgtgcttggacgacagtttcggccacgactgcagccttacctgcgatgattgcagaaacggaggtacctgcttactggggctggatggttgcgattgcccagaggggtggacagggttgatctgcaacgaaacctgccccccggatacatttggcaagaattgtagcttcagttgctcctgccaaaacgggggcacatgcgatagcgtgacaggtgcgtgtcgatgtccccctggtgtgtctggaacaaactgcgaggatggatgcccgaagggctactatggaaaacattgccgtaagaagtgcaactgtgccaaccgcggtagatgtcacagattgtacggggcatgcctgtgcgacccaggcctttatgggaggttctgccatctgacttgccctccatgggccttcggtccaggttgctctgaggagtgtcagtgcgttcaacctcacacccaatcttgcgacaagagggatgggtcctgcagctgcaaagctggctttagaggggaaagatgccaagccgaatgtgaattaggctacttcggacctggctgctggcaggcttgcacatgcccagtgggcgtggcctgtgactccgttagcggagaatgcggcaaacgctgccccgctggctttcagggggaggactgcgggcaggaatgtccagtgggaacttttggcgtcaactgtagctcttcctgctcctgcgggggggcaccttgtcacggcgttacaggccagtgccgttgtcccccaggtaggaccggagaggattgtgaagccgactgtccggagggacgatggggactggggtgtcaagagatctgtcctgcctgtcagcacgcagctaggtgcgatccagagacaggagcatgcctgtgcctgccaggctttgtggggagtcgctgccaggatgtctgcccagctggctggtacgggccttcctgccaaacaaggtgcagctgcgcaaatgacggccactgtcatcctgccacagggcactgttcttgtgcacccggttggacgggatttagctgccaacgcgcctgtgacacgggtcattggggccccgattgctctcatccatgtaactgcagcgctggtcacggttcttgtgatgcaatctcaggtctctgcctgtgcgaggcggggtacgtgggacccaggtgcgagcaacaatgtccccagggccactttgggccaggctgcgagcagcggtgtcagtgtcaacacggtgccgcatgcgaccacgtgtcaggcgcttgcacctgtccagcaggatggcgcgggaccttttgcgagcacgcgtgccccgcagggttttttggtctggattgccggtctgcatgtaactgtactgccggggcagcttgtgatgcggttaatggttcatgtttgtgccccgccggccgacgggggcctcgctgcgccgagacctgccctgctcacacttacgggcataactgtagccaggcgtgtgcgtgtttcaatggagcctcttgcgatccagtgcacgggcagtgtcattgtgcgccaggatggatgggccctagctgtctgcaagcctgtccagctggcctctacggggataactgccgtcattcatgcttatgccaaaatggggggacctgtgaccctgtgtcaggccactgtgcctgtccagaggggtgggccgggctagcctgtgagaaagaatgtctgccccgcgatgtaagggctggttgtcgacacagcggagggtgtcttaacggtggtctttgcgacccacatactgggagatgcctctgccctgcagggtggaccggggataaatgtcagagtccgtgcctccgtggctggttcggggaggcttgcgcccaaaggtgctcatgcccccctggtgcagcatgccaccatgtcaccggggcctgtaggtgtccccctggctttacaggatcgggctgcgagcaggcatgccccccaggttccttcggcgaagattgcgcccagatgtgccagtgccccggcgaaaacccagcctgccaccccgcgacagggacctgtagctgtgccgccggctaccacgggccttcttgtcagcaacgatgcccacccggcagatacggccccggctgtgagcagttatgtggctgcctcaacggaggttcatgcgatgccgctaccggcgcgtgtcgttgcccgacaggtttcctcggcacagactgtaacctgacctgcccgcaaggccgttttggacctaattgtactcacgtgtgtggctgcgggcagggagccgcttgcgaccccgttacaggcacctgtttgtgcccaccaggcagggctggtgtgagatgtgagagggggtgcccgcagaatcgcttcggtgtaggctgtgaacacacgtgctcttgccgcaatggtggactgtgtcacgcatccaatggcagctgttcatgtgggttaggatggaccggtcgacactgcgaactggcttgccccccaggcaggtatggcgctgcctgtcacctcgagtgtagctgtcacaacaacagtacgtgtgaaccagccaccgggacctgcagatgtgggccaggattttatgggcaagcctgtgagcacccgtgccccccaggattccatggtgctggctgtcagggcctatgctggtgtcagcacggggccccctgcgaccctatttccggacggtgcctttgtccggcagggtttcatgggcacttttgcgagcgcggatgcgagcccggttcctttggtgaaggatgccaccagcggtgcgactgtgatggcggtgccccctgtgatccggtcacaggcttgtgcctctgtccccctggcagatccggcgccacatgcaatttggactgcagaaggggacagtttggcccgtcctgtaccctgcactgcgactgtggtggtggcgcagactgcgacccagtgagcggacagtgtcactgtgtggatggatatatgggacctacatgcagagaaggaggacccctgcgactgcccgaaaacccgagcttagcacaaggctctgctgggactctgcccgccagttctcgccctacttctagatccgggggtcccgcaagacattag

SEQ ID NO: 195777 - DNA, 8538 bp, synthetic construct
  misc_feature 1..8538: note = Description of Artificial Sequence: Synthetic coding sequence
  source 1..8538: mol_type = other DNA
atggccctgggcaaggtgctggccatggccctggtgctggccctggctgtgctggggtcactgtccccaggggctcgcgccggggactgcaagggccagcgacaggtactaagagaggcccctggattcgtgaccgacggggccggcaattacagtgtcaacggaaattgtgaatggcttattgaagcccccagtccgcagcacagaatacttttggattttctttttttagacaccgagtgtacatacgattatctcttcgtctacgatggagactccccccgggggccgctgctggcctccctttccggcagcactaggcctccgcctattgaggctagcagcggaaaaatgttgctccacctcttttcggatgctaactataatttgttgggctttaatgcatcattccgcttctccctgtgcccaggcggctgtcagtcacacggacaatgtcagccccccggtgtgtgcgcctgcgagcccggatggggtgggcctgattgcgggctgcaagagtgcagtgcctactgcggcagccacgggacatgcgcgtcaccacttgggccatgcaggtgtgagcctgggtttctcggtagggcttgtgacctccacctctgggaaaatcagggtgccggttggtggcacaacgtgagcgctcgggacccagctttctccgctcggatcggcgcagctggtgcatttcttagtccacccgggctgctggccgtgttcgggggacaggatctcaataatgctctcggagaccttgtgctctataatttttcagcaaacacctgggaatcctgggatttgtcaccagcacccgcggctagacactcacacgtggcagtggcctgggctggcagcttggtgcttatgggcggcgaattggccgatggctccctgaccaacgacgtctgggccttctcacccctgggacgtggacactgggagctgttggctccaccagcctccagcagttccggtcccccagggcttgctggccatgctgccgccctggttgatgacgtttggctttacgttagcggtggacggacaccacatgacctcttcagctccggactgttccgctttaggctggactcaacctctgggggctattgggaacaggtgattcctgcgggtggccgccctcccgcggccaccgggcattccatggtcttccacgcgccatcccgcgcgctgcttgtgcacggtgggcatcgtcccagtacagcccggttcagcgttcgagtaaactctacagagctgtttcacgtggacaggcacgtttggacaacgctgaagggacgtgatgggctgcagggaccaagagaacgagcattccatacagctagcgtcctaggtaattacatggtggtttatggcgggaacgtccatacgcactatcaggaggaaaaatgttatgaggacggcatcttcttctatcatctcggctgccaccagtgggtctccggtgctgagctcgctccgcccggtacccccgaaggaagggcagcgccaccttctgggcggtactcccacgtcgcagccgttctgggtggcagtgtgttactggtggctggcggctactctggaaggcctcggggagacctgatggcatataaagttcccccctttgtgtttcaggcgcctgctcccgattaccatctggattactgttcaatgtacaccgatcactctgtctgctctcgggacccagaatgctcttggtgtcaaggcgcttgccaagccgcccctccacctggaacgcctcttggcgcgtgccccgctgcatcttgtctgggcctggggagactgctgggagattgccaggcgtgcttagcgtttagcagtcccacagccccaccgaggggccctgggaccctgggttggtgcgttcataacgaatcctgcctcccccgtcctgagcaggctagatgcaggggtgagcagatcagtgggacagttggatggtggggacctgcccctgtgttcgtaacttctctggaggcctgtgttacccaaagctttctccctggcctacacctgcttaccttccagcagcctccgaatacaagccagcctgataaagtaagtattgttagatcgacaaccattactctgacaccctctgccgaaacagacgtcagcctggtgtacaggggcttcatttatccaatgctgcccgggggcccaggcggccctggagccgaggatgtcgcagtatggacccgggcccaacggctgcatgtgctcgcacggatggcccggggccctgataccgagaatatggaggaagtcggcagatgggtggcccaccaggaaaaggaaaccaggcgacttcagcggcccgggagcgctagactattcccattgcccggcagggatcataagtacgcagtggagattcagggccaattgaatggctccgcgggccctggtcatagtgagctgactctgttatgggacagaaccggggtgccaggagggtccgagatcagtttctttttcctcgagccatatcgctcaagcagctgcacgagttacagctcctgcctgggttgcttagccgatcaaggatgtggatggtgcctgacatcagcaacttgtcatttgcgacaagggggggcgcactgcggtgatgacggcgctggtggctcgttattggtgcttgtcccaactctttgccctctgtgtgaagagcacagagactgtcatgcttgcacacaagatcctttctgcgagtggcaccaaagcactagccggaagggggatgcagcttgcagtcggcgcggtcgtggcagaggcgcactgaaatcccccgaggagtgtcctccattgtgcagccaacggctgacatgtgaggactgccttgccaattccagtcagtgtgcttggtgtcagagtacacacacttgctttctcttcgcggcatatctggccagatacccacacggaggctgcagaggatgggacgactccgttcacagcgagccaagatgtagatcttgcgatggctttcttacttgtcatgagtgcctgcagtcccacgaatgtggctggtgtggaaacgaagataacccgacactcggcaggtgtctccagggggatttcagcggaccgttagggggcgggaattgctctctttgggtcggagagggtttgggacttcccgtggccctgcccgctcggtgggcctatgcacgctgccccgatgtggatgaatgccgcctgggtcttgcccgatgccaccctcgggccacatgcctcaacaccccattgagctacgagtgtcactgccagcgtgggtaccagggagacggcatatcacactgcaacaggacatgtcttgaggattgcggtcacggagtgtgctcaggaccgcctgatttcacctgcgtatgcgatctcgggtggacctccgatttacctccccctactccggcaccaggtccacccgccccaaggtgctcgcgcgattgtggttgctcattccacagtcactgtcgcaagcgtgggccaggcttttgcgacgaatgtcaggattggacttggggcgaacattgcgagaggtgtagaccaggttcattcgggaatgctacagggtcgcgtgggtgccgtccttgccaatgcaacggacacggcgacccccgaaggggtcactgcgataacctgagcggtctgtgtttttgccaggaccacaccgagggtgcccactgtcagttgtgttctccgggatattatggcgatcccagagcaggcgggagctgtttccgagagtgtggcggcagagcattactgactaacgtgtcctccgtcgccctggggagtagaagagtagggggcctgttgccccccggagggggggctgcccgtgccgggccaggcctgtcttattgcgtctgggtagtatccgctaccgaggaactccagccatgcgccccaggaacactttgccccccccttacactgacattttccccggactcctctactccatgcactctctcctacgtgctggccttcgatgggttcccacggttcctggacactggggtggttcagagtgaccgcagtctgatcgcagcattctgcgggcagcgcagggataggcctttgacggttcaggctctgtctggactattggtgttgcactgggaggctaacggttcaagttcttgggggttcaacgcgtcagtgggaagtgcacgctgcggctccggcggacccgggtcatgtcctgtgcctcaagaatgcgtccctcaagatggtgccgctggggccggcctgtgccggtgtccgcaggggtgggccggaccacactgtaggatggcactgtgccccgagaattgtaacgcacatacaggtgcaggcacttgtaatcaaagcctcggggtatgtatttgcgcagagggctttggcgggccagattgcgctaccaaacttgatggcggtcagcttgtatgggagacactaatggattcaagactgtcagcagacactgcgtccagattcctgcacaggttaggacacaccatggtggacgggccagatgccacgctctggatgttcggtggcctcggcttgccccagggattactgggaaacttgtaccggtatagcgtgtcggaaaggaggtggacacagatgttggccggcgcagaagacgggggccccggaccatcaccacgcagttttcatgcggctgcatacgttcccgccggccgtggagcaatgtacctcctgggcgggttgacagccggaggagtgacccgcgatttttgggtgttgaatcttaccacgctgcaatggcgtcaagagaaagcacctcaaaccgtggaactgccagctgtggctgggcatacactgactgcacgtaggggtctctctttgctactcgttggagggtatagcccagagaacggattcaaccagcagctgctcgagtatcagctagctaccggaacttgggtgtccggagctcagagcggcaccccccctaccggattatacgggcattccgccgtctaccacgaggccaccgattccctgtatgttttcggaggatttcggttccacgtcgaacttgccgcccctagccccgagctgtacagcctgcattgcccagaccgcacctggagtcttctggcgccatcccaaggggctaagcgggacagaatgcgaaatgtgcgcggctcctccaggggcttgggccaggtccctggtgagcagccagggagttggggatttagagaggtgcggaaaaagatggcactttgggctgcactggcagggaccggcgggtttctcgaggaaataagcccccatctgaaggaaccacggcctcgtctgttccatgctagcgctttactcggcgataccatggttgtcttgggcggaagaagcgatccggatgaatttagtagcgacgtcctgctgtaccaagtcaattgtaacgcctggctgctacccgatctgactcggtcggcgagcgtgggcccacccatggaggagagcgtggcccatgccgtggcagcagtaggctctagactttacatctcaggtgggtttggtggagtcgcactcgggcgactcctggctctcaccctaccccccgatccctgtcgcctgctcagtagcccagaagcttgcaaccagtcaggcgcatgcacttggtgtcacggcgcttgcctgtcgggggaccaggctcacagactgggatgcggcggatctccctgttctcccatgccccggagccccgaagagtgtcggcgcctgagaacgtgcagtgaatgtctcgcaaggcatcctcgaaccctgcagcccggcgacggggaagcctcaacaccccggtgcaagtggtgcactaattgcccggagggtgcatgcatcggaagaaatggatcctgcacgtctgagaatgactgtagaataaatcagcgtgaggtgttttgggcgggtaactgcagtgaagctgcttgcggagcagcagattgcgagcagtgcacacgggaggggaagtgcatgtggactaggcaatttaaaaggaccggagagactcgccggatccttagcgttcagccaacctacgattggacttgcttcagtcattcacttctgaacgtgtcgcctatgcctgtcgagtcatcgccaccactcccatgcccaaccccctgtcacctcctgccaaattgcaccagttgtctggattcaaagggcgcagatgggggatggcagcactgtgtgtggagttcctctctgcagcagtgcctctccccttcatacttgcctcttcgctgtatggccggcgggtgcggccgtctcctccgcggtcccgagtcctgttctttgggctgcgcccaggcaacccagtgcgccttgtgccttagaagaccccattgtggatggtgtgcttggggaggacaggacggaggagggcggtgtatggagggggggttgtcagggcctcgggatggcctgacttgcggacggcccggcgcctcctgggccttcctgagttgccccccagaagacgagtgtgccaacgggcaccacgattgcaatgagacacaaaactgtcacgatcagccacacggatatgaatgctcttgtaaaaccggttatacgatggataatatgaccggcttatgcaggcccgtttgtgcccagggctgtgtgaacggctcctgcgtcgaaccagaccattgcaggtgccatttcgggtttgtagggaggaactgctcaacagagtgcaggtgtaacaggcacagcgagtgcgctggagtgggggccagagaccactgtttgctgtgtcgaaaccacaccaaagggtctcattgcgagcagtgtctccccttgtttgtcggcagcgcagtagggggcggaacctgtagaccatgtcatgccttttgcagaggcaattcccatatatgtattagtcgcaaagaattacagatgagtaaaggggagcccaagaaatactcccttgaccccgaggagattgagaactgggtcacggagggacccagcgaagacgaagcagtgtgcgtgaactgtcaaaacaactcttacggggagaagtgtgaatcttgcctgcaaggttattttttgctggacggcaaatgtactaaatgccagtgcaacggtcatgccgatacctgcaatgagcaggatggaacagggtgcccttgccagaataacactgaaaccggaacttgccagggctcgagccccagtgatcgccgtgactgctataagtaccaatgtgcaaaatgtcgtgaatcctttcatggctctccactgggggggcaacagtgctatcggctgatttcagtagaacaggaatgttgtctagaccccacctctcagacaaactgcttccacgaaccgaagaggcgggctctgggcccaggccgtactgtgctcttcggcgttcagcccaagtttacaaacgtcgacatcagactgaccctcgacgtaacgtttggggctgtggatctgtacgtgtccacgagttatgacacttttgtggtgcgagtagccccagatacaggagttcataccgtgcacatccaaccccctccagccccgccaccccctccaccgccagcggatggagggccaagaggcgcaggtgaccctggaggcgccggggcctcctctggccctggagccccagccgaacctcgcgtgagggaggtctggccaagaggactgataacttatgtcaccgttaccgagccttccgccgtcctggtggttagaggggttagggataggctcgttattacgtatccccacgagcatcacgctttaaaatcctcgagattttatctgcttttgttaggtgtgggcgatccttccgggcctggggccaatgggagtgctgacagccaaggattactcttttttcgacaggatcaagctcacattgacctattcgttttcttcagtgtgttcttttcatgcttcttccttttcttgtccctctgcgtactgttatggaaagctaaacaggcacttgaccagagacaagaacaacggcggcacttacaggagatgaccaaaatggccagcaggccgttcgcgaaggtgactgtgtgttttcccccagatcctactgccccagccagcgcttggaaaccggcaggcctgccgcctccagccttcagacgaagtgagcctttccttgctcccctgctgctgacaggagcaggggggccttggggcccaatgggagggggctgctgtcccccagctattcccgccaccactgccgggctgcgagcaggccccataactctggagcctactgaggatggtatggctggggtagctaccctgctcctgcagctgcccggggggccacatgctcccaacggcgcctgtttgggatcagctttggtaactctacgtcaccggctgcacgagtactgcggcgggggcggaggagccggagggtctggccacggaacaggagccggccgcaaagggctcctgagccaagacaacttgactagcatgagtctttag

SEQ ID NO: 195778 - DNA, 8337 bp, synthetic construct
  misc_feature 1..8337: note = Description of Artificial Sequence: Synthetic coding sequence
  source 1..8337: mol_type = other DNA
atggccctgggcaaggtgctggccatggccctggtgctggccctggccgtcttgggctcccttagcccgggcgcccgggcaggggactgcaagggccaaaggcaggtattgcgtgaagcccctggctttgtgactgatggcgctgggaattactccgtgaacggaaactgtgagtggttgatagaagcgccctcaccccagcacaggatcttattggatttcctgtttttagacaccgagtgcacctatgattacctgttcgtctacgatggagacagcccccgcggcccactgctcgcaagtctaagtgggtccacacggccccccccgatcgaggcatcatccggcaagatgcttcttcatctgttttccgacgccaactataaccttctgggcttcaacgctagcttcagattttcgttgtgcccaggaggatgccaatctcacgggcagtgccagccgcccggcgtttgcgcctgcgagcctggctggggcgggcctgattgcgggttgcaagagtgcagcgcctactgtggttcacatggcacttgcgcctccccgcttggcccttgccggtgcgagcccgggttcttgggcagagcatgtgatctgcacctgtgggagaatcagggtgcggggtggtggcataacgtgtccgccagggatccggctttcagcgcaagaatcggtgcagccggcgccttcctgtccccccccggcttgctggcagtttttggcggtcaagacttgaacaacgctctgggggaccttgtcctttacaattttagcgccaatacatgggagagctgggacctgagcccagcacctgcagcccgtcatagtcacgtggctgtggcctgggctggcagccttgtccttatgggaggggaactggccgacggctccctaacaaacgacgtgtgggctttctccccgttgggtagggggcactgggaattgctggcaccacctgcatcatcaagctccggcccccctggcctggccgggcacgccgccgctctggtcgacgacgtgtggctgtatgtatctggcggccgaactccacatgacctattcagtagtggactgttccgctttcgcctggacagtacctccggagggtactgggaacaggtaatcccggccggcggacggcctccggctgccacgggacattctatggtgttccatgcaccatcacgggccctgctcgtgcacggcggccataggccttcaacggcacggttttccgtgagagtgaattccacggaactgtttcatgttgataggcacgtatggactactctgaaaggccgcgacgggctgcagggcccccgagagagagcctttcacactgcatcagtactcggtaattatatggtggtctacggcggaaacgtccatacgcactaccaggaagaaaagtgttacgaggatgggattttcttctaccatctgggatgtcaccagtgggtgtcgggggccgagctggctccacccggaactcccgagggacgggccgcacccccgagtggtcgttactcccacgtagcagcagtgcttggcggatcggtgctgctcgtggccggagggtacagtggaagaccccgcggagacttaatggcctataaagttccccctttcgtgttccaagctcctgctcccgattatcacttagactactgcagcatgtacactgaccactcagtatgctcccgcgatcccgagtgcagctggtgccaaggcgcctgtcaggccgctcctcccccgggtacgcccctcggggcctgtccagcggcgagttgcctgggactcggaagactgctgggtgactgccaggcgtgcttagcattctcctctcccactgccccacccagaggtcctggaacactgggatggtgcgtccataatgagagctgcttgcctagacccgagcaggccaggtgtcgtggagagcagatatccggcacagtaggctggtgggggccagcacccgtgttcgtaaccagtctcgaggcatgcgtgacacaatccttcttacccggactgcatctgctgacatttcaacagccccccaacaccagccagcccgataaggaggaggtagggcgctgggtagcacaccaggaaaaggagactcgccggctgcagagaccaggctcggcacgattgttccccttacctggtcgggatcataagtacgctgtagaaattcagggtcagctgaatgggtcggcgggccccggacactctgaactcaccctgttgtgggacagaactggagtaccaggaggtagcgaaatcagctttttttttctggaaccctatcggtctagtagctgcacatcatacagcagttgcttggggtgcctggctgaccaaggttgcgggtggtgcttgacgagcgccacctgtcatctccgacaaggcggtgctcactgcggggacgacggggccggtggctcactcctggtgctcgtccctactctgtgtcccctttgtgaggaacaccgagattgtcacgcttgcacccaagatccattctgcgaatggcaccagagcacttcacgaaaaggggatgccgcctgcagccgacgcggccgcgggcgaggagccctcaagtcacccgaagagtgcccccccttatgctcacagcggctcacctgtgaagattgcctggccaattcctcgcagtgtgcctggtgtcagagtacacacacatgctttctgttcgccgcttacctcgcccggtacccacacggaggatgccggggatgggatgactcagtgcactctgaacccagatgtaggtcgtgcgatggtttcttgacctgtcacgaatgccttcagagccatgagtgcgggtggtgtgggaacgaagataatcccactttaggaaggtgtcttcaaggggacttcagcggccctcttggcggaggtaactgcagcctttgggtgggcgaaggcctgggcctgcctgtggctctaccagccagatgggcctacgccagatgccctgacgtcgacgaatgcagactgggactggcacggtgtcatcctagagcaacgtgtctgaacacacccctctcttacgagtgtcattgccagaggggataccagggagatggtatttctcattgtaacagaacatgcttggaagattgcggccacggggtgtgctctggaccacctgatttcacctgcgtgtgtgacttaggctggaccagtgacctgccaccgcccacgcctgcacctgggcctcccgcacctaggtgctctcgcgactgtgggtgttcctttcattctcactgcaggaagcgggggccaggcttctgcgacgagtgtcaggactggacctggggcgaacattgtgaacggtgtagaccaggtagcttcggaaacgccactgggagtcggggatgccggccctgccagtgtaacggccacggggatcctcgccggggacattgtgataacttaagtggcctgtgcttctgccaggaccatactgaaggagcccactgtcagctgtgtagcccagggtactacggggatcctcgggcgggaggctcttgttttagggagtgtgggggcagggccctgcttacaaatgttagctccgtcgcactcggatcccgtcgggtgggcggattgctgccacctggcgggggggccgctcgggctggtccgggcctcagctattgtgtctgggtagtgagcgcgaccgaggagcttcagccgtgcgctcctggcacactttgtccccccctgaccctcacattctcccccgacagtagcacgccatgtaccttgtcctatgttctggcattcgacgggttcccgaggttcctggatactggtgtggtacagtcagaccgctccttgattgctgccttctgcgggcaacgtagggatcgtcctctgacagtgcaagccctgagcggtctgctggtcttacattgggaggccaatggtagctccagttggggctttaatgcaagcgttggctcagctaggtgcggctccgggggaccagggtcttgtcctgtgcctcaggagtgcgtgccacaggacggagccgccggcgccggactctgcaggtgtcctcaagggtgggccggaccccactgccgcatggccctttgccctgagaactgcaatgctcacaccggtgccggcacctgcaatcagtctttgggggtctgtatctgtgcggaggggttcggaggaccagattgtgcaacaaagctcgacggtggacaattagtatgggagaccctgatggattcgcgcctgtcagcagacacagcgagtcggtttctgcacagacttgggcacacgatggttgacggcccagacgctacgttatggatgtttgggggcctgggattgcctcagggcttgctcggcaatctttatagatatagtgtgtccgaaaggcgttggactcagatgttggctggagccgaagacggagggccaggtccctcaccccgatccttccacgctgcagcctatgtgccagctggacgcggcgccatgtacctgctcggcggacttacagccgggggagtgacccgcgacttttgggtcctaaacctgaccaccttgcaatggagacaagaaaaggcccctcagactgtggagttgccagccgtcgccggtcataccctgactgcccgccggggtctttctcttctgttagtgggagggtattcccctgagaatggttttaaccagcagctgctggagtaccagctggcaaccggaacttgggtgtccggagcccaaagtggaacaccccctactgggctgtacggacattctgctgtataccatgaggcaaccgattcactttacgtcttcgggggatttcgcttccacgtcgagctggccgcaccttctcctgaactctactccctccattgtccggatcgcacctggtcactactcgcccctagtcagggggcaaaacgagatcgaatgcggaatgtaaggggaagctcccgcgggctcgggcaggttcccggtgaacaacccggcagttggggattccgagaggtccgtaagaaaatggcgctctgggctgccctggctggaacaggtggctttcttgaggaaatatcgcctcacttaaaagagccccggcctagactgttccatgctagcgccttgctgggcgataccatggttgtgctcggcggccggtccgacccagatgagttttcaagtgatgtcctgctctaccaggtgaattgcaacgcctggttgctgcctgatctcacacgttctgccagtgtcggcccccctatggaggagtctgtggcgcacgccgtagccgcagttggatcacgcctatacatcagcgggggtttcgggggggtggccctcggccggctgctcgccctgactttacctccggatccctgtagactactctcaagccctgaggcttgcaaccagagcggtgcttgtacttggtgccacggtgcctgcctgtcaggagatcaggcccaccgcctggggtgcgggggttcaccatgcagcccaatgccgcggagccccgaagagtgtcggcggcttaggacctgcagcgagtgtctcgcccgccaccctcgcacattgcagccaggcgacggagaagcctccacgcctagatgcaagtggtgtacgaattgcccagagggggcttgtattgggcgcaacgggagttgtaccagtgagaatgactgtcgtattaatcaacgtgaagtgttctgggccggcaactgctctgaggctgcctgtggagccgcagattgcgagcagtgcacccgagaagggaaatgcatgtggactcggcagttcaagcggactggagaaacacgtcgtatcttgagcgtacagcccacatatgactggacttgcttctcccattccttgcttaacgtcagccctatgccggttgaaagctcaccccccctcccttgcccaacaccgtgtcaccttctccctaattgcacaagttgcctcgattctaaaggagcggatggaggatggcagcactgcgtttggagttccagtctccagcagtgcctatcaccatcttacctccctctaagatgcatggcgggcggatgcggtcgcctgcttcgcggccctgagtcatgtagcctgggttgtgctcaggctacacaatgcgctctgtgcttaaggcgtcctcactgtggatggtgcgcctggggcggacaggacgggggggggcgctgtatggaaggcggtctttccgggccaagagacggtctgacgtgcgggcggcctggggcttcttgggccttcctttcatgtccacccgaagatgaatgcgcgaatggacaccacgactgcaacgagacgcagaattgtcatgaccagccccacggctatgaatgctcctgcaaaaccggatacacgatggataacatgactggtttgtgcagacccgtgtgcgcccaagggtgtgtcaacggcagctgtgtagagcctgaccactgccgatgccattttggcttcgtcggaaggaactgctccactgaatgtcgatgtaataggcactctgagtgtgccggggtgggcgcccgcgaccactgcttgctttgccggaatcacactaaggggtcccactgcgagcagtgtctcccactatttgtgggctcggctgtagggggcggaacctgtcgtccttgccatgcattctgccggggtaatagtcacatttgtatctcgcgcaaggagctgcagatgtcgaaaggcgaacctaagaagtactctctcgatcctgaagagattgaaaactgggtgacagagggtccatccgaggatgaagctgtttgcgttaactgccagaataattcctacggtgagaagtgcgagtcatgcctccagggttattttctgttggatgggaaatgcacaaagtgtcagtgtaacgggcacgcggatacgtgtaatgaacaagacggaacaggttgtccatgccagaataacactgaaactggcacctgccagggctcatcccccagtgacaggcgcgactgctacaagtatcagtgtgccaagtgcagagaatctttccacgggagccctctcggcgggcagcaatgttaccgcttaatcagtgtcgagcaggagtgttgcctcgacccaacatctcagacaaactgttttcacgagccaaagcgccgagctctgggacctggtaggaccgtcctgtttggtgtccaaccaaagtttactaacgtcgacatacgcctgactctcgatgtgacctttggagccgtcgacctttacgtgagtacaagttatgacacgtttgtcgtacgggtggcccccgacaccggggtccacaccgtgcacatacaacccccacccgctccgccgcccccaccaccccccgctgatggaggccccagaggggccggtgacccaggcggggctggggcttctagcggacccggcgctcccgcagaaccaagggtgcgcgaagtgtggccgaggggcctgatcacttatgtgactgtgactgaaccatctgcagtgctcgtcgtcagaggtgtgagagacagactggtcataacctatccacatgaacatcacgccctcaaatcttcacgattttacttgctgctgctgggggtaggcgaccctagcggaccgggcgcaaacggcagtgctgactcacaaggactgctgttctttaggcaggatcaggctcacattgatctgttcgtctttttcagtgtgttcttctcttgcttcttcctctttctcagcttgtgcgtcctgctttggaaggctaagcaggccttggaccagagacaggagcaaaggagacacctccaggaaatgacaaagatggctagcaggcctttcgcaaaagtgacagtgtgttttcctcctgatcctacggcaccggccagcgcctggaaaccagcaggtttgcccccccccgcttttaggcgctctgaacccttcctcgcacccctgctcctgacaggcgccggtggaccgtgggggccaatgggaggcggctgctgccctcccgcaatacctgcaaccaccgccggactcagagccgggccaatcaccctcgaaccaaccgaagatgggatggccggggtagccacacttcttctgcaacttccaggcggcccacatgcccccaatggagcatgcctcgggagcgcactggtcacactgagacaccgccttcacgaatattgtgggggaggaggtggcgcaggcggatccgggcacggcactggcgcaggccgtaaaggattactgtctcaggacaacctcacatctatgtccctgtag

SEQ ID NO: 195779 - DNA, 1320 bp, synthetic construct
  misc_feature 1..1320: note = Description of Artificial Sequence: Synthetic coding sequence
  source 1..1320: mol_type = other DNA
atgcgggagctgcccgccggcctgctgccccccggccgggaggtgcatcagtgcgctaagtgtcgagagtcgtttcatggttcaccactgggcggacagcaatgttacaggttgatttcagtagagcaagagtgctgcttggatcctacctctcaaaccaactgctttcacgaaccgaagaggagagccttgggccctggcagaacagtcctgttcggcgtccagccgaagtttaccaacgtagatattagactgactctggacgttacattcggggcagttgatctgtatgtaagtacatcatatgatacatttgtggttcgggtagccccagatacaggcgtccacaccgtgcacatccaaccacctccggcccctcccccccccccccccccagccgacggaggccccagaggcgccggagatcctggcggggctggagcctcgagtgggccaggggccccggccgagcccagggtgagggaggtctggccccgtggcctaattacatacgtcaccgtgaccgaaccctctgcggttttagtcgtccggggagttagggatagactggtgatcacatatccacacgagcaccacgcccttaaaagctccagattctacttacttcttctgggtgtcggcgatcctagcggtcctggcgccaatggttctgccgatagtcaggggctcctgttctttcggcaagatcaagcccatatcgacctgtttgtttttttcagcgtattcttcagctgcttttttctgtttctgtcactgtgcgttctcctgtggaaggccaaacaagcactggaccagagacaggaacagcgccggcatctgcaggaaatgacaaagatggcttcccgcccattcgccaaggtgaccgtctgtttccctcctgatcccaccgcacctgctagtgcttggaaaccagccgggcttccccccccagcgtttcgcagaagcgaacctttccttgctccactgctcctgaccggcgctggtggcccctggggcccgatgggagggggttgttgcccacctgctattcccgcgactacagccggtcttagggcaggaccaataacactggaaccgactgaggatggcatggccggagttgccaccctcctcttgcagttacctggcggccctcacgcccccaacggagcatgcctcggctccgcgcttgttaccctgagacatagactgcatgaatactgtggcgggggaggtggtgccggaggcagtggccatgggactggcgctggtcgaaagggcttgctgtctcaggacaatctgacctcaatgtccctttag

SEQ ID NO: 195780 - DNA, 1809 bp, synthetic construct
  misc_feature 1..1809: note = Description of Artificial Sequence: Synthetic coding sequence
  source 1..1809: mol_type = other DNA
atgaacggcggcgccgagcgggccatgcggagcctgcccagcctgggtgggcttgcactcctctgttgtgcagctgcggcagctgccgccgcagtggccagcgctgcctctgcagggaacgtgacaggaggcggtggcgcagccggacaggtggacgcctcacccggtccaggcctgcgcggggaacctagccacccttttccccgggctaccgcaccaaccgcccaagcgccgaggacaggcccaccacgcgccaccgtgcaccgccctctggcagccacatctcccgctcaatctccagagacgactcctttatgggctactgccgggccatcgtccacaactttccaagccccattaggaccatcccccacaactccaccagccgccgaaaggacatcaaccacaagtcaagcacctactcggcctgcgccaaccacactgtccactactaccggtcccgctcctacgactccagtggcgactaccgtgcctgcgcctacgacacctcgcaccccgactcccgatctgccaagctccagcaacagtagcgtattgcctacgcctcccgctaccgaagcgccctcttctccacctccagagtacgtctgcaactgttccgtcgtcggcagtcttaatgttaatcgctgtaaccagactacaggccagtgtgaatgtaggcctggataccagggcctgcattgcgagacttgcaaggaaggcttttacctcaattatacatcaggcctttgccaaccctgcgactgcagcccccacggtgctttaagcataccctgcaattcttccgggaagtgtcagtgcaaagtcggcgtcattgggagtatctgcgatagatgccaggacggctattacggtttctcaaagaacggatgcctgccatgccagtgtaacaaccggtccgcgtcatgtgacgccttaacgggcgcgtgtctgaactgccaagagaacagtaagggaaaccactgcgaggagtgtaaggagggcttctaccaaagtcctgatgcgaccaaagagtgtctgagatgtccttgtagcgccgtcacgagcaccgggtcctgcagtattaaaagtagcgagcttgaacctgaatgtgatcagtgtaaggatggatatattggccccaactgtaacaaatgtgagaatggatattataacttcgatagtatctgccgaaagtgtcagtgccacggacacgtggatcctgtcaaaacccctaaaatctgcaaacccgagagtggtgaatgtattaactgtctgcacaacactacagggttttggtgcgaaaactgcttggaagggtatgtgcatgacctggaggggaactgtataaaaaaggaagtgattctccctacacccgaagggtccacgattctggtgagcaatgcatcgctgacaacaagtgtgcccacccctgtaatcaactcaactttcaccccaactaccctgcagacgatcttcagtgttagcacgtccgagaatagtaccagtgcattagctgatgtgtcctggacacagtttaatatcattattctcaccgtaattattatcgtggtggtgctgctcatgggatttgttggcgccgtttacatgtatagagaatatcaaaacaggaaacttaacgcccctttctggactattgaattaaaggaagataacatttctttttcttcatatcacgattccatccctaatgcagatgtgagcggtttgttagaagacgatggtaatgaggtagcccccaatggtcagctgactctgactactcctatccataattacaaagcttag

SEQ ID NO: 195781 - DNA, 1920 bp, synthetic construct
  misc_feature 1..1920: note = Description of Artificial Sequence: Synthetic coding sequence
  source 1..1920: mol_type = other DNA
atgcggagcctgcccagcctgggcggcctggccctgctgtgctgcgccgccgctgcagcagctgccgccgtggctagtgcagcaagcgctggaaatgtgactggagggggtggagctgccggacaggtagacgcatcccccggacccgggctgaggggtgaacctagccacccgttccctcgggctacggcccccaccgcacaggcaccaaggacaggtccgcctagagcaacagtgcaccgccctctcgccgccacgtccccagcccagtcacccgaaactacacccctgtgggccaccgctggacccagctctacgactttccaggcaccattgggccctagccccaccacgcctccagcggcagagagaactagtacaacaagtcaggcaccaactcgacccgcgcctaccacgctcagtacaaccactgggccagctccaacgacccccgtcgctacaacagtaccagcacccaccacaccccgcacccccaccccggacctaccctcttcctcaaatagctcggtgctccccacccccccagctaccgaggccccctccagcccacccccagggcatcaatggccggtggcgaaaatgcctcaaaaatacctcggtaaatacgcatgtgagtccaacctgaaaagcaaatatcttccattgactcagcctgttatgaatctcagggtttcagaagcggtcaagacagagtacgtctgcaattgctcggtggtgggttcactcaatgtgaacaggtgtaaccaaaccacgggacagtgcgagtgccgtccagggtatcaaggattgcactgtgagacttgcaaggagggcttttacctcaactatacctctggcctgtgccaaccttgtgattgctcaccccacggagctctttccatcccttgcaattcttctggcaagtgtcagtgtaaagtaggggttatcggctccatatgcgaccggtgccaagatgggtattacggattctcgaaaaatggttgtctcccatgtcaatgcaataatcggtcagccagctgcgatgcactgacaggcgcatgcctcaattgccaggagaattccaagggtaatcactgtgaagagtgtaaagaaggattctaccagtctcccgacgctacgaaggaatgtttacggtgcccttgcagtgctgtcactagtacaggcagttgttccattaagtcctccgaactggagcctgagtgtgaccagtgtaaagacgggtacattggcccgaattgcaacaagtgcgaaaacgggtattacaactttgacagtatttgcagaaaatgccaatgccatggccacgtggatcccgtgaaaactccaaagatctgcaaacccgagagcggagagtgcatcaactgccttcacaacacaacgggtttctggtgcgaaaactgtctagaaggttacgtccatgatttagaaggtaactgcatcaagaaagaagtcattcttccgacgccagaggggtcaacaatccttgtcagcaatgcatccctgaccacatccgtgcccactcctgtaattaattctacttttacgcctactaccctgcagaccatcttttccgtgagtaccagtgaaaacagcacgtccgcacttgccgacgtctcttggacacaatttaatatcattattttgactgtgataatcatcgtggtggtcctgctgatgggatttgtgggagccgtgtacatgtatcgtgaataccagaaccgaaaattgaatgctcccttctggaccattgagctgaaggaagataatatttccttttcctcctaccatgacagcatcccgaacgcggatgtttctggtctccttgaagacgacggaaacgaggtggccccaaacgggcagttgacgcttaccacacccattcacaactacaaggcttag

SEQ ID NO: 195782 - DNA, 939 bp, synthetic construct
  misc_feature 1..939: note = Description of Artificial Sequence: Synthetic coding sequence
  source 1..939: mol_type = other DNA
atgctgcgggcccccggctgcctgctgcggaccagcgtggcccccgctgcagccctggctgccgcactgctgagttccctcgccaggtgctcccttctggagcccagggatcctgtagccagtagtctctcgccctattttggcaccaagacacgatatgaggacgtgaaccccgtcctgcttagcgggcccgaggcaccttggcgtgatccggaacttctggaaggcacgtgcacacctgtgcagcttgtcgcgttaattaggcatggaaccaggtatccaacggttaaacagatccgtaagctcaggcaactgcacgggctgctgcaagccagaggctcacgagacgggggggcttctagcacggggagtagggacctgggggcagctctggctgattggcccctctggtacgccgattggatggatggacagctggtagagaagggcagacaggatatgagacagctggcgctgcgacttgccagcttgttccctgccctgttttctcgcgagaactacggcagactgaggttgatcaccagttccaaacatagatgcatggactcatcagccgccttccttcagggattgtggcagcactaccacccaggtctacctccgcctgacgttgctgacatggagtttggtcccccaacggttaacgacaagctgatgcgtttcttcgatcattgcgagaaattcctgactgaagtggagaaaaacgcaaccgccctttatcacgtggaggccttcaaaacaggccctgagatgcaaaatattctgaagaaagtggctgccactctgcaggtgccagtgaatgacctgaacgctgggttaagccagtttttgctgcagtccagttctagcctggtgatgcagcgactattctttcactgttttttgtcatgggccacatctaagaccaggaacccatag

SEQ ID NO: 195783 - DNA, 1464 bp, synthetic construct
  misc_feature 1..1464: note = Description of Artificial Sequence: Synthetic coding sequence
  source 1..1464: mol_type = other DNA
atgctgcgggcccccggctgcctgctgcggaccagcgtggcccccgctgccgccctggctgctgcgctactcagttcactcgctagatgctcgcttctggaacctagggatcccgtcgctagcagtctgagcccctatttcgggaccaagacccggtatgaggatgtgaacccagtgttgctgtccgggccagaggccccctggcgcgaccctgagctgttagaagggacatgcacaccagttcaactcgtcgctttgattcggcatggaacacggtatcccacagtgaaacagatccggaaactgcgccaactccacgggctgctccaagcaaggggcagtcgtgacggaggtgcttcttccaccgggagtcgggacctgggcgcggcattggccgactggcctctctggtacgccgattggatggatggccagttggtcgaaaaaggtagacaagacatgaggcaattggccctgcggctggcctccctcttccccgccttatttagccgggagaattatgggcgcctccgactgatcacatcatcaaagcacagatgtatggactcttctgccgcttttcttcaggggctgtggcagcactatcaccctggcttgccccctcctgatgtagccgatatggaatttggcccccccaccgtgaacgacaagctcatgcggtttttcgaccattgtgaaaagttcctgacagaggtcgaaaaaaatgctacggctttgtaccatgttgaggcatttaaaaccggccccgaaatgcaaaatatcctgaagaaggtggctgcaacactccaggtgcccgtgaatgacttgaacgctgacttaatccaggtcgcgtttttcacttgcagttttgacttggccatcaagggggttaaaagcccctggtgtgatgtgtttgacattgacgatgccaaggtgctggagtatctgaacgaccttaagcagtactggaaacgtggctatggctatactattaactcacgctcctcttgcacccttttccaggatatcttccagcacctcgataaggcagtggagcaaaagcagcgtagccagcctatcagttcccctgtgatacttcagttcgggcatgcagagacgctgttgccgctgctgagcttgatgggttactttaaggataaggagccacttaccgcttataattataagaaacagatgcatagaaagttccgctccggcttaatagtcccgtacgcaagtaacctgatcttcgtcctctaccactgtgagaatgcgaagacccccaaggaacagtttcgggtccagatgctcctgaacgaaaaggtcctccccctggcttactctcaagaaaccgttagcttttatgaagacctgaaaaaccactataaggacattctccagtcttgccagacctccgaagagtgcgaactggcccgcgcaaactccaccagcgacgaactgtag

SEQ ID NO: 195784 - DNA, 861 bp, synthetic construct
  misc_feature 1..861: note = Description of Artificial Sequence: Synthetic coding sequence
  source 1..861: mol_type = other DNA
atgtgcctgttccagctgtgcggcctggtgcggtacatggagttcggcccccctaccgtgaacgacaagctcatgcggttctttgaccactgcgagaaattcttgactgaagttgagaaaaacgcgaccgccctttaccatgtggaggcctttaagactggcccggaaatgcagaatatattaaaaaaggttgccgccacgcttcaagtaccagtgaacgatctcaacgctgatctgattcaggttgcctttttcacctgcagcttcgacctggctatcaagggggtgaaatcgccatggtgtgacgtgtttgacatcgacgatgctaaggtcctggaatacttgaatgaccttaagcagtactggaagcgcggctatggttacacaatcaatagccggagcagttgcacgctttttcaggacatcttccaacatctggacaaggctgtagagcagaagcagaggagccagcctattagcagcccagtgatcttacagtttggacatgctgaaacactgttgcctcttctgtcattgatgggttatttcaaggacaaagagccactgacggcctataactataagaagcagatgcacagaaaattccgatcaggactgattgttccctacgcctctaatttaattttcgtgctgtaccattgtgagaacgccaaaactcccaaggaacaattcagggttcaaatgttgttgaatgagaaggtactgccactcgcctattctcaggagactgtctctttctatgaggaccttaaaaatcactataaggacatcctgcaatcatgtcaaaccagcgaagaatgtgaactcgcgcgggctaacagtacctcagacgaactgtag

SEQ ID NO: 195785 - DNA, 1041 bp, synthetic construct
  misc_feature 1..1041: note = Description of Artificial Sequence: Synthetic coding sequence
  source 1..1041: mol_type = other DNA
atggacggccagctggtggagaagggccggcaggacatgcggcagctggctctgcgactggcatcgctgttccccgcattgttttctcgcgagaactacggccgattgcgcttgattacttcctcgaaacaccgctgcatggacagttcagccgcttttctgcaaggcctgtggcagcattatcaccccggactgccaccacctgacgtcgcagacatggaatttggacctccaaccgtgaatgataaactgatgagattcttcgaccattgtgaaaagttcctgacagaggtcgaaaaaaacgccaccgctctgtaccatgtagaagccttcaagaccgggcctgaaatgcaaaatattcttaagaaggtggctgctaccctacaggttcccgtcaatgacctgaacgccgatttgatccaagtggccttttttacatgctcatttgacctcgcgatcaagggagttaaaagcccttggtgcgacgtcttcgacatcgacgacgccaaagtgctggagtatctgaacgacctgaagcaatattggaagaggggctacgggtatactatcaattcacgcagctcatgtacactgttccaggatatctttcagcatctagacaaagctgtggagcagaaacagcgatctcaaccaatctcatcccctgttatcctccagtttggacatgccgagactctgctgccccttctcagcctcatggggtactttaaggacaaagaaccgctgacagcttacaattacaaaaaacaaatgcatcgcaagttcaggtccggcctgatcgtcccttacgcatcgaacctgatcttcgtgctgtaccattgcgagaatgccaaaacgcctaaagaacagtttcgcgtacagatgctgttgaacgagaaggtgctcccactggcgtacagccaggaaacagtgagcttttacgaggatcttaagaatcactataaagacatcctccagagttgccaaacaagcgaggaatgtgaactcgcccgcgctaattccacatccgacgaactctag

SEQ ID NO: 195786 - DNA, 6213 bp, synthetic construct
  misc_feature 1..6213: note = Description of Artificial Sequence: Synthetic coding sequence
  source 1..6213: mol_type = other DNA
atgctggaggccatcgacaagaaccgggccctgcacgccgccgagaggctacagacaaaactgcgcgaacgaggcgatgttgcgaacgaagataagttgtcattgctaaaaagtgtgttgcagtcccccctcttctctcaaatcctgtcccttcaaacttctgtccagcaactcaaagatcaggtcaacatcgcaaccagcgccacatctaatattgaatacgcacacgtcccgcacctttcacctgcggtgatccccactctgcagaatgaatctttcctgctcagccctaacaatggcaacctggaagccctgacgggacccgggatcccccacattaacgggaagccagcctgcgatgaatttgaccaactgataaaaaacatggctcaaggtcgccacgtggaagtgttcgagctgctgaaacccccttctggcggcttgggcttttctgtggtgggcttgagaagcgagaataggggtgaactcggcatttttgtccaggagatccaggaagggtctgtggcccatcgggacggaagactgaaagagacagaccagatccttgctattaacgggcaggcactggaccagacaattacccaccaacaggccattagtatcttgcagaaggccaaagacaccgtgcaacttgtgatcgcacgcggctccttgccccaactggtatctccgattgtctctaggtctccctctgccgcctcaactatctccgcccatagcaatcctgtgcactggcagcacatggagaccatcgagttggtgaacgatggctcaggactgggcttcggaataattggcggtaaagcaactggggtgattgtcaaaactatcctgccaggcggggtggctgaccagcatggcaggctgtgctctggggaccatatacttaagatcggcgacaccgacttagccgggatgtccagcgagcaggtggcccaggtccttagacagtgtggcaatagagttaagttgatgatcgccagaggagccatcgaggaacgcactgctccgaccgcgctggggattaccctttcctcaagcccgacgtccactcctgagctgcgagtcgatgccagtacacagaaaggtgaagaatctgagacctttgacgtggaactaacaaagaacgtgcaaggcctcggcattacgattgccggttatattggcgacaagaaattggaaccctcaggtatttttgtgaagagtattactaaaagctccgctgtagaacatgacgggcgcatacagatcggtgatcaaatcattgccgtcgatggaaccaatctgcaggggtttaccaaccagcaggcagtggaggtgctacgacataccgggcagaccgttctgttgaccctgatgcgcaggggcatgaaacaagaggccgagctcatgagccgggaggacgtgaccaaagatgccgacttatctccagttaatgcatcaatcatcaaggagaattacgagaaggacgaggacttcttatccagtactaggaacacaaacattctgcctacagaggaggagggttacccactcctgagtgcagaaatcgaagaaatagaggacgcccagaaacaggaagccgccctactcactaagtggcagaggatcatgggcattaattacgagattgttgtggcgcatgtgtctaagttttcagaaaatagcggactcgggatctcgctcgaggctacagtgggacaccatttcatcaggtccgtcctgcccgagggcccagtcggacactcgggtaaactattctccggggacgagttgctggaggtcaacgggattacgcttctcggcgagaaccaccaagatgtagtgaatatcctgaaagaactccccatagaagtgactatggtctgttgtcggagaacagtgccacccaccactcagtcagagctggatagcttggacctatgcgatatcgaactgacagagaagcctcacgtggacctcggtgagtttataggcagctccgagactgaagatcctgtgctggccatgacagatgcaggccaatcaactgaggaagttcaggctcctctcgccatgtgggaggctgggattcagcatatcgaattagagaagggcagcaaggggttaggcttttccatcttggattaccaggatccaattgatcctgcctcgacggtgataattatcagatcactagtgcccggcggcatcgccgaaaaagacggacgcttactgcccggcgacaggcttatgttcgtaaacgatgtcaatttagagaattcatccctcgaagaagcagtcgaggccctcaaaggcgcacctagcgggacggttcggatcggggtggcaaagccactgccactgagcccggaagagggatatgtgagcgccaaagaagactccttcctctatccgcctcactcctgtgaggaagctgggcttgccgacaagccacttttccgcgccgatctggcgttggtggggacaaacgatgcggacttagtggacgagtcgacattcgaatcaccctatagcccagaaaatgattcaatttactcaacacaggcgtccattctgtcgctgcacggatccagttgtggtgacgggctgaattacggcagcagcctgccttcgagcccgccgaaagacgtgattgagaatagctgcgatcccgtgttggacttgcacatgagtctagaagaactgtacacacaaaacctgttacagaggcaggatgaaaatactccaagtgttgacatttccatggggcctgcctccggctttaccatcaacgactatactccagccaacgccatcgagcaacagtatgaatgcgagaacactatcgtgtggactgagtcccatctgccgtccgaggtcatttcgtctgccgaacttccgtcagtgctgcccgacagtgcgggcaaggggagtgagtacctgctcgagcagtcctcactggcatgtaacgcagagtgcgtgatgctgcagaacgttagtaaggaatcatttgaaaggaccattaacatcgcaaaaggcaactcctcactggggatgactgtctccgcaaataaagatgggcttggaatgatcgtgaggagtattatccacggaggcgctatttcccgggatgggcgaatagccatcggtgattgcatcctcagcatcaacgaagaaagcacaatcagcgttacaaatgcccaggctcgggccatgctgcgaaggcatagtctgataggtccggacatcaaaatcacatatgtccctgctgagcacctggaggagttcaaaatttccctcgggcagcaatccggccgcgtcatggcccttgacatattctcctcctacacaggacgagacatccccgaactgcccgagcgggaagagggggaaggcgaggagagtgagctgcagaataccgcgtacagcaattggaatcaacctaggagggtcgagctgtggagggagccaagtaaaagcctgggaatttcaattgtcggcggccgcggcatgggtagcagactgagcaacggtgaggtaatgcgaggtattttcattaaacatgtgctggaagactcgcctgctgggaagaacgggaccctgaaacctggagatcgtatagtcgaagtagatgggatggacctgcgtgatgcgagtcatgaacaggcggtcgaggcgatcaggaaagccggaaatccggttgtttttatggtgcaaagtattattaacagaccgcggaagagcccgctcccatccttactgcacaacctttacccaaagtataacttctcctcgaccaatccattcgcagattcactccaaatcaacgcggataaagcccctagccaaagtgaatccgaacctgaaaaagcgcccctctgctcagttccaccccccccaccgtcagcattcgcagaaatgggtagtgaccatacgcaatcatccgcttcgaagatttcccaagatgttgacaaggaggatgagttcgggtatagctggaagaatattcgggaacggtacgggaccttgacaggcgaattgcacatgattgagctcgagaaaggtcacagcggccttggtctttcccttgccgggaacaaagacaggtccaggatgtcagttttcatagtcgggatagaccccaacggcgcagccggcaaagatgggcggctgcaaatcgccgatgaactgctggagattaacggccagatcctctacggacgctctcaccagaatgccagctctatcattaaatgcgcaccctccaaggtgaaaattatattcattcggaataaggatgccgtgaatcaaatggccgtgtgccctgggaatgcggtggaacccttgcctagcaactccgagaaccttcaaaacaaggaaacagagcccaccgtaacaaccagcgatgccgctgtggatctttcttctttcaagaatgtccaacacctcgagctccccaaggatcaaggcgggttaggaatcgcaatcagtgaggaagacaccttgtctggcgtgatcattaagagcctgactgagcacggagtggcagcaacagatggaaggctcaaagtgggcgatcagattctggcggttgatgatgagatcgttgtgggataccccattgagaagttcatttctctcctgaaaactgctaagatgacagtgaagctgactattcacgccgaaaatcctgactcacaggccgtcccatctgcagcaggcgccgcttccggggagaagaaaaattccagccagtccctaatggtgccacagtcaggaagtccagagcccgagtctattcgcaatacttcccggagcagcacgccagcaatcttcgctagtgacccagcgacttgtccgattataccagggtgcgagacaaccatcgagatttccaagggtaggacgggtcttgggctctcaattgtgggcgggtcagataccttgctgggcgcgattatcatacatgaggtttatgaggagggcgcagcatgcaaggacggaaggctctgggcaggcgaccaaattttggaggtgaacggtattgatctccgtaaagcaacacatgatgaggctattaacgttctgcgacagaccccccagcgggtgcggctgacactgtatcgagacgaagccccctataaagaagaagaagtctgcgataccctcaccattgaactgcagaaaaaaccaggcaaaggactcggcttaagtatcgtgggtaagcgaaatgacactggtgtctttgtgtcggacatcgtaaaaggtgggatcgctgacgctgacggccggttgatgcagggtgaccaaattctcatggttaacggagaagatgtgcgcaacgcaacacaggaggccgttgccgcactgctgaagtgttctctgggcactgttaccctggaggtgggccgcatcaaggctggccctttccacagtgaacgcagaccaagccagagctcccaggtttccgagggcagtctctcctcttttaccttccctctctcaggcagttccacctcggagtcactagaatcttcatcgaaaaaaaacgcgctagcttcggaaattcaagggttaaggaccgtcgaaatgaaaaaaggacctaccgattcgttgggcatatctattgccggaggcgtgggaagtcccctgggtgatgttcccatcttcatcgctatgatgcaccccactggcgttgctgcacaaacccagaagctaagagtgggagatagaatcgtaactatttgcgggacatcaacggagggaatgacccatacacaagcagtaaatctcctgaagaatgcctcgggatcaatcgaaatgcaggtggtggccggcggagacgtgtccgtggtgacggggcaccagcaggagcccgctagttcttctctctccttcacaggcctgaccagttcgtctatctttcaggacgatttgggtcctccccagtgcaaatcgatcaccctggaaagaggcccagatgggctggggttttcgattgttggcggctacggctcccctcatggtgaccttccgatctatgttaaaaccgtgtttgctaaaggcgccgcatccgaagatgggaggctgaaaaggggtgaccaaatcatcgcagtcaacgggcagtcccttgagggagttacgcatgaggaggcggtggcaattctcaaaagaactaagggaaccgttaccctgatggtactgagttag

SEQ ID NO: 195787 - DNA, 6213 bp, synthetic construct
  misc_feature 1..6213: note = Description of Artificial Sequence: Synthetic coding sequence
  source 1..6213: mol_type = other DNA
atgctggaggccatcgacaagaaccgggccctgcacgccgccgagcggctccaaaccaaactgcgggagcgcggagacgtcgcgaacgaagataaactgtctcttctgaaatctgttttgcagagtcccctctttagtcaaatactctccttgcaaaccagcgtgcagcaactcaaagaccaggtgaatatcgctacatctgcgactagtaacatcgaatacgctcacgtcccacatctctctcccgctgtgatccccactttgcaaaacgaatccttcctgctgtctcccaataatgggaatctggaagcgcttaccggcccaggtattcctcacataaatggaaagcctgcgtgcgacgagttcgatcagcttattaagaacatggctcaagggagacacgtagaggtatttgaattgctgaaaccaccatccgggggattaggcttttccgtcgtcggactccgctctgagaatcgcggcgaactggggatttttgtgcaagaaattcaggaaggctccgtggcccatagggatggccgcctgaaagagaccgaccagatcttagctatcaatggccaggcattggaccagaccatcacacaccagcaagcaatttccatcctgcagaaggcaaaagatactgtccagctagttatcgcacgtggctccctgccccagctggtcagccctatcgtttctcggtctccatccgccgcatcaactatctctgcccattccaacccagtgcactggcaacacatggaaaccattgagctggtgaacgacggctcaggtctggggtttggcataatcggtggaaaagctacgggggtgatcgtcaagaccatactgccagggggtgtcgctgaccagcacggtcgcctttgtagcggagaccatattctgaaaatcggggacacagacctcgctggcatgagcagtgaacaggtggcacaggttctcagacagtgcggcaaccgcgtcaagctcatgatcgcccggggcgctatagaggagagaacagcccccaccgccctcggcatcaccttaagttcaagccctacatccacccctgaactgcgagtagacgcgtccacacagaaaggagaagagtcagaaacttttgatgtggagctaaccaaaaatgtgcagggacttgggataactatagccgggtatattggtgacaaaaagcttgagccatccggcatctttgtcaaatccattactaaatcctctgcagtcgagcatgatgggcggatacagatcggggaccagatcatcgccgtggacggcacgaacctccagggattcactaatcagcaggccgtcgaggtcctgcgtcacacgggtcagactgttctgctaacactgatgcggagagggatgaagcaagaggctgagctgatgtcacgcgaggatgtgaccaaagacgccgacctctcaccggtgaacgcctctatcataaaggaaaactacgaaaaggacgaggacttcttgtctagcactcgtaatactaacatcctgcctaccgaagaagaaggatatcctctcttatctgcagagatagaggaaattgaagatgcccaaaagcaggaggcagcgttgcttactaaatggcagaggattatgggtattaactacgagatagtggtggctcacgtgtcaaagttttcagagaactctggtctcgggatatcgctagaggcgacagtgggacatcactttatacggagcgtactgcccgaggggcccgttgggcatagcgggaaactcttttctggcgacgagcttctggaggtcaacggcattacattgctcggagaaaaccatcaggatgtggtaaatattctgaaggaactccccatcgaagttaccatggtgtgctgccgacggaccgtccctcctactacacagtccgaactggactctcttgatttatgtgacatcgagctgaccgagaaaccacatgttgacctgggcgagttcatcgggtcctcagagaccgaggatccggtgcttgcaatgacagacgctggtcagtctacggaagaagtacaggcccctttggctatgtgggaagccggcattcaacacatcgaactcgagaaaggatctaagggcttgggattttcaattctcgactaccaagaccccattgaccccgcatccacagtcatcattatacggagcctggtaccgggcggcatcgcggaaaaggacggcaggctgctccctggcgatcggctcatgtttgtgaacgacgtgaacctggaaaacagtagtttggaggaagccgtggaggcccttaagggtgctccttcggggactgtcaggataggcgtagccaaacctctgcccctcagtccagaggaaggttacgtgtctgccaaggaggacagcttcttgtatccacctcactcctgtgaagaggccggcctcgcagacaaacccttgttcagggccgatttggcccttgtggggactaatgatgcagaccttgtggatgagtccacattcgaaagtccttacagccctgagaatgacagtatctatagtacccaagcctctatcctgtccttgcacggctccagttgcggggatggcctgaattatggctccagcctccctagttcaccccctaaagacgtaatagagaactcctgtgatcctgttctggatctacatatgagtctagaggaattatatacccaaaacctactgcagagacaagatgagaataccccatctgtcgatatttcaatgggccccgccagcggattcactatcaatgactacacaccagccaacgcgatagaacagcagtatgagtgtgaaaatacaatcgtctggacggaaagccacctgccgtcggaggttataagctccgctgaactcccaagtgtgttgccggattccgctggaaagggatctgagtaccttcttgaacagtcttcactcgcatgtaacgccgaatgtgtaatgctgcagaacgtgtccaaagaaagttttgagcggacaataaacatcgccaagggaaatagctcgctgggaatgaccgtttctgctaataaggacggcttaggcatgatcgtgagatccattattcacggaggggcaattagtagagatggcaggatagccataggcgactgtatactatccattaacgaggagtcaaccataagtgtcactaacgcccaagcccgagctatgctgcgaagacactcactgattggccctgacattaagatcacttatgtcccagccgagcatctggaggagtttaaaatttctctcggccaacagtccggacgggtcatggcacttgatatcttctcaagctacacaggcagagatatacctgaattacctgaaagggaagagggggaaggagaggagagcgagctgcagaatacggcctatagcaattggaatcagccgagacgggttgagctttggcgggagccatctaaaagcctgggcatcagtatcgttggcgggcggggcatggggagccgcctaagtaacggtgaggtgatgcgggggatctttattaagcacgtcctggaggattctcccgctggaaaaaatggaacgttgaaacccggtgatcgaatcgttgaagtcgacggaatggatttacgtgacgcatcacatgagcaggcggtggaagcaattcgcaaggcaggcaatcctgtcgtgttcatggtgcagagcatcatcaataggccacggaagagtccattaccaagtctgctgcataatttgtaccccaagtacaacttttcaagcacaaacccttttgctgacagcctccagatcaacgccgataaagccccttcccagagtgaaagtgagccagaaaaagcccctctctgctccgtaccaccacctcccccctctgcatttgcagagatggggtcagaccatacgcagagttctgctagcaaaataagccaggacgtcgataaggaagatgagtttggttactcttggaaaaatattagggagcgctatggtacactaactggggaacttcacatgattgaacttgagaaagggcactctggcctgggtttgtcgttagccggcaataaggaccgctctaggatgtcagtctttattgtgggaatagaccctaacggcgcagctggcaaggacggcaggcttcagatcgccgacgaattactggagataaacggacagatactttacggtcgcagtcatcagaatgcctctagtatcatcaagtgtgccccttccaaggttaaaatcatatttatccggaacaaggacgccgtgaaccagatggcagtgtgtcctggcaatgccgtggaacccttgccaagcaattccgaaaatcttcagaataaggaaactgagcccaccgtgactaccagcgatgccgccgtggacctgtccagcttcaagaatgtgcaacacttagaactgcctaaagaccaaggcgggctgggcatcgctatcagcgaggaagataccttaagtggagtgatcatcaaatctctgacggaacacggagtggctgctactgacggcaggctgaaagttggagaccagatcctggctgtggatgacgaaatcgtcgtaggatacccaattgagaaatttataagcctcctgaagacagcaaagatgactgtcaagctaacaattcacgcagaaaacccagacagtcaggccgtcccttccgcagctggcgccgcatccggggagaagaagaactcttcccagtctctgatggtgccccagagcgggtctcccgaacctgagtctatccggaacacctcaagaagttctactcctgccatttttgctagtgacccggctacatgccctatcatccccggatgcgagactactatcgaaatctccaagggtaggacgggtctgggattgtctattgtgggcggttctgatactttgctgggcgctatcattatccatgaagtgtatgaggagggggctgcttgcaaagacggtagactgtgggcgggtgatcaaattctggaggtcaacggaattgacctgaggaaagcgactcatgacgaggccataaacgtgctgcgtcagacaccacaaagggtgcgcttaaccctgtatcgggatgaagcaccctacaaagaggaggaagtttgcgatacactaaccatcgagctgcaaaaaaagcccggcaaaggactgggtctgagcatcgtcggaaaacgcaacgacaccggcgtatttgtgtccgatatcgtaaaaggtggtattgcagatgcagacggcagactaatgcaaggcgatcagatcctgatggtaaatggcgaggacgtgaggaatgcaacacaggaagcagtggcggcgttgctgaagtgctcactcggtaccgttacccttgaggtgggaaggatcaaagccggtcctttccattctgagcgccggcccagccagagcagtcaggtctccgaagggtccctttcctcttttacatttccactctccggctccagcaccagtgagtccctcgaatcttcatcaaaaaaaaatgccctggccagcgagattcagggcttgcgaacagtggaaatgaaaaaggggccgaccgactccttgggaatatctatcgccggaggggtgggatcaccgctgggtgatgtgcctattttcatcgctatgatgcatcccacaggcgtggctgcgcagacccagaaactgcgggttggcgatcggattgtcactatatgtggaactagtactgagggtatgacacacacacaggcggtgaacctgcttaaaaacgcctctgggagcatcgagatgcaggttgtcgccgggggagacgttagcgtagttaccgggcaccagcaggagccggcatccagctctctcagttttacaggccttacttcttccagtatcttccaagacgatctaggccccccccagtgcaagagcattacacttgagagggggccagatggactgggcttcagcatcgtgggcgggtacggcagtcctcatggggaccttcctatttatgtgaagaccgtgtttgcaaaaggggccgctagcgaagacggacggctcaaaagaggtgaccagatcatagcagtgaacggtcagtctctggagggagtgacacatgaggaggctgtagcaatcctgaaacgtacaaagggcactgtgacgcttatggttttgagttag

SEQ ID NO: 195788 - DNA, 6126 bp, synthetic construct
  misc_feature 1..6126: note = Description of Artificial Sequence: Synthetic coding sequence
  source 1..6126: mol_type = other DNA
atgctggaggccatcgacaagaaccgggccctgcacgccgccgagcgactgcagacaaagctcagggaacggggtgacgtggcaaatgaggacaagcttagtctgctgaaatccgtgttgcagtcacctctttttagccagattctcagcttacagactagtgtgcagcagcttaaagatcaggtcaatattgccacgagcgcaacatcgaatattgagtatgcacacgttccgcatttatccccggcggtgataccaactctgcagaacgaatcttttcttctctcacccaacaatggaaacttagaggcactgaccggacctggcatcccacatataaatggcaagcccgcctgcgacgagttcgaccagttaattaaaaatatggcacaggggagacacgtcgaggtcttcgagttgcttaagccgcctagcggagggctgggattttccgtcgtggggctgaggtctgagaaccgcggggaattggggatttttgtgcaagaaatacaggaaggatcggtggcccaccgagacggacggctaaaagagacagaccaaattctggccatcaacggccaagccctagatcaaactattactcaccaacaggctatcagcatcttgcaaaaagctaaggatacagtgcagctcgtcattgcccgcggatctttaccccagctcgtgtcacccattgtctctagatccccatccgcagcctctactatctcagcccactcgaaccccgtgcattggcagcatatggaaacgattgaactggtaaatgacggctctggactgggctttggaatcatcggcggtaaagctacaggtgtgatcgtgaaaacaatcttacccggtggcgtggcagaccagcatgggcgactttgctccggcgatcatattctgaagatcggtgatacagacctcgctgggatgagctccgagcaggttgcccaggtcttgcgacagtgcggtaacagggtaaaattgatgattgcccggggcgcaatcgaggagcggacagcgccaaccgccctgggcatcactctctcaagcagcccaactagcaccccagaacttagggtggacgcaagcactcagaagggtgaagagtcggaaacctttgacgtggaactgacaaagaacgtccagggactcggtatcaccattgcaggatatatcggcgacaaaaagcttgaacctagcgggatcttcgtgaagagtataactaagtcttctgctgtggaacatgacggcaggatccagataggggaccaaattatcgctgtggacggtaccaatctacaggggtttaccaaccagcaagcagtcgaagtcctccgccatactggtcagaccgtgcttctcacgctaatgcgacggggtatgaaacaagaagccgagttgatgtcccgcgaggacgtaacgaaagacgccgacctctcaccagtcaacgcaagcatcattaaggaaaactacgagaaggacgaggacttcctctctagcacacggaacacgaatatccttcctacggaggaggagggatatcctctgctgtccgccgaaatagaggagattgaggatgctcagaaacaggaagcagcactgctcactaaatggcaaagaataatgggtatcaattacgaaatcgtcgtggcacatgtgtctaagttttccgagaattctgggctgggcatatcactcgaggcaaccgtggggcatcacttcattcgctcagtcttacccgagggccctgtgggtcattcggggaaattattcagtggagatgagctgctcgaggtgaatgggattactctactcggcgagaaccatcaggacgtagtgaatatcctgaaagagcttccaattgaagtaaccatggtgtgctgtagaagaactgtcccgccaacgacccaaagcgaactagattctttagacctgtgtgacatcgaattgacagaaaagcctcacgttgatcttggagagttcatagggtctagcgaaacagaggaccccgtgctggccatgaccgacgcaggccagagtaccgaggaggtgcaagcgcccttggccatgtgggaggcgggaattcagcacatcgagctggaaaaaggcagtaaagggctgggcttcagcatcctggactaccaggaccccatcgaccctgcaagcactgtcattatcatccggagcctagttccggggggtatcgcagagaaggatggaagactgctgcccggtgaccgcttgatgtttgtcaatgacgtgaacttggagaatagttctctcgaagaagccgttgaagccctgaagggagccccatccggaactgtacggattggtgtggccaagccactgcctttgagtcccgaggagggatatgtgagcgccaaagaggactcatttttataccccccgcatagctgtgaggaggctgggctggccgataagccactgttccgggccgatctcgccctagttgggacaaacgatgcagatctggtggatgaaagcacatttgaaagcccctactcgcccgagaatgatagcatttacagcacgcaggccagtattttgagtctgcatggcagcagctgtggagatggactgaattatggcagttctctgccttcgtccccccctaaggacgtaatcgagaattcatgcgaccccgttctggatcttcacatgtcactcgaggagctttatacccagaatctgctgcagcgacaggatgaaaacaccccctctgtcgatatcagtatggggcccgccagcggatttactataaacgactacacacctgccaatgccatcgaacagcaatacgagtgcgaaaatactattgtctggaccgaatcccaccttccctcggaagtcatctcttctgcagagctcccctccgtgctgccagattccgccggcaagggttccgaatacctgctggagcagagctccctggcctgtaacgcggaatgcgttatgctccaaaacgtctcaaaggagagctttgagaggaccatcaatattgcaaagggcaatagcagcctgggaatgactgtgtctgctaataaagacggattggggatgattgtccggtccatcatccacggcggagccatatctcgcgatgggaggattgcgataggcgattgcatactatcaattaatgaggagtccacaatctcagtcacaaatgcacaggcccgcgctatgttgcgtaggcactcgctaatcggtcccgacattaaaatcacctacgttccggctgagcacctagaggaatttaagataagtctcgggcaacagagcggcagggtgatggcgctagacattttttcttcctacactggccgggatatccccgagctgccagagcgagaagagggcgagggggaggaaagtgagcttcaaaacacggcctacagcaattggaaccagccacgcagagtggagctgtggagggaaccatctaagtcactgggaatctccatcgtggggggcaggggcatggggtcaaggctgtccaacggagaggtcatgcgtggcatctttatcaagcatgtccttgaggatagcccggctggtaagaacgggactctgaagccgggcgataggattgtcgaggtggacgggatggatctcagagacgcgagtcatgagcaggcagtggaagctatacggaaagctggcaacccagtggtctttatggtgcagtccatcatcaaccgtcccagaaaatccccactgccttccctccttcataatctgtatcctaaatataatttttccagtacaaatccgtttgctgactctctccaaataaacgctgataaagcgccctcccagagcgagagtgagcctgaaaaagccccgctgtgttcagtgcctcccccaccgcccagcgcctttgccgagatggggagtgatcacactcagtcgtccgcctctaagattagccaggatgtggataaggaggatgagtttggatattcatggaaaaacattcgggaacgatacgggacccttaccggcgagctgcacatgatcgaactagagaaaggacacagtggcctcggcctgtcacttgctggaaacaaggaccgttctagaatgtccgtgtttatcgttggaatcgatccaaacggcgctgcgggtaaggacgggagactgcaaatcgcagatgaactgctggagatcaacggccaaattttatatggaaggtctcaccaaaatgcatctagcatcatcaagtgcgcgccttctaaggtcaagattatttttatccggaataaagacgccgtcaaccagatggccgtgtgccccggtaatgctgtggaacccctgccaagcaactccgagaacctgcaaaacaaagagacagagcctacagtgacaaccagcgacgccgcagtagatctgtcttctttcaagaacgtacaacacctcgagctgccaaaggaccagggtggtctggggattgctattagtgaggaagacaccctctccggtgtgataattaagtccctgacagaacacggggtggccgccaccgacggcagattgaaggtaggcgaccagatcctcgctgtggatgatgagatagtcgtcgggtatcccattgagaagttcatttcattattgaagaccgcgaagatgacggtcaaactcactattcacgctgagaatcccgactcgcaagcagtgccgagtgccgcaggggccgcaagcggagaaaagaagaatagcagccaatccctgatggtgccccagagcggcagtcccgaacctgaaagcattcgtaatacaagtaggtcaagtacaccagcaatttttgcttccgatcctgctacttgccccattatcccaggttgcgagaccactatcgagatctccaaagggagaacgggactcggactgagcatcgtaggtgggtccgacactctactcggggcgataataattcatgaggtgtatgaggagggagctgcatgcaaagacggccggctgtgggccggcgaccaaatcctcgaagtgaacggtatcgacctgaggaaagctacacatgatgaagctatcaatgttcttagacagactcctcagcgagtgcgtctgacgctgtatcgagacgaggctccatataaggaggaggaggtttgtgacactctgactattgagctgcaaaaaaagcccggtaaggggttgggtctctcaattgtagggaaacggaacgacacaggagtatttgtgtcagacatagtcaagggtggaatcgccgacgccgacgggcggctgatgcagggagaccagatcctgatggttaatggggaggatgttcgtaatgcaacacaggaagccgtggccgcgttactaaaggtgagtgagggatccctctcatcttttactttccccctgagcggctctagtacttcagaaagcctggaatcatccagtaagaaaaacgctctggccagcgagattcaggggctgcggaccgtggagatgaaaaaaggacccactgattccctgggtatttccattgccggcggagtgggatctccactaggtgatgtaccaatctttatcgccatgatgcaccccacaggtgttgcagcacagacgcagaagctgcgtgttggggaccgcatagtcacaatttgcggaacgagtaccgaaggcatgacccacacacaggctgtcaatctgttaaagaatgcttctggttcaatcgaaatgcaggtggtggctggtggggacgtctctgtggtgaccgggcatcagcaggaaccagcttcgtcaagcctgtcgttcactggcctgacctcttcctccattttccaagatgaccttggtcctcctcagtgcaagagcattactttggaacggggcccggacggactgggattttctatcgtcggtggatacggttctccccatggtgatttgccaatctacgtgaaaacagtattcgcgaaaggcgcggctagcgaggatggacggctgaagcgcggagatcagataatcgcagtcaatggacagagtctggagggcgttacccacgaagaggcagtcgctattttaaagaggacaaagggcaccgttactttgatggtgcttagttag

SEQ ID NO: 195789 - DNA, 5853 bp, synthetic construct
  misc_feature 1..5853: note = Description of Artificial Sequence: Synthetic coding sequence
  source 1..5853: mol_type = other DNA
atgctggaggccatcgacaagaaccgggccctgcacgccgccgagaggctgcagacaaagttgcgcgagcgcggggacgttgccaacgaagacaaactctccctcttgaagagcgtgctccagagcccactattctcccagatcctgagtttgcagacgtctgtgcaacagttaaaggaccaagttaatatcgcaactagtgcaacctccaacatcgagtatgctcatgttccacacctgtctccagccgtgatccctacgctccagaatgagagttttctcctgagccccaataacgggaacctcgaggcccttactggccccggaataccccatatcaatggaaagccggcttgcgatgagtttgatcaattgataaagaatatggcacaggggcggcatgtggaggtgttcgaattgctgaagcctccctctggaggtttaggtttttcagtcgtcggtctgaggagtgagaatcgcggcgagttgggcatattcgtgcaggaaattcaggagggttcggtagctcacagagatggacgccttaaggagacggaccagatactggccatcaacggccaggcccttgaccagacaataacccaccaacaagccatctccatcctgcagaaagcaaaagatacagttcagctcgtaatagcacgtggcagtctcccacagctggtgagcccaattgtgagccggtccccttcagcagcctctactatatcggcgcacagtaatcctgttcactggcagcacatggagacgatagaacttgtcaacgatgggtccggtcttggctttggcattattggggggaaggcaaccggagtgattgtgaaaactatcctccctggcggagttgctgaccagcatggacgactttgctcaggcgaccacatattgaaaattggcgatactgatttggccggaatgtcatccgaacaggtcgcccaagtgctccgacaatgtggaaatagggtgaaactgatgatcgctcgcggggccatcgaggagcggaccgctccgaccgccctgggcatcacactgagttcttcccccacttctacccctgaactgcgagtggacgcctctacccagaagggtgaagaatctgaaacgtttgacgtggagctgacaaaaaacgtgcagggcctaggcatcaccatcgccggctacattggagataaaaagctggagccatctgggatattcgtcaaaagcatcaccaaaagcagcgccgtcgagcatgacgggcgcatacaaatcggggatcagatcatcgccgtggacggcacaaaccttcagggctttacaaatcagcaggctgtcgaggtgctcaggcacacgggtcagaccgtgctattaactctgatgcgcagaggaatgaagcaggaggcagagctcatgtcccgagaagacgtcaccaaggacgctgacctgagcccagtgaatgcatcaattatcaaggaaaactacgagaaggatgaagatttcttatcttccactcgcaacaccaatatccttcccacagaggaagagggatatcccctgttgagcgctgagattgaggagatcgaggatgcccaaaagcaggaagcagcactcttgacaaagtggcaaaggattatgggtatcaattacgagattgtcgtcgcgcacgtatctaaattttcggagaattccggcttgggcatttcacttgaggctacagtcggccaccacttcattaggagtgttctgccggaggggcctgtcggccactccggtaagctgtttagcggggatgaactcctggaagttaacggcatcacactgctgggggaaaaccaccaagatgtggtgaacattttgaaggaattgcccatagaggtgaccatggtctgctgtaggcggacagttccgccaaccacgcagtccgaattggattcactgggaatccaacatatcgagttagagaaaggatccaaaggcctgggcttctctatccttgactaccaagatcccatagatccagcaagcacagtcattattatccgtagcctggtgcccggaggcattgcagaaaaagatggccgtttgctgcccggcgacagactgatgtttgtcaatgatgtgaatcttgagaactccagcctggaggaggccgttgaagcccttaaaggcgcaccgtccggcactgtcagaattggcgtcgctaagccactccctttatccccggaagagggctatgtgagtgctaaggaagattccttcctgtaccccccccacagctgtgaagaggcaggcctggcggataaaccactgttcagggccgacctcgctcttgtcggcactaacgacgctgacctggtggacgagtccactttcgaatccccttacagccccgaaaacgacagcatttactcaacacaggccagcatcctttctttgcatggatctagctgcggagatggtctgaattatggaagctctctcccgtcctccccccctaaggatgtcatagagaattcatgtgaccccgtgctggaccttcacatgagcttggaagaattgtatacacagaacttgctgcagcgccaagacgaaaacactccaagtgtggatatctcaatgggacccgcttccggtttcactattaacgattacacaccggcaaatgccatagagcaacagtacgagtgtgagaataccatcgtgtggacagagtcgcatttgccttcagaagtcatttcttctgctgaactacccagcgtgttaccagactcagccggcaaagggtccgaatacctgctagagcagagcagtctcgcctgcaacgcggagtgcgtcatgctacagaacgtcagcaaggagagtttcgagagaaccatcaatattgcaaaaggcaattccagtctgggcatgacggtatctgccaataaggacggcctgggtatgatcgtcaggagcatcatacacggaggggccatatcgcgagacggtcgcatcgcaattggagattgtattctgagcattaacgaagagtccactatcagcgtgacaaacgctcaggcaagggctatgttacgaagacattccctgatcgggccagatataaaaattacctacgtgcccgcagaacaccttgaggagttcaaaatctctttgggtcagcaatcagggcgggtgatggccctggatatattttcctcttataccggcagggatataccggagctgcccgagagggaggagggcgagggagaggaatccgagctccagaatactgcgtacagtaattggaaccaaccccgcagagttgaactctggcgggaaccgtctaaatcacttgggatttcaattgtggggggtaggggcatgggaagcagactctcgaacggagaagtaatgagagggatctttattaagcacgtgctggaagacagtccagcaggcaagaatggtactctaaagcctggggacagaattgtggaggctccaagtcagagcgagagcgaaccagagaaggcacctttgtgtagtgtgcctccccctcctcccagtgcctttgctgagatgggatcagatcatacccaaagctctgcctcaaagatctctcaagacgtcgataaagaagacgagttcggctattcatggaaaaacattagggagcggtatgggacattgactggcgaattgcacatgattgagctggagaagggccatagcggactgggattatctctggcaggcaataaggataggtcccggatgtctgtgtttattgtcgggatagatccaaacggagcggccggcaaagatggcagactccagattgctgacgagctgctcgagatcaacggccaaatcctgtatggccgctcccatcagaacgcaagtagcatcattaaatgtgcacccagcaaagtgaaaatcatatttatcaggaataaggacgctgtgaatcagatggccgtatgcccaggtaatgccgtggagccgctacctagcaattccgagaacctgcagaacaaggaaaccgagccaactgtgacaacgtccgacgccgctgtcgacctgtcatccttcaagaacgtgcaacaccttgagctgcctaaggaccagggtgggcttggaattgccatatccgaggaggacacattgagtggggtgattattaagagcttgacagagcacggggttgccgccactgacggaagactcaaggtcggcgaccagatcctggccgtggatgatgagattgtggtcggttacccaatcgaaaagttcatcagccttctgaagactgctaagatgacagttaagttgactatacacgccgagaatcccgattcacaggcagttccgtcagcggctggcgccgccagcggcgaaaagaaaaactcatcacagtccctcatggtacctcagagtggaagcccagaacctgagtccatacgcaatacatcccggagcagcacccccgcgatcttcgcgtccgacccagcgacgtgtcccatcatccctggatgtgaaaccaccattgaaatctccaaaggccgcacgggcctgggcctatcaatcgttggtgggagcgacactcttttgggggcgatcataatccacgaggtgtatgaggaaggagccgcttgtaaagatggcaggctctgggctggagaccagatactagaggtgaatggcatcgatctgcggaaggccacccacgacgaagcgataaacgttcttaggcagacccctcagcgggtacgactgaccctgtaccgtgacgaagctccctataaagaggaggaagtgtgcgatacgctgaccatagaactccagaagaagcctggaaagggactcggactatccatcgtgggcaaaaggaacgatacaggcgtgttcgtcagtgacattgttaagggtgggatcgctgacgccgatggacgccttatgcagggtgatcagatcctgatggtgaacggagaggacgtccgcaacgcaacacaggaagctgttgctgctctcctgaagtgctcactcgggactgttacgcttgaggtcggtaggatcaaggcggggccgtttcatagtgaacgcaggcccagccagtcttcacaggtcagcgagggatctctgtcaagtttcacgttcccactcagcggatcttcaacctccgagagcctagaatcctccagcaagaaaaacgcgttggcttcagagatccaggggcttcgaaccgtggaaatgaagaagggccccacagattcactcgggatatcaatcgccggcggggtcggctcgcccctcggagacgttcccattttcattgctatgatgcacccaaccggggtcgctgcacagacccagaagctcagagtcggagacaggattgtgacaatctgcgggacaagcaccgaaggcatgacccatactcaggccgtcaatctgctgaagaacgcctcgggatcaattgaaatgcaggttgtcgctggcggggacgttagcgtggtgactggacaccagcaggaacctgcatcatcttcactctcctttacagggctgacatcttcctctatttttcaagacgatctgggccctccacagtgcaagagcatcactttagaacgaggcccagatggcctggggttttccatcgtcggtggttacggctccccacatggagatctgcccatttacgtgaaaactgtgtttgccaagggagctgcttctgaggacggtcggctcaaacggggcgaccagattatcgctgtgaatggccaaagcctggaaggagtgactcacgaggaggcggtagccattttaaaaaggacaaaagggaccgtgacactcatggtactgtcttag

SEQ ID NO: 195790 - DNA, 915 bp, synthetic construct
  misc_feature 1..915: note = Description of Artificial Sequence: Synthetic coding sequence
  source 1..915: mol_type = other DNA
atgcagggcgaccagatcctgatggtgaacggcgaggacgtgcggaacgcaacccaggaggccgtcgctgccctcctcaaatgttccttagggaccgtgaccttggaggtgggacgcattaaggctggaccgtttcattctgagcgaaggccaagccaaagctcccaggtttcagaaggctctctgagctcattcaccttccccctaagtggaagtagtacgtccgagtccttggaatcgtcttccaagaagaacgctctggcctccgaaatccagggactgaggacagtcgaaatgaagaaggggccaaccgacagcctcggcatctcgatagccgggggagtcggctcacccctgggcgatgtaccgatcttcattgcaatgatgcatccaacaggcgtggctgcacagactcagaagcttcgagtgggagacaggatcgttacaatttgcggcactagcaccgaaggtatgactcacacacaggctgttaacctccttaagaacgcgagtgggtctatagaaatgcaggtggtagccggaggggatgtcagcgttgtcacgggtcaccagcaggagcccgcctcgtcatccctctcgttcactggtctgacaagttctagcatcttccaggacgatctggggccgccccagtgtaagagcattacgctagaacgtggccctgacggtctggggttctctattgtgggcgggtacggaagcccccatggcgatttgccgatttacgtgaagacagtgttcgcaaaaggagcggctagtgaggatggccgtctgaaaaggggagatcagattatcgcagtgaacggacagagcctggaaggcgtgacccacgaagaagctgttgccattctcaagcgcactaagggtactgtaaccttaatggtcctttcgtag

SEQ ID NO: 195791 - DNA, 6126 bp, synthetic construct
  misc_feature 1..6126: note = Description of Artificial Sequence: Synthetic coding sequence
  source 1..6126: mol_type = other DNA
atgctggaggccatcgacaagaaccgggccctgcacgccgccgagcgattacagaccaaactcagagaaagaggtgatgtggccaatgaggataaactttctctactaaagagcgttctgcagtctccactgttctctcagatcttgtcactacagacttctgtgcagcagcttaaggatcaggtaaacatcgcgacatcagcaacatcgaacatagaatacgcccacgttccccacctctcccccgcggtgatccctaccctgcaaaatgaatcattccttctctcaccaaacaatggcaatctcgaggccttgacaggcccgggcattccacacattaatggaaagcccgcatgcgatgagtttgaccaactcattaagaacatggcacagggacggcatgttgaagtttttgaactgttgaagccacctagcggcgggttgggcttctctgtcgtaggtctacggtcagagaatagaggcgagctgggaatctttgtacaggagatccaggagggttcagtcgctcatcgtgatgggcggctgaaggagaccgatcagatactagccatcaacggacaagcgctggaccagacaatcactcatcagcaggctatcagtatccttcaaaaggccaaggatacagtccagttggtgatagcaagagggtccctaccacagctcgtgagcccaatcgtcagccggtctccatcggccgccagtaccattagtgcccattccaacccagttcattggcaacacatggagaccattgagctggtgaatgacggttcaggcctgggattcggcattataggcggtaaggctactggagttatagtcaagactatcctgcccggcggcgtggcggaccaacacgggagactctgctcaggggaccacatcctcaagataggcgacacggacttggctgggatgagctccgagcaggttgcccaagtcctgcggcagtgcggcaatagggtgaagctgatgatcgccaggggggccatagaagagcgcaccgcacctaccgccctaggcatcacactgagttcctctcccacttccacacctgaactgagggttgatgcctccacacagaagggggaggagtccgaaaccttcgacgtggagctgactaagaatgtgcaaggactaggtattacaatcgccggatacatcggcgacaaaaaactggaacccagcgggattttcgtgaagtctataaccaaaagcagcgccgtggagcatgacgggaggatccagatcggggatcaaatcatcgcagtggacggcacaaatctgcagggatttaccaatcagcaggcagtggaagtcctgcggcataccgggcagactgtgctgttgaccctgatgaggcggggtatgaaacaagaggcagagctaatgtctcgcgaggatgttacaaaggacgccgatctctctccggtaaacgcaagtatcattaaggagaattatgagaaggacgaagatttcttgagttctacaagaaataccaatattttacctactgaagaggagggttaccctctactgagcgccgaaatcgaggagattgaggacgcacagaagcaggaggctgccctcctaacaaagtggcagcggatcatgggtatcaattacgaaattgtcgtggcgcacgtgagcaagttctcggaaaacagcgggctgggcatttccctcgaagcaaccgtgggccatcactttatccggtctgtgctgcccgagggacccgtaggccacagcggaaaactattctctggcgacgagctgctcgaagtcaacggtatcactctgcttggagaaaaccaccaggacgtagtgaacatactgaaagaacttcctattgaggtgacgatggtctgctgccggagaaccgtcccacctacgacccagtctgagctggattcactggatctctgtgatattgaactcacggagaaaccacacgtcgacttgggggaattcattgggagctccgaaactgaggaccccgtgctggcgatgacagatgcaggacagagcacagaggaagtgcaggcgccactggctatgtgggaggctggcatacaacacattgagctcgaaaagggcagcaagggtttaggcttttcgatccttgattaccaggatcctatcgatccagcctcaaccgttatcatcattcgctcactggtcccaggaggcattgctgagaaagatggtaggttactgcccggagatcgacttatgttcgtcaacgatgtaaatttagagaatagcagtctggaagaagctgttgaagccctgaaaggagcgccttccggaacagtgagaattggcgtggctaaacccttgccactgtccccagaggaaggatacgtaagcgccaaagaggacagcttcctgtatcccccacacagctgcgaagaagccgggctggcagacaaacctctatttcgcgcagacctggctctcgtcggcactaacgacgcagacctggtcgacgaatcaacgtttgagtctccctacagtccagagaatgacagtatttactcgacacaggcttcaattttgagtcttcatggatcttcttgtggcgatggattgaattacggatcatctcttccgtcaagcccaccaaaagacgttatcgagaactcttgtgaccctgtgttggacctgcacatgagcctggaagagctgtatacacaaaacttactgcagagacaggatgagaacaccccaagcgtggatatttccatgggtcccgcttcaggatttacgataaacgactacacccccgctaatgccatcgaacagcagtacgaatgcgaaaataccatcgtctggacagaatcacacctgcctagtgaggttatctcaagcgcggaactcccctcagtgctgcctgactctgccggcaagggctctgagtatctcctagagcagagctcactcgcatgtaacgctgagtgtgtaatgttgcaaaacgtctctaaagagtcattcgagcgcacgatcaatatagccaagggcaatagctcccttggaatgaccgtgagcgccaacaaggacggcctgggtatgattgtcaggagcatcatccatggaggagccatatcacgggacggtaggatcgctattggcgactgcatcttgtctataaacgaggagtccacgatatctgttacaaatgctcaagcgcgcgcaatgctgaggaggcactcccttattgggcctgacattaagataacatatgtgccggctgagcacctcgaggaattcaagatcagcctggggcaacagtctggcagggtgatggctcttgatatctttagtagttacacaggacgggacatacctgaactccccgaacgggaggagggcgagggtgaggaatctgagctgcagaatacagcatactctaattggaaccagccacggcgagtggaactatggcgggaacctagtaagtcactgggtatatccattgtgggcggccggggcatgggctctcgactgtctaacggggaggtgatgagaggaatttttattaaacacgtcctcgaagactctcccgctgggaagaatggcaccctaaaaccgggcgaccggatcgtggaagtggacggaatggacctcagggatgccagccatgagcaggccgtggaagccatacgcaaggcaggaaatccagtggttttcatggtgcagtccatcatcaaccgacccagaaaatcgccgttgccatctctgttgcacaacctgtatcctaagtacaatttcagcagcaccaatccgtttgcagactcactgcagattaatgccgacaaggctcccagccaaagcgaatctgagcccgagaaggcccctttatgcagtgtcccgccccctcccccttccgccttcgccgaaatgggatcggatcatacacagagttctgcatccaagatttcccaagatgtggataaagaggacgagtttggatatagttggaaaaacattagggagcgctacggtactctcaccggcgaattgcatatgatcgaactcgaaaaggggcactcaggtctgggactcagcctggcagggaataaagataggagcagaatgtctgtttttatcgttgggatcgatcccaacggcgctgctggtaaagatggtagactgcagatcgccgatgagctcttggagattaacggccagatattgtatggccggtcccatcagaacgcctctagcattatcaagtgcgcaccttcaaaggtgaagattattttcatccggaacaaggacgccgtgaatcagatggcggtctgcccgggaaatgcagtagagcccctgcccagtaacagtgagaatctccaaaacaaagagacagaacctactgttaccactagcgatgctgcagttgatctgagcagctttaagaatgtccagcacttagagctgcccaaagatcaagggggacttggaattgccatctccgaagaggacacgctgagcggcgtgatcatcaaaagcctgaccgagcatggagtcgccgcaacggacggtaggctgaaggtcggcgatcagatcttggccgttgatgatgagattgtcgtgggctatccaatcgagaaattcatatcactcctcaaaacagctaagatgactgtgaaactgactatacacgccgagaaccccgactctcaggccgtcccttcagccgccggcgccgcatcaggcgagaaaaagaattctagtcagagcctcatggtaccccagtctggttccccagaaccggaaagtatccggaacacttcacgctcctctacgccagccattttcgctagtgatcccgcaacctgtccaataattccagggtgtgagacaactatcgagatttcaaagggccgcaccgggctgggtttaagcatcgtcggcggctctgacacattgctgggggcaatcattatccatgaggtgtatgaggagggggcggcctgcaaggacggtcggctctgggctggcgatcagatccttgaggtgaacggaattgacctgagaaaggctacccatgatgaagcaatcaacgtgctgagacaaaccccacagcgcgttcgattgaccctctacagggacgaggccccatataaggaggaagaagtgtgcgatacactgactatcgaattacagaaaaagccgggaaaaggactgggcctctccatcgtgggcaagcggaatgacaccggagtatttgtgtccgatatcgtgaaaggtgggatcgcggacgcagacgggcggctgatgcagggtgatcaaatcctgatggtgaatggggaagatgtccgtaacgctacgcaggaagctgttgcagccctgctcaaggtgtctgaagggtccctctccagctttacgtttcccctgtctggatctagcacttcagaaagcctcgagagcagcagtaagaagaacgccctggcaagcgaaatccagggcctgaggaccgtggagatgaagaaggggccaaccgattccctcggcatctctatagcgggtggagttggctcaccacttggtgacgtccccatattcattgcgatgatgcaccccacaggggtggctgcccagacccagaagttgcgtgtgggcgataggatcgtaacgatttgtgggacaagcaccgaaggaatgacgcacacccaggcagtcaatctgctgaaaaacgcaagcggctccattgaaatgcaggtagtggcaggtggtgatgtttcggtggtgactggccaccagcaagagcccgcctccagttccctgagttttactgggttaacctcaagcagcatttttcaagacgatttggggcctcctcagtgtaaatccatcaccctggaacgggggcctgatggcctgggcttttccatcgtcggtgggtacggcagccctcacggggaccttccaatctacgtgaagacagtttttgcgaagggagctgcttcagaagacgggcgtctgaagagaggagatcagatcattgcagtgaatgggcagtcattggaaggagtaactcatgaggaagctgtcgctatcctgaagagaaccaaggggacagtcactctcatggtactctcttag

SEQ ID NO: 195792 - DNA, 6114 bp, synthetic construct
  misc_feature 1..6114: note = Description of Artificial Sequence: Synthetic coding sequence
  source 1..6114: mol_type = other DNA
atgctggaggccatcgacaagaaccgggccctgcacgccgccgagcgtttgcaaacaaagctgcgggaacgaggcgacgtggccaatgaagataagctgtccctgctgaagagcgtgctgcagtcaccgcttttttctcagattctgtctcttcagacaagtgtccagcagttgaaggatcaggttaacatcgccaccagcgcaacctcaaatattgaatatgcacacgtgccacatctgtctcctgccgtcattcctacgctccaaaatgagtcattcctattgtcacccaacaatgggaacctcgaggccctgaccggtcctggaattccccatattaacggaaaacccgcgtgcgacgaattcgatcaactgattaagaatatggcccaggggaggcatgttgaagtattcgagcttctgaagccaccttcagggggcttgggattctcagtggtgggccttcggtccgagaatcgcggggagctcggcatcttcgtccaagaaattcaagagggctcagtggcgcatcgcgacggacgcctcaaggagacagatcagatcctagctattaacggccaagcgctggatcagactattacgcaccagcaggctataagtatactgcagaaagccaaggacaccgttcaactggtgatcgcacgcggcagcctgccacagctggtctcgcctatcgtcagccggagcccttccgccgcaagcacaatcagtgcgcactctaaccccgtccactggcagcacatggaaactattgagctggtcaatgatggaagtggactcggctttggcatcataggcggaaaagccaccggggtaatcgtgaagaccatcctgccaggcggggtcgcagaccagcatggccggttgtgttcaggcgaccacatattgaaaattggtgataccgatcttgcgggaatgagctctgaacaggtcgcacaagttctgaggcagtgcggcaaccgggtgaaactcatgatagcccgcggggcaatagaggagcggaccgcccctacagcattaggtataactttatcttcctcgcctaccagcacccctgagctgagagtggatgccagcacccagaagggggaggagagtgaaacattcgatgttgagctgaccaagaatgtgcagggactagggattacaattgcgggctatatcggtgacaagaaactggagcccagtggtatattcgttaaaagcatcactaagtcttcagccgtggaacacgatggtcgcatacagatcggcgatcagattattgcagtggacggaacaaacctacagggtttcaccaaccagcaggcagtggaggtgctgcggcacacaggccagaccgtactgctgaccttaatgagacggggcatgaaacaggaggccgagctgatgagtcgagaagatgtgacgaaggatgcagacttgtctcctgtgaatgcctccatcataaaggagaactatgagaaggatgaagactttctgagctcaacccggaacactaatattctgcccacagaggaggagggctatcctctcctgtctgcagagatagaggagatcgaggacgcccagaaacaggaagcagccctgctgaccaagtggcagcgaataatgggcatcaactacgaaattgtcgttgctcatgtgtccaaattcagcgaaaatagcggactgggcatttcgctggaggcaacagtgggccatcattttattcggagcgtccttccggagggccctgtgggccactccggcaaactgttctcaggcgacgagctgctagaggtgaatggcattacactcctgggggagaaccaccaagatgtagtaaacatcctcaaggagctgcccatagaagtaaccatggtctgttgccggcgcaccgttccacctactacccaatccgagctcgatagcttagacctgtgtgatatcgaattgacggagaaacctcacgtggatttgggcgagtttatcggctctagcgagaccgaggatcctgtcctggctatgacagatgcaggacagtctactgaagaagttcaggcaccactcgccatgtgggaagccggtatccagcatattgagctggagaaaggcagtaaagggctgggctttagcatcttagattaccaggatcccatcgaccccgcgtccaccgtgattataattcggtccctggtgcctggaggcatagcggagaaagacgggaggctgttgcccggggaccggctaatgttcgttaatgatgtcaatctggaaaacagctcactggaagaagcggttgaagccctgaagggtgctccatcaggtaccgtgagaatcggggttgccaaaccccttccgctgtcccctgaggaggggtatgtatctgccaaggaagacagttttctctatccaccacacagttgtgaagaagcaggcttggccgataagccactgtttcgcgccgacctagccctagtcgggactaatgacgcggatctggttgacgaatcaaccttcgagtccccctactccccagaaaatgactccatctatagcactcaggccagtatcctgtcattgcacggcagctcctgcggggatggactgaattacggttcttccctcccctctagtccgccgaaagatgtgatcgaaaattcctgcgaccctgtgctggacctccacatgtcattggaggaactctatacccaaaatctattacagaggcaggacgaaaacaccccctcagtggatatttcaatggggccggcctccggtttcacgataaacgactataccccggcaaatgccatcgagcagcagtatgagtgtgaaaacaccatagtctggaccgaaagtcacctaccgtctgaggtgatctcatctgcagagctgccctcagtgctgcctgattccgctgggaaaggatcagaatatttactagagcagtccagtctcgcctgcaacgctgagtgcgtcatgttacaaaatgtcagtaaggagagctttgagcgtacaattaacatagccaaaggcaatagtagcctgggcatgacagtctccgctaacaaggacgggctgggtatgatcgtgcgatcaatcattcacggcggggctatttctcgggacgggagaattgccataggagattgcattctgagcatcaatgaggaaagcacgattagcgtaaccaacgcgcaggcacgggctatgcttcgaagacattcacttatcgggcctgacattaagatcacctatgttcctgctgagcacttggaggagtttaaaatctctcttggacaacagtcgggccgggtaatggctctggatattttcagcagctacacgggtagggatatcccagagctgcccgagcgggaggaaggagaaggcgaagaatccgagttgcagaacacggcttactccaactggaatcagcctcggcgggtggagctgtggcgcgagccgagtaaatctctgggaatatctatcgtcgggggaagggggatgggcagtcgactaagtaatggtgaggtaatgaggggaatcttcataaaacacgttcttgaagactccccagccgggaaaaacggaactctaaagcccggcgataggatcgttgaggtggatgggatggacctgcgagacgccagtcacgaacaggccgtggaggcgattcgaaaggccggaaaccctgtggtgttcatggtgcagtcaattataaatcgcccccgcgctccctctcagtctgagtcagaacccgagaaggctcctttgtgctcagtgcctccaccacccccttctgctttcgctgagatgggctcggaccacacgcagtccagcgcaagcaagatcagtcaggatgttgataaagaagatgagttcggctactcctggaagaatataagggaaaggtacggcactttgactggggagttacacatgatagagcttgagaagggacactctgggctgggcctttcgctggctggcaataaggacaggtctcgaatgtctgtattcatagttggcatcgatccaaatggcgccgccggaaaggacgggcgtctgcagatcgcagatgagcttttggagattaatgggcaaattctgtatggacgcagccaccagaatgctagtagcatcatcaaatgtgctccatcaaaagtgaaaattattttcatacggaacaaggacgccgtgaatcagatggccgtgtgccccgggaatgctgttgagcccttgcctagcaacagcgaaaatctccagaacaaggaaaccgaaccaacagtgaccacgagcgatgccgctgtcgacctttcatcgtttaagaatgtgcaacatctggagctcccgaaagatcaaggtgggctggggatcgcaatcagtgaggaagataccctgtcaggcgtgatcatcaagtccttaaccgaacatggagtggccgccactgatggtaggctaaaggtcggagaccagatcctcgctgtcgacgatgaaatcgtggtgggttacccaatcgaaaaatttattagcttgcttaagactgcaaaaatgacggtgaaactgactattcatgccgagaaccccgactcccaggcagtgcctagtgccgctggagcagcatccggcgagaagaagaacagctcccaatctctgatggtccctcagagcggaagtccggagcccgagtccattagaaatacctcaaggtcatctacgcccgcaatcttcgcatcagaccccgccacctgtcccataatccccggctgtgagactaccattgaaataagcaaaggccgtacgggcctgggactgtccattgtcgggggttcggataccctcctaggggccatcatcattcacgaggtctatgaggaaggcgccgcctgtaaggatggacgtctttgggccggagaccagatcttagaggtgaacgggattgaccttaggaaggccacacacgacgaggccatcaacgtcttgcggcagactccccagagagtacgtcttactctatacagagacgaggcgccctacaaagaggaagaggtctgtgatacactcacaatcgaactgcagaagaaacccgggaagggcttggggctgtctatcgtgggcaagcgaaacgacactggggtatttgtgtccgatatcgtgaaggggggcatcgcagatgccgatgggcgcctgatgcagggagatcagatcctcatggtcaacggcgaggatgttcggaatgcaactcaggaagcggtggccgccctgttgaagtgttctttagggacagtcactctcgaggtcgggaggatcaaggcagggcctttccactcagaaaggcgtcctagccagtcatctcaggtgagtgaagggagcctttcttccttcacctttcctctctctgggtcttctactagcgaatcgctagagtccagttctaagaaaaatgccctggccagcgaaattcaaggattgaggacagtcgagatgaagaaagggcctaccgattctcttgggatatctatcgccggaggagtgggatctccactgggtgacgtgccaatctttatcgctatgatgcacccaactggagtagccgctcaaacacaaaagttgcgagtgggagaccggattgtgacaatttgcgggacttctaccgagggaatgactcacacacaggccgttaatctccttaagaatgctagcggcagcattgagatgcaggtcgtcgctgggggcgatgtttctgttgtgacaggtcaccagcaggagcccgccagctccagcctcagcttcacgggactgacttcatcatctattttccaggacgatctgggtccgccacagtgtaagagtatcactttagagcgagggccggacgggttgggattcagcattgtcggtggctacggcagcccacatggggacctgccaatctatgtcaaaacagtttttgcaaagggcgctgcatcagaggatggccgactgaagagaggcgatcagattatcgctgtgaatgggcagtcgctggagggagtcacccacgaggaagctgttgccattttaaagcgaaccaagggaacggttaccttaatggttctgtcctag

SEQ ID NO: 195793 - DNA, 6027 bp, synthetic construct
  misc_feature 1..6027: note = Description of Artificial Sequence: Synthetic coding sequence
  source 1..6027: mol_type = other DNA
atgctggaggccatcgacaagaaccgggccctgcacgccgccgagcgcctacaaacaaaattaagagagaggggtgacgtggctaatgaggataaactcagtctcctgaaatcagtgctccaaagtcccctcttctcgcaaattctgtccctccaaacatcggttcagcagctgaaggatcaggtgaacattgcaacctccgccacctctaacattgaatacgcccacgttccgcatctatcaccagccgtgatccccactcttcagaatgagtcttttctcctgtcccctaataacgggaatctggaagcgctgacaggacccggcatcccacatatcaatggcaagcccgcttgcgatgagttcgaccaattaataaaaaatatggcccagggaagacatgtggaggtttttgagctgttaaaacctccttcaggtggattaggcttctccgtagttggtctgaggtctgagaatcgcggggagctcggaatattcgtccaggaaatccaggaaggctctgtggctcacagggacggcagacttaaggaaaccgatcagatcttagccatcaatggacaggcactcgaccaaacgatcacacaccaacaggccatcagcatactgcagaaggccaaagacaccgtccagctggtgatcgccagaggctctttgccacagcttgtgtcccctatagtttcccgtagcccttctgctgcctccacaattagcgctcactctaatcccgtacactggcagcacatggagactatcgagttggttaatgatgggtcagggctgggcttcggaatcatcggaggcaaggccactggtgtgatcgtgaaaacaattctccccgggggcgtggcggaccagcatggccgcctgtgcagcggcgaccacatcctgaagattggcgatactgacttggccggcatgagctcagaacaggtagcccaggtcctccgacaatgcggcaaccgggtcaagcttatgatagctcgtggtgcgatcgaggagcgaacggcccccactgccctagggatcaccttgtctagctccccaaccagcacgccagagctccgagtggacgccagtactcaaaagggcgaggaatctgagacatttgacgtggagttgacaaagaatgtgcaagggttgggcatcacgatcgccggttatatcggggacaagaaactggaaccgtccggtatctttgtgaagtccattaccaaatcgagcgcggtcgagcacgatgggagaattcagattggtgaccagatcatcgctgtcgatggaactaacctgcagggatttactaatcagcaggccgtagaggttttgaggcacaccggtcagacagtgctcctcactctgatgcgacgaggcatgaagcaggaagccgaactgatgtcccgggaggacgtgacaaaggacgcggatctgtcacccgtcaatgcatctatcatcaaagaaaattacgaaaaagatgaagacttcctatcgtccaccaggaatactaacattcttccgacagaagaggaggggtaccctctgctgtccgccgagatcgaggaaatcgaagacgcacagaaacaagaggcagctttgctcaccaagtggcagcgtatcatgggcatcaattatgagattgttgtagcgcatgtcagcaaattctccgagaacagcggcttagggatcagtctagaggcaactgtgggtcaccattttatcaggtccgtactccctgaaggaccagtcggtcattcaggcaaattgttcagtggggatgaactattggaggtgaacggcattacactcctgggagagaatcaccaagatgttgtgaatattctaaaagagttgcccatagaagtgacaatggtatgctgccgccgaacagttcccccaactacacagagcgaactcgattctctagacctgtgtgacatcgagctgaccgaaaaaccacacgtagaccttggtgaatttataggatcttccgaaaccgaggatccagtactcgctatgacagacgctggacagtcaacagaggaggtccaggcccccctggccatgtgggaggccggcatacagcacattgagctggaaaaaggttcaaaagggctaggcttctcgatcctagattaccaggacccaattgaccccgctagtactgtgattatcattagaagtctcgttccaggcggcatagccgagaaggatggccgattgctccctggagatcggttaatgttcgtgaacgacgtcaatttagagaattctagcctggaggaggcggtcgaagcgctgaagggggccccaagcgggactgtcaggatcggggtggctaaacccttaccactctcccctgaagaaggatacgtatcagcgaaggaggattcttttctttatcctcctcactcgtgcgaggaggcggggttagcagacaagccactttttagagccgacctggcgctggtgggcactaacgacgctgatctcgtggatgagtctacgttcgagtctccatatagccctgagaacgactcgatatatagtactcaagccagcatactgtcacttcacggcagctcttgcggagatgggctgaactacgggtctagcctacctagcagtccccctaaggacgtaatcgagaacagctgcgatccagttctcgacctccacatgtcactggaggagctttacacccaaaatctgctgcagaggcaggacgagaacactcctagcgttgatatcagcatgggacctgcctccggtttcaccataaatgattacacccccgctaacgccatcgaacagcagtacgaatgcgagaataccatcgtctggaccgagagtcatctcccatccgaagtgataagcagcgccgaactcccgtcggtcctgcctgattccgctgggaaggggtcggaatacctcctggaacaatcttcattggcctgcaatgcagagtgcgttatgcttcaaaatgtgtctaaggagtcttttgaacgcactataaatatagccaagggcaacagttctctcggcatgaccgtatcggccaataaggatgggctgggaatgattgtgcgatctattatccatggtggagccatcagtagggacggccgcatcgcgatcggagattgcatcctgtctattaatgaagagagcacaatctcagtgacaaacgcccaggccagggccatgttgcgtagacacagcctgatcggacctgacataaagatcacatatgtgcccgccgagcacttggaagaatttaagatctccctgggccaacaatctggacgcgtaatggccctcgacatattctcatcttacacaggcagggacattccggagttgccagaaagagaggaaggggagggtgaagaatccgagttgcagaacacggcgtacagcaactggaatcaaccccgacgtgtggaactgtggcgggaaccatctaaatcactgggaatctccattgtggggggcaggggaatgggttccaggttgtctaatggcgaagttatgcgcggcattttcatcaagcacgtgttggaagatagccccgctggaaagaatggaaccctgaagcccggggatagaatcgtggaggtagacggaatggacctgagggacgcctctcacgaacaagccgtggaagctattagaaaagcgggcaatcccgtcgtttttatggtgcagagcatcataaacaggcctcgcgcgccttcccagtctgagtcagagccagaaaaggctccactgtgcagcgtgcctcctcctccccctagtgccttcgctgagatggggagtgaccacactcaaagcagtgccagtaagatcagtcaggacgttgacaaggaggatgaatttggatatagctggaagaacattcgcgagcggtatggcacattgactggcgagctacatatgattgagttagaaaagggtcatagcggactcgggctgtctctggccggcaataaggaccgctctcggatgtcagtattcatcgtcggcattgatcctaatggtgcagctggcaaagacggcaggctgcagatcgctgatgagctattggagatcaacggtcaaatactgtacggccgaagccatcaaaatgcgagctctatcatcaagtgtgctccttccaaagtcaaaatcatcttcatcaggaataaggacgccgttaatcagatggcagtatgccctggcaacgctgttgagcctctgcctagcaattccgagaacctgcagaataaggagactgaacccaccgtaacgacctcagacgctgcagtggacctttcttcttttaagaatgtacaacaccttgaactgcctaaggaccagggcggcctgggaattgcaatctccgaggaagacacattatcgggggtgatcatcaagtcacttacggagcacggagtggccgccacagacggcagactgaaagtgggagatcagatccttgcggtggatgacgaaatcgtggtggggtatccaattgagaagttcatctctctcctaaaaacagcaaaaatgaccgtcaaactgaccatacacgccgagaatccggacagccaggccgtgccaagcgccgccggtgccgcctccggtgagaaaaagaacagctctcaatcattgatggtaccccagtcggggagtcccgaaccagagtctatacgcaacacctctcgatctagtacccctgccatttttgcatctgacccagcaacctgcccaattattccggggtgcgagactacgattgagatctcaaaaggaagaacggggctgggtttgagtattgtgggcggaagcgacaccctcttgggggccatcatcatccatgaggtgtacgaagagggggctgcctgtaaggatggccgtttgtgggcaggcgatcagatcctcgaagtgaacggtatcgacctacgcaaggccacacacgacgaagcgattaatgtgctccgacagacaccacagagagtgcgtttgacgttgtatagggacgaagccccatacaaagaagaagaggtctgcgatacacttaccatcgaattgcaaaaaaaacccgggaaaggactcggtttgtctatagtgggtaagcgcaacgacacaggcgtgtttgtatccgatatcgtgaaggggggtatcgctgacgctgacggccgcctcatgcaaggcgatcagatccttatggttaacggtgaagatgtgcgcaatgcaactcaggaagccgtggccgctctcctcaaggtgagcgaagggtcgctaagcagctttacgtttccactctccgggagctccacaagtgaatcactggagtctagttccaagaaaaacgcactggcttccgagatacaaggcctgcgcactgttgaaatgaagaagggcccgaccgattcattgggtattagcatagccggcggcgtgggctctcctctgggagacgtgcctatatttatcgccatgatgcacccaacgggcgttgctgcccagacacagaagctcagagtcggcgacagaatcgtgactatatgtggaacctctactgaaggtatgactcatactcaggctgtgaacctcctgaaaaatgccagtgggagcattgaaatgcaggtggtcgccgggggcgacgtgtctgtcgtgactggccaccagcaggaaccagccagctcaagcctgtctttcactggactcacctcctcctcaatatttcaagatgacctggggcctccccagtgtaaaagtattacgctagagagaggacccgatggactggggttcagcattgtgggcggctatgggagcccccatggggacctgcctatttacgttaaaactgtgttcgccaaaggtgccgccagcgaagacgggcgattaaagcgtggcgatcaaatcattgccgtcaacggacaatcccttgagggcgttacgcacgaagaggccgtggcaattctcaagcgcacaaagggcacagtgacactgatggtactcagttag

SEQ ID NO: 195794 - DNA, 1089 bp, synthetic construct
  misc_feature 1..1089: note = Description of Artificial Sequence: Synthetic coding sequence
  source 1..1089: mol_type = other DNA
atggagaccgacgccccccagcccggcctggccagccccgacagcccacacgatccatgtaagatgttcattggcggcctgtcatggcaaaccactcaggaagggttgcgggagtatttcggccagttcggagaggtgaaagaatgtctagtgatgcgagacccactgacaaagcgaagccggggcttcgggtttgtgacatttatggaccaagccggggtagataaggtgctggcgcagtctcgccacgagctcgacagcaaaaccatcgaccctaaggtggcgtttcctcgacgcgcccagcccaagatggtgaccagaaccaaaaagatttttgtgggggggctgtctgtgaatactactgtagaagacgtgaaacagtattttgagcaatttggcaaggtggacgatgccatgctgatgtttgacaaaactacgaatcggcaccgtggatttggcttcgtgacattcgagtcagaagacatcgtggagaaagtgtgcgagattcacttccacgagatcaacaataaaatggtcgagtgcaagaaggcacagcccaaggaggtgatgtcgcctaccggatctgcgagaggccgttctagggtgatgccatatggaatggacgctttcatgctgggaatcggcatgctcggctatcctggctttcaggcgaccacgtacgcctcccggtcttacacgggccttgccccaggatacacgtaccaattcccagagtttcgagtggagcggacacctttaccaagcgctcctgtgctgcccgaactcacagctataccactcacggcctacggccctatggctgccgcagccgcagccgcagccgtggtgaggggaaccggctctcatccgtggacgatggcccctccgccgggtagcactccttctagaaccggaggtttccttggcacaacatcccccgggcctatggctgagctgtatggcgcagctaaccaggatagcggggtatcttcttacatcagcgccgccagcccagccccttcgaccggctttggacattcactgggcggaccactgattgccaccgccttcaccaatgggtaccattag

SEQ ID NO: 195795 - DNA, 627 bp, synthetic construct
  misc_feature 1..627: note = Description of Artificial Sequence: Synthetic coding sequence
  source 1..627: mol_type = other DNA
atggccaccagcgccgtgcccagcgacaacctgcccacctacaagcttgtcgtggttggagacggcggagttggaaagagcgccctgactattcagttctttcagaagattttcgtccccgactacgatccaactatagaagactcatacctgaagcatactgaaattgacaatcagtgggccattctcgatgtgctggacacggcaggtcaggaagagttctccgcaatgcgtgagcagtatatgaggaccggagacggcttcttgattgtctattccgttaccgacaaggcaagtttcgaacatgtcgataggtttcaccagctcatcctgagggtgaaagatagagagtcattccccatgatcctggtggccaacaaggtcgaccttatgcacctaagaaagatcacccgagaacaggggaaggagatggcaacaaagcataatattccgtatattgaaacatcagctaaggacccacctctaaacgttgataaagcttttcacgacctggtgagggtgatccgccaacagattccggaaaaatcccagaagaagaagaagaagactaagtggaggggagatagagctaccggcacccacaagctacaatgtgtgatactttag

SEQ ID NO: 195796 - DNA, 627 bp, synthetic construct
  misc_feature 1..627: note = Description of Artificial Sequence: Synthetic coding sequence
  source 1..627: mol_type = other DNA
atggccaccagcgccgtgcccagcgacaacctgcccacctacaagcttgtggtcgtcggggatggcggcgtgggtaagtctgccctgaccatccagtttttccagaagatttttgttcctgattatgatcccaccattgaggattcctacttgaagcacactgaaattgacaaccagtgggccatccttgatgtccttgacactgccgggcaagaggaatttagcgcaatgcgcgaacagtatatgagaactggagatggatttctcattgtctattccgtgacagacaaggcatcttttgaacacgtggacagattccaccagctgattctcagagtcaaggatagagagtcgttccctatgattctcgtcgcaaacaaggtagatctgatgcatctacgcaagatcacaagagaacaaggtaaagaaatggctaccaagcacaatataccctatatcgaaacaagtgctaaggacccgcccctgaacgtcgacaaggcgtttcatgacctggtccgcgtcatacgacagcagatccccgaaaagagtcagaagaagaagaaaaaaactaaatggcgaggcgaccgggctaccggtactcacaagctgcagtgcgtgattttatag

SEQ ID NO: 195797 - DNA, 399 bp, synthetic construct
  misc_feature 1..399: note = Description of Artificial Sequence: Synthetic coding sequence
  source 1..399: mol_type = other DNA
atgcgggagcagtacatgcggaccggcgacggcttcctgatcgtgtatagcgttaccgataaagcgtcctttgaacatgtcgaccggtttcaccagttgatcctccgggtcaaagatagggagtcctttcccatgatcctggtagctaataaggtcgatctgatgcatcttcggaaaatcacgcgagagcagggcaaggaaatggccaccaagcataacataccatacatcgagacatccgcgaaggacccccctctgaacgtggacaaggcattccacgacctggttcgtgtcatccggcagcagatcccagaaaagagccagaagaagaaaaagaaaactaagtggaggggcgatagagcaactggaactcacaagctccagtgtgtcatcctgtag

SEQ ID NO: 195798 - DNA, 627 bp, synthetic construct
  misc_feature 1..627: note = Description of Artificial Sequence: Synthetic coding sequence
  source 1..627: mol_type = other DNA
atggccaccagcgccgtgcccagcgacaacctgcccacctacaagctggttgtggtgggcgacggcggggtcggcaaaagcgctctgacaattcagttttttcaaaagatatttgtgcccgattatgaccccaccatcgaagactcttacttaaagcacacggagatagacaatcagtgggcgatactggatgtgctggataccgcaggccaggaagagttttcagctatgcgggaacagtatatgaggaccggagatggcttcctcatcgtctatagtgtgaccgataaagcttcctttgagcatgtggacaggtttcatcagcttatcctccgggtcaaagatcgggaaagtttccccatgattctagtggcaaacaaagtggacctcatgcacttgagaaagattacaagagagcagggcaaagaaatggcgaccaagcacaacattccttacattgagacatctgcaaaagatccacccctgaacgtcgataaagcctttcacgacctcgtccgggtcatcaggcaacagattcccgagaagagccagaagaagaagaaaaagactaagtggcgaggggatagggccaccggcacacacaagctccagtgcgtgattttgtag

SEQ ID NO: 195799 - DNA, 72 bp, synthetic construct
  misc_feature 1..72: note = Description of Artificial Sequence: Synthetic coding sequence
  source 1..72: mol_type = other DNA
atggccaccagcgccgtgcccagcgacaacctgcccacctacaagctggttgtggtgggggacgggggatag

SEQ ID NO: 195800 - DNA, 2628 bp, synthetic construct
  misc_feature 1..2628: note = Description of Artificial Sequence: Synthetic coding sequence
  source 1..2628: mol_type = other DNA
atgcgggagctggtgaacatccccctggtgcacatcctgaccctggtagcgttcagcgggacagagaagcttcccaaagcacctgtaatcacaacccctctggaaacagtggacgcgcttgtggaggaggtggcaacatttatgtgcgctgtggaatcctatccccagcctgagatttcttggacgagaaacaaaatcctgataaagctttttgacactcgatattccattcgggagaacggccagctgctcaccatcctgtccgtcgaagactccgacgacggcatatactgttgtaccgccaataatggggtgggtggtgctgtcgaatcttgtggcgctctccaagtgaaaatgaaaccgaagatcacaagaccacccatcaatgtcaagatcatcgaaggtctgaaggccgtgttaccttgcacaacaatgggaaaccccaagcccagtgtctcctggattaagggcgactcccccctgagagaaaacagtcgtatagctgttctcgaatcagggtctctgcgcatccacaatgttcagaaggaagacgcaggacagtaccgatgcgttgctaagaactccctcggaactgcgtattccaaagtggtgaagttggaggttgaggtcttcgctagaatactacgcgcgcccgaatcccataacgtcacgttcggcagctttgttacactccactgcacggcgaccggcatacctgtccccacaatcacatggatagagaacggtaatgcagtgagctctgggagcatccaggagtctgtgaaagacagagtgatcgatagtcgcctacagcttttcattaccaaacctggtctgtacacatgtatcgccaccaacaagcatggcgagaagttctctactgctaaggcggccgccactatcagtatcgcagagatgctgtttatttcatccttctccaaaccccagaaagataacaaagggtactgcgctcagtaccgcggggaagtgtgcaatgctgtcttggcgaaggacgctctagtttttctgaacaccagctacgcagaccctgaggaagctcaagagctactggtacacactgcttggaacgagctgaaagtggtttctcctgtctgtcgacccgctgccgaagcactactatgcaatcacatcttccaggaatgctcacctggcgtggtgccaacccccattccgatctgccgtgaatattgcctggccgttaaggaactcttttgcgctaaggagtggcttgttatggaagagaaaacccaccgtggtctttacaggtccgagatgcacttgttaagtgtgcccgagtgttctaaactgccttctatgcattgggacccgaccgcatgtgcgaggctcccacatctagactataataaggagaaccttaaaacgtttcctccgatgacaagctccaagcctagtgtcgacatccctaaccttcccagctcctcctcatcctccttctctgtgtctcctacctacagcatgaccgtgatcataagcatcatgtcatccttcgccatttttgttctgctaaccatcacgaccctctattgttgcaggcgaagaaaacagtggaagaataagaaacgtgaaagtgccgcagtgacactaacaactctccccagcgagcttttgctggatcggctgcaccctaacccgatgtatcagagaatgccgctgctgctcaatcctaaattactgagtctggaatacccaagaaacaacatcgagtacgtccgagatatcggagagggagccttcggaagggtgttccaggcccgcgctccaggactccttccatacgaaccattcacaatggtggcagtgaaaatgctcaaagaagaggcttccgccgatatgcaggccgattttcagcgcgaagcagccttgatggctgagtttgacaacccgaatatcgtaaagctcctcggggtatgcgccgtcggcaaacctatgtgtctgctatttgaatacatggcctatggcgacctgaacgaattcctccgcagcatgagtccccataccgtctgctcactctcacattctgatttgtctatgcgggcccaggtctcaagccctggccccccaccactgtcctgcgcggaacagttgtgtatcgcccggcaggtggccgctggcatggcctacctgtccgagcggaaatttgtccaccgtgatcttgcgactaggaactgtttggtgggtgagaacatggtggtcaagatcgccgatttcggcctttcccgcaacatttattccgcagactattataaggctaatgagaacgacgctattcctataagatggatgcctcctgaatccatattctataatagatacactaccgaatccgatgtctgggcctacggtgtggtgctgtgggagatcttcagctacggattacaaccatactacggcatggcccacgaggaagtgatctactatgttagagatggcaacatcctgagttgtcccgaaaactgccccgttgaactgtacaacctcatgaggctatgctggagcaagttacctgctgacaggccttcttttacctctatacacagaatcctggagaggatgtgcgagcgcgccgaggggacagtgtcagtgtag

SEQ ID NO: 195801 - DNA, 570 bp, synthetic construct
  misc_feature 1..570: note = Description of Artificial Sequence: Synthetic coding sequence
  source 1..570: mol_type = other DNA
atggccggcaacggccgggaggacccccagcggaccctgcagatccgcgacgccttcgccgtgagagcgcggatgcagcaggcttcccagcacgctctgggccctcatggtctttgccagactgctacctcccgagaaagcgctgctgtaactttgaccaccctgccatctgaactgctgttggaccgactgcacccaaatccaatgtatcaacgcatgccactgctccttaacccaaaattgctaagtttggagtatccacggaacaatatcgaatacgtgcgtgatataggcgagggtgccttcggcagagtgttccaggcgcgggcacccgggctcctgccatatgagcctttcacaatggtggctgttaagatgcttaaggaagaagcttcagctgacatgcaagctgattttcaacgggaagccgctctgatggcagagtttgacaacccaaatattgtaaaactgctgggtatgaagatccaggtgaggatctgcatcagtagcgagaaccgcggttttccaagcttcagtcccctggtgagggccttcagcttcagtccatag

SEQ ID NO: 195802 - DNA, 351 bp, synthetic construct
  misc_feature 1..351: note = Description of Artificial Sequence: Synthetic coding sequence
  source 1..351: mol_type = other DNA
atgaagcccaagatcacccggccccccatcaacgtgaagatcatcgaaggtttgaaggcagtgctgccgtgtaccacgatgggcaacccaaagccaagtgtgtcctggattaagggggactcgccactgagagaaaactctcgcattgccgtgcttgaaagtggcagtcttaggatccataacgtgcaaaaagaagatgctggacaatacaggtgtgtggccaagaattcactaggcaccgcatactcaaaagtggtgaagctcgaggttgaaggcgcaaagggaattcacacacagttcgtggccagtgccttacagctacgatccttcttgtcatgccctcagatatag

SEQ ID NO: 195803 - DNA, 351 bp, synthetic construct
  misc_feature 1..351: note = Description of Artificial Sequence: Synthetic coding sequence
  source 1..351: mol_type = other DNA
atgaagcccaagatcacccggccccccatcaacgtgaagatcatcgaagggctcaaggcggttctaccttgcaccaccatgggtaacccaaagccttccgtctcttggatcaagggcgattctcccctgcgggagaattcgcgcatcgcagtccttgaaagcggctcattgcgtattcataacgttcagaaggaagatgctggccagtacagatgtgtcgctaagaatagcttaggcaccgcctacagtaaggtggtcaagttagaggtggaaggtgccaaaggaattcacacgcagtttgtcgcctccgctctgcaacttcgcagctttctgtcatgtccccagatctag

SEQ ID NO: 195804 - DNA, 570 bp, synthetic construct
  misc_feature 1..570: note = Description of Artificial Sequence: Synthetic coding sequence
  source 1..570: mol_type = other DNA
atggccggcaacggccgggaggacccccagcggaccctgcagatcagggacgccttcgctgttcgcgcccgcatgcagcaagcctctcagcacgctctggggccacatggactgtgccagacggctactagtcgggagagcgcagccgtgacgttgactactcttccttcagaactgctgcttgatagactgcatcctaaccccatgtaccagcgcatgcctcttctgctgaaccctaagctgctcagcctcgagtacccccggaataatattgaatacgtgcgggacattggggaaggagctttcgggcgagtttttcaggccagggcccccggcctgctgccttatgaaccattcacaatggtggccgtcaaaatgttgaaagaagaggccagcgccgacatgcaagccgacttccagcgggaggccgccctcatggcagagttcgacaaccctaacattgttaagcttttggggatgaaaatacaggtacgcatctgcatctcttctgagaatcgaggcttcccttcattctcccccctggtgagagcttttagcttttcaccatag

SEQ ID NO: 195805 - DNA, 2352 bp, synthetic construct
  misc_feature 1..2352: note = Description of Artificial Sequence: Synthetic coding sequence
  source 1..2352: mol_type = other DNA
atgcgggagctggtgaacatccccctggtgcacatcctgaccctggtggcgttttctgggaccgagaagctgcccaaagccccagtgatcactacacctctggaaactgtggatgccctggtggaggaagtggcaaccttcatgtgtgcagtggagtcctaccctcaaccagagatatcttggacacgaaacaagatcctcatcaaattatttgatacaagatattccatcagggagaacgggcaactgctgacaatcctgagcgtggaggattccgacgatggcatttactgttgcacggccaataatggggtggggggcgccgtggagtcttgcggagccctacaggtaaagatgaagcccaaaatcacacgacctccaataaatgtgaaaataatcgagggcctcaaagctgtgctgccctgtaccactatgggaaatcctaagccaagcgtgtcttggatcaagggggatagtcctttaagggagaattccaggatcgcggtactcgagtccggatctctccgtatacataacgttcagaaagaagacgccggacaatacaggtgcgttgcaaagaatagtctcggtacagcatattcaaaagtggtcaagctggaggtggaggaagaatccgaacctgagcaggacacaaaggtgttcgcgcgcatactccgtgccccggagtcgcataatgtgacatttggatccttcgtcacactgcattgcacagccactggaatccccgttccaacaattacatggatagagaacgggaatgctgtgtcttccgggtcaattcaggagagcgttaaagacagggtgatcgactcccgcctccagctatttatcactaaacctggactgtatacttgcattgctactaacaaacacggtgagaaattcagtaccgcaaaggcggcagcaactataagtatcgccgattttagagaatactgtctggccgtgaaagaactattctgtgctaaggagtggctcgttatggaagagaagacacatcgaggactgtatcgcagcgaaatgcacctgctgtcggtgcctgagtgttctaagctgcctagtatgcactgggacccaacagcttgcgcacggctgcctcacctggcgttcccccctatgacatcgagcaagcccagcgtcgacattcccaatctcccaagtagttccagcagctccttttctgtcagtcccacatattccatgactgtgatcatcagtataatgtcatcgttcgccatcttcgtgttacttactattacgaccctgtactgctgtcggcgccgcaaacagtggaaaaacaagaaacgcgaatccgccgccgttacactgaccacccttccctctgagttgcttctcgatcgcctgcaccccaatccaatgtaccaacggatgcccctgcttctcaatccaaagctgttgagtctggaatatccgaggaacaatatcgagtacgtaagggacatcggtgaaggagcctttggccgggtatttcaggcacgggcccccgggcttctgccttacgagccttttaccatggtggcggtgaaaatgctgaaagaggaggcgagtgcggatatgcaggctgactttcagcgggaagccgctctgatggcagaattcgacaacccgaacattgtcaagctgctcggggtttgcgccgttggaaaaccgatgtgcttgctgtttgaatatatggcatacggcgacttaaacgaattcttacgctctatgagcccacacacagtgtgttccctgtcacattccgacctgtcaatgcgggcacaggtctcctccccaggcccccctccattatcgtgtgctgagcagctctgtattgccaggcaggtggcagcaggtatggcctacctgtcagagcgcaaatttgttcacagggacctggctacccggaattgtctggtgggtgaaaacatggttgtgaaaatcgccgacttcggactcagtcgtaacatctatagcgctgattattataaggccaacgagaatgacgcgatccctatcaggtggatgcctcccgaatctattttctataaccgttataccacagaatccgacgtgtgggcgtatggtgtggtgttgtgggaaatcttcagctatgggctccagccatattacggaatggcccatgaggaggtcatctattatgtaagagacggaaatatactgagctgccccgagaattgccctgttgaactctataatctgatgaggttgtgttggtccaaactgccggcagaccgtccatctttcacctccatacacaggattttggagaggatgtgcgagagggcagaggggaccgtgagcgtgtag

SEQ ID NO: 195806 - DNA, 2610 bp, synthetic construct
  misc_feature 1..2610: note = Description of Artificial Sequence: Synthetic coding sequence
  source 1..2610: mol_type = other DNA
atgcgggagctggtgaacatccccctggtgcacatcctgaccctggtcgcctttagcggtaccgagaagctgccaaaagctccggtaataactacacccctggaaaccgtagacgcacttgttgaggaagtggccacttttatgtgcgcggtggagtcttatccgcagcctgaaatctcctggacacgcaataagatccttatcaagttattcgacacacgctactcaataagggagaatggccagcttctcaccatccttagtgttgaagactccgatgatgggatctattgctgtaccgccaataatggggtcggtggcgcagtcgagtcttgcggtgctttacaagtgaaaatgaagcctaagattactcgtcccccgatcaatgtcaagataattgaggggcttaaggcagtacttccatgtaccacaatgggaaatccaaagccttccgttagttggatcaagggcgattcacctctgcgcgaaaattcgaggattgcagttttagagagtggctcgctgaggattcacaatgttcagaaggaagacgcagggcagtacaggtgtgtcgccaagaattcccttggaaccgcctacagcaaagtggtcaaactcgaggtagaggtatttgcccgaatcctgagagcgcccgaaagccataatgtcacattcggatcgttcgttactttgcattgcacagcaactggtatccccgtgccaactattacctggatcgaaaacgggaatgcagtctcaagcgggagtatacaggaatctgtaaaggaccgggtcatcgactcacggctccaactgtttatcaccaagccaggtctctacacatgcattgctacgaataaacatggagagaagttttcgaccgcaaaagcagcggcgactattagcatagccgaatggagtaagccacagaaggacaataaggggtactgcgcgcagtaccgaggcgaggtgtgcaatgccgtacttgccaaggatgctctggtctttctgaacactagctacgccgacccggaggaggcccaagaactgcttgtccatacagcctggaacgaacttaaagtcgtgtcccccgtgtgtcgtcctgctgccgaggccctcttgtgcaaccacatttttcaggaatgctcacccggggtcgtgcctactccgatacctatttgccgagagtactgtcttgctgtgaaggagttgttttgtgccaaggaatggttggtgatggaagagaaaacccacaggggactctatcggagcgaaatgcacctgttgtctgtaccagagtgcagcaaactaccatcgatgcactgggatcccaccgcgtgtgcaagactcccacacctggactacaataaggagaacctcaaaaccttccctcctatgaccagcagcaagccgtccgttgatatccctaatctcccctcatcatcatctagttcgttttccgtgagtcccacgtactcaatgacagtgataattagtatcatgtcttccttcgcaatcttcgttctgctgacaataacaactctgtattgttgtcgaagacggaaacagtggaaaaataagaaacgcgaatccgccgccgtcacgctaaccactctgccaagcgaactgctcctggacagactgcatcctaacccaatgtaccagaggatgccactgctgcttaacccaaagttgctttcgctggagtacccccgaaacaatatcgagtatgtgagggatatcggcgaaggtgccttcgggagggtttttcaggcaagagctccgggtctgcttccctatgagccatttactatggtcgccgtgaagatgctgaaagaagaggctagcgccgacatgcaggcggactttcagagggaggctgctcttatggcagagtttgataacccaaacatcgtgaaactactcggggtgtgcgcagtgggaaagcctatgtgcctgttgtttgaatacatggcttacggtgatttgaatgagttcctgagaagcatgagccctcacaccgtgtgttcgctgagccactcagatcttagcatgagagcacaggtctcaagtcccgggcccccgcctctgagctgcgccgagcaactctgcatcgcccggcaggttgctgccggaatggcgtacctctctgagagaaagtttgtgcaccgggaccttgccacacgaaactgccttgtaggagagaacatggtggttaaaatagcagactttggcttgagcagaaatatttactccgccgactactacaaggcaaacgagaacgacgccatccccatccgctggatgcctcctgaaagcattttttacaatcggtatacgacagaatctgatgtgtgggcatatggtgtcgttctttgggagatttttagttacggcctgcagccctactacggcatggcccacgaagaagtgatatactatgttagagacggcaacattttatcctgtcctgaaaactgtccagttgaactgtacaacctgatgcggctgtgctggtctaagcttcccgctgatcggccttcgttcacatccatacataggatcctggagagaatgtgcgagagggccgagggaacagtgtctgtgtag

SEQ ID NO: 195807 - DNA, 2604 bp, synthetic construct
  misc_feature 1..2604: note = Description of Artificial Sequence: Synthetic coding sequence
  source 1..2604: mol_type = other DNA
atgcgggagctggtgaacatccccctggtgcacatcctgaccctggtcgccttcagcggcacagaaaagttgccaaaagcccccgtgattacgaccccactcgagaccgttgacgctcttgtggaagaggttgccacattcatgtgcgctgtagagtcatacccccagccagagattagctggacccgtaacaaaatcctgattaaactgtttgataccaggtacagcatacgtgagaatggacagctgctgacaattctttctgtcgaagactctgacgacggtatttattgctgcacagctaacaatggggtcgggggggccgtggaatcctgtggtgctcttcaggtcaagatgaagccgaagattactagacccccgataaatgtaaaaataatcgagggcctcaaagctgtgttaccgtgcacaactatggggaacccaaaaccttctgtgtcctggatcaagggggacagtcctttacgcgaaaattcgaggatcgctgttcttgagagcggttcactgcggattcataatgtgcagaaagaggacgccgggcagtatagatgcgttgcaaagaattccctcggaacggcctacagtaaagtcgtcaagttggaggtcgaagtttttgcccgaatccttagggctcctgaatcccacaatgtgaccttcggaagcttcgtgacacttcactgcacagccaccggcatccccgtgcccaccatcacatggatcgagaacgggaatgccgtctcttctggtagcattcaagagagcgtgaaagatagagtgatcgacagccgcctccagttatttataacaaaaccggggttgtatacctgcatagccacaaacaagcacggggagaaattctccacagctaaggccgccgctacaatctccatcgcagaaatgctgttcatctcttccttttctaagccccagaaagacaacaaaggatattgcgctcagtatcgcggcgaagtctgcaatgctgtgcttgccaaggacgccttggtgttcctgaatacatcgtacgccgatcccgaggaggcccaagaactgctagtgcacaccgcctggaatgaactgaaggtagtgtctccggtttgtaggccagccgccgaagctctgctgtgcaatcatatcttccaggaatgtagtccgggcgtggtgcccaccccaattcctatctgtagagaatattgcttggccgttaaggagctgttctgcgctaaggaatggctggtcatggaagagaagactcatcggggcctctatcggagcgagatgcacctgctctctgtcccagaatgctccaaacttccaagcatgcattgggatcccaccgcctgtgcgcgcctaccccacttggccttccccccaatgacctcatctaaaccgagtgtggatatccccaatcttccctcctcgtcttctagttccttcagtgtaagtccaacgtactctatgactgtgataatatcaatcatgtcttcgttcgccatttttgtcctgctgacgatcacgaccctttactgttgcaggcgtaggaagcagtggaagaacaaaaaacgcgagtcggccgcggttaccttaacaacgctcccatctgagctgctgctggaccgccttcatcctaaccccatgtaccagcgaatgcccctcctactcaatccaaagctgctgtcacttgaatacccccggaacaatatcgaatatgtgcgcgacataggcgagggggcgtttggtcgcgtctttcaagcacgtgcccccggacttctgccctatgaacctttcactatggtggccgtgaagatgctgaaggaagaggccagtgcagatatgcaggccgactttcagcgcgaggcagcattgatggctgaattcgacaacccaaacatcgtaaaactcctgggagtgtgtgctgtaggcaagcctatgtgcctgttgtttgaatacatggcatatggagacttaaatgagtttctcaggtcaatgtccccacacactgtgtgttctctcagccattctgacctgagcatgcgggcgcaagtttccagcccagggccacccccattgtcctgcgcagaacagctgtgtatcgctcggcaggtggcagcgggaatggcgtatttgagtgaacgaaaattcgtccatcgcgacctggccactcgcaactgcctggtgggcgaaaatatggtcgtcaaaattgctgacttcgggctgtctcgaaacatatattctgccgactactataaagccaacgaaaacgacgccattcccatacgatggatgcccccagagagcatattctataacaggtataccacggaaagcgacgtgtgggcctatggcgtggtgctgtgggaaatcttctcctatggcttacagccgtattatggcatggcccacgaggaagttatctactatgtgagagacggtaacatcctgtcttgtccagaaaactgtcctgtggagctgtataatttaatgagactgtgctggtcaaagctcccggccgataggcccagcttcacgagcattcacaggatcttggaacgcatgtgtgagagagctgaaggaactgtgtccgtttag

SEQ ID NO: 195808 - DNA, 2610 bp, synthetic construct
  misc_feature 1..2610: note = Description of Artificial Sequence: Synthetic coding sequence
  source 1..2610: mol_type = other DNA
atgcgggagctggtgaacatccccctggtgcacatcctgaccctggtggcatttagtgggaccgaaaagcttcctaaggctcccgtgatcacaacgcccctggagaccgtggacgccttagtggaggaagtggctaccttcatgtgtgccgttgaatcttacccacaacccgaaatcagctggaccagaaacaaaatcctgataaaattgttcgataccaggtacagcattagagagaatggccagctgttgacgatattatccgtggaggatagtgatgacggaatctattgctgtaccgctaacaatggcgtcgggggggctgtcgaaagctgtggtgctctgcaggtgaaaatgaaacctaaaatcacccggccacctataaacgtgaaaataattgaaggtctgaaggccgtcttgccctgtacaactatgggtaaccctaaaccttccgtctcctggattaagggcgacagcccactgcgcgagaatagtagaattgcggtgcttgagtcaggaagcctaaggatccacaatgtgcagaaagaagatgccggacagtacagatgtgtggccaaaaatagtctgggtacagcatactcgaaagtagtcaaactcgaggttgaggtgttcgctaggattctccgggctcctgaaagtcataatgtgactttcggatcattcgtgaccctacattgtacagcaacaggaattcctgttcctacaataacatggattgaaaacggtaacgccgtatcttccggaagcatccaggagtcagtaaaggaccgagtgatcgacagccgccttcagttattcattactaagcctgggctctacacttgcatcgccaccaacaaacacggagagaagttcagcactgccaaagcagccgcaacaatttctatcgcagctttttcgaaacctcagaaagataacaaggggtattgtgctcagtatcggggcgaggtttgcaacgccgtgctggccaaagacgctttagtcttcttaaacactagctacgccgatcccgaggaggcccaggagctgctggtccataccgcctggaacgagctgaaagtagtgtcaccagtctgtcgccctgctgctgaggcgctcttatgcaaccacattttccaggaatgttctcctggggttgtccccacacccattcctatctgccgggaatattgtctggccgtgaaggaacttttttgcgctaaggagtggttagtgatggaggagaaaacccaccgtggtctgtaccgatcagagatgcatctccttagcgttcccgagtgctctaagttgccctcgatgcactgggatcctacagcatgcgctaggttgcctcacctcgattacaataaggagaacctgaaaacctttccgccaatgaccagttcaaaaccttccgttgacatccctaatctgccaagtagcagctcaagcagcttcagcgtctctccaacatacagtatgactgtgataatttcgatcatgagctccttcgcaatcttcgtattactcactattactacattgtattgttgcaggcgtcgaaaacaatggaagaataaaaaaagagaatcggcagctgtcacacttaccactttgccttctgagctcctgctggacaggctgcatcctaatccgatgtaccaaaggatgcctctgctactgaatcccaagttgcttagcctggagtatcctaggaacaatatcgagtatgtaagggacataggagagggcgcctttggcagggtgtttcaagctcgagcaccaggcttgttgccctatgagccttttaccatggtggccgttaaaatgctgaaggaggaggccagcgccgatatgcaggcagattttcagagagaggccgctctgatggcagaattcgacaatcctaacattgtcaagctgcttggagtgtgcgctgtggggaaacccatgtgcctgttatttgagtacatggcctacggggatctgaatgagttcctgcgctccatgagtcctcatacagtctgcagtctgtctcattccgatctctccatgcgagcacaggtgagtagccctggacctccgccactgtcctgcgcggagcagctgtgtatagctagacaggtggctgctggcatggcatatctgagcgagcggaaattcgttcatcgagacttagcaactaggaactgcctggttggagagaacatggtcgtcaagatcgccgatttcggcctgtcccgcaatatctactcagcagattattacaaggcaaatgaaaacgatgcgataccaatcaggtggatgccacccgagagtatcttttataatcggtacactactgagtccgacgtgtgggcttatggcgtagtactatgggagatattctcctacggcctgcagccttactatggcatggcccacgaagaggtgatatactatgttagggacgggaacatcctgtcgtgcccagagaactgccccgtggagctctacaacctgatgaggttatgttggagcaaacttcctgcagacaggcccagcttcacctccatacatcgaatcttagagagaatgtgtgagagagccgagggcacagtaagcgtgtag

SEQ ID NO: 195809 - DNA, 2352 bp, synthetic construct
  misc_feature 1..2352: note = Description of Artificial Sequence: Synthetic coding sequence
  source 1..2352: mol_type = other DNA
atgcgggagctggtgaacatccccctggtgcacatcctgaccctggtggcttttagtgggaccgagaagctgcctaaggcccctgtgatcactacacctcttgaaacagtggatgccctggttgaggaggtggccacgtttatgtgtgccgtcgagtcatatcctcagccagaaatctcctggacccggaataagattttgattaaattgtttgacacgagatacagcattcgagaaaatggacagctgctcacgattctgagcgttgaggatagcgacgatggcatttattgctgcaccgcaaataatggggttggaggtgccgttgagagttgtggggcccttcaggttaaaatgaaacctaagataactcgtccaccgattaacgtaaaaatcattgaaggcctaaaagccgtgctgccgtgcaccactatgggcaatcctaagccatccgtgagctggataaaaggcgattcccccctcagggaaaacagtcgaatcgctgtgctcgaaagtggctctcttcggattcataacgtgcagaaagaagacgcaggccagtaccggtgcgtcgctaagaatagcctaggtaccgcatacagcaaggtcgtgaagttagaagtagaagaggaatccgagccagagcaggacaccaaagtgtttgcacggatactgcgcgctcctgaaagtcacaatgttactttcgggtcatttgttactctgcattgcactgcaaccggcattccagtaccaaccataacttggattgaaaacggaaatgctgtctctagcgggagcatccaagagagtgtgaaagaccgagtgatcgactcccgactgcagctgttcatcaccaagcctggtctgtatacttgcattgccacaaacaaacacggtgaaaagttttcgacagctaaggccgcagcgacgatttctatcgcggcctggaagaagtattgtctggccgtgaaagaactcttctgcgcgaaagagtggttggtcatggaagagaagacccacagggggttataccgctctgagatgcatcttctgtcagtgcccgaatgctcgaagcttccttcaatgcactgggatccaacagcctgcgccaggctgcctcacctggcattcccccccatgacatcaagcaagccatccgtggacatacctaacctgccttcgtcgagttcctcatctttttcagttagcccaacatactcaatgaccgtgataatttcaatcatgagctcatttgctatttttgtacttcttacgatcacaactctgtattgctgcaggcggagaaagcagtggaaaaacaaaaaacgagaatcagctgcagtcaccttgaccacactgcctagcgagctcctcttggaccgtctacaccccaacccgatgtaccagcgcatgcctctgttgctcaatccaaaactgttgtcattggagtatccacgtaacaatatagagtacgtgagagacattggagaaggagcttttggacgggtctttcaagcaagagcacctggtcttctgccatacgaaccattcacaatggtcgccgtcaagatgctgaaggaggaggcttcggctgacatgcaggcagacttccaacgagaagctgccctgatggctgagtttgataatcccaacatagtgaaactgctgggtgtctgcgcagtgggcaagcctatgtgtttgcttttcgagtatatggcgtatggggacctcaacgagttcctccgatctatgtcacctcacaccgtctgctctctgagccacagcgacctgagcatgagggcccaggtgtcctcaccgggacctcctcccttgtcttgcgctgagcagctgtgtatcgccagacaagtggccgccggaatggcttatttgtctgagaggaaatttgtgcaccgagacctggcaacccgcaattgtctggtgggtgagaatatggtggtgaagattgccgattttggactgagccgcaatatttactccgcagactattataaagcgaacgagaacgatgccattcctatccgatggatgccgccagagtccatcttttacaaccgttacactacggaatctgacgtctgggcatatggggtggtgctttgggagattttcagttacgggctgcaaccttactacggaatggcccatgaggaggtgatatactacgtcagggatgggaatattctctcctgtccggagaactgcccggtggaactgtataacttgatgcgcctttgttggagcaagctgcccgccgatcggcctagcttcacctcaatccataggatacttgagcggatgtgcgagagggcagagggtacagtgagcgtgtag

SEQ ID NO: 195810 - DNA, 1167 bp, synthetic construct
  misc_feature 1..1167: note = Description of Artificial Sequence: Synthetic coding sequence
  source 1..1167: mol_type = other DNA
atggccgtgagcgtgacccccatccgggacaccaagtggctgacccttgaagtgtgcagagaatttcaacgcggtacctgttctcggccagataccgaatgcaagtttgcacatccctctaagagctgtcaagttgaaaacgggagagtgatcgcctgttttgattcactgaagggccgatgctcccgagagaactgcaaatacctgcatcctcctcctcatctgaagactcagctggagatcaacggtcgtaataatcttatacaacagaaaaacatggccatgctggcccaacagatgcagctggcaaatgccatgatgccaggagccccccttcagcccgtaccaatgttctccgtggcaccatctcttgcaaccaatgcctccgctgcagctttcaatccatatttggggccagttagtcctagcctcgtccccgccgaaatcctgcctaccgctccaatgcttgtcactggaaatccgggcgttcctgtccccgcagccgctgccgccgcagcccagaaattaatgagaaccgatcggctggaagtgtgccgggaataccagcggggtaattgcaatagaggggaaaacgactgcagatttgcccatcctgccgatagtacaatgattgataccaacgacaataccgtgactgtttgtatggactatattaaagggaggtgttcaagagaaaaatgtaaatacttccatccccccgcccacttacaggctaagataaaggctgcacaatatcaggtcaaccaagccgcagccgctcaggctgccgccacagccgcagctatgactcaatctgccgtgaaaagcctcaagcggcctctcgaggccacattcgacctgggaatccctcaagccgtcctgccgccgctgccaaaaaggcccgccttggaaaagactaacggcgctaccgcagtctttaataccggaatttttcagtaccagcaggcccttgcgaacatgcagctgcaacaacacacagcttttctgcctccggtccccatggtgcacggagcgactcccgccaccgttagtgctgcgacaacgtcagcaaccagcgtaccatttgccgccaccgcgaccgctaaccagattccaatcatttccgctgagcacctaacgtcacacaagtatgtcactcaaatgtag

SEQ ID NO: 195811 - DNA, 909 bp, synthetic construct
  misc_feature 1..909: note = Description of Artificial Sequence: Synthetic coding sequence
  source 1..909: mol_type = other DNA
atggccgtgagcgtgacccccatccgggacaccaagtggctgaccctggaggtctgtagggaattccagaggggtacatgcagccgccctgacacggagtgtaagtttgctcatcccagcaagtcatgtcaggtggagaacggacgtgtcatagcctgttttgactcactcaagggacgttgctcccgggaaaattgtaagtaccttcatccaccaccccatcttaaaacacagctcgagataaacggtcgaaataaccttatccaacagaagaatatggcaatgctcgcccagcagatgcaactcgcgaatgcaatgatgcctggcgcccctttacagccagtggtatgtagagagtatcaaagaggaaattgcaaccgcggggaaaacgactgcaggtttgctcacccggctgatagcactatgattgatactaatgacaacacagttaccgtctgtatggattacatcaagggaaggtgttcgagggaaaaatgcaagtactttcaccctccggctcacctgcaggcgaagatcaaggccgcccagtatcaagtaaaccaagccgctgccgcccaagctgctgcaaccgcagcagctatggggattcctcaggctgtcctcccccctctgcccaagagacctgctctagagaaaacaaatggcgccacagccgttttcaataccggaattttccagtaccagcaagctctcgccaacatgcagctccagcagcatactgcattcctgcctcctgtgccgatggtccatggggccacgccagccactgtctctgcagcaaccacctcagctacaagcgtcccattcgcagctacagccaccgccaaccaaatacccatcatctcagccgaacatctcacctctcacaagtacgtgactcagatgtag

SEQ ID NO: 195812 - DNA, 1023 bp, synthetic construct
  misc_feature 1..1023: note = Description of Artificial Sequence: Synthetic coding sequence
  source 1..1023: mol_type = other DNA
atggccgtgagcgtgacccccatccgggacaccaagtggctgaccctggaggtgtgccgagagttccaacggggaacgtgtagcaggcccgatacagaatgcaagttcgcccacccctccaagagctgccaggtcgagaacggccgagtcatagcatgctttgattccctgaaagggaggtgcagcagggagaactgtaagtatcttcatccccccccgcatttgaagactcagctcgagatcaatggcaggaataacctgattcagcagaagaatatggcaatgctcgcccaacagatgcaactagccaatgccatgatgcccggagccccccttcagcccgtgcccatgttcagcgttgctcccagtctggccacaaatgcctcggctgccgcattcaatccttacttaggaccggtgtccccatctctcgtaccagcggagattctaccaaccgcgcccatgcttgtaacgggaaatcctggtgtacccgtgccggccgcagccgctgccgcagctcagaaacttatgaggacagaccgcctggaggtgtgtcgggagtaccagagaggtaattgcaacaggggcgagaatgattgtcgcttcgcgcatcccgccgattctactatgatcgacacaaatgataatactgtaaccgtctgcatggattatatcaagggcagatgctcacgggagaaatgtaagtatttccatcctccagcacatttgcaggccaagatcaaagccgcacaatatcaagttaaccaagcagctgccgcccaggccgcagcaactgctgctgccatgttcccatggtgcacagtcttaagacagcctttatgtccgcagcaacagcatctgccccaggtgttcccatcattacagcagccccagcccactagccctatccttgacgcttccactctgctcggagcaactagctgcccagcagctgcaggtaaaatgattcccatcatttcagcagagcacctgaccagccacaaatacgtgacccagatgtag

SEQ ID NO: 195813 - DNA, 1149 bp, synthetic construct
  misc_feature 1..1149: note = Description of Artificial Sequence: Synthetic coding sequence
  source 1..1149: mol_type = other DNA
atggccgtgagcgtgacccccatccgggacaccaagtggctgaccctggaagtctgccgtgagttccagcgcggcacctgcagccggcccgataccgagtgcaaattcgcccacccttctaaatcttgccaggtggagaacggtagagtgatagcctgcttcgattcgttgaaaggccggtgctctagggagaattgcaagtacctgcacccgcctccgcacctgaagactcagctggagatcaatggaaggaacaaccttattcagcagaaaaacatggctatgttggcgcagcagatgcagctggcaaatgcaatgatgccaggggccccgcttcagcctgtgccaatgttctctgtggccccatcattggctaccaatgcaagcgctgctgcctttaatccttacctgggccccgtatcaccaagccttgttccagccgagatcctcccaactgcgcctatgcttgtgaccggcaatcctggagtgccagttccggctgccgcagccgccgccgctcagaaactaatgagaacagaccgcctcgaggtctgtcgtgagtaccaacgagggaattgcaatcgaggtgagaatgactgccgcttcgcgcatccagccgacagtaccatgatagacacgaatgataatacagtgactgtatgcatggattatatcaagggcagatgttcgagagaaaagtgtaaatacttccatccaccagcacacttacaggccaagatcaaggcagcacagtatcaggtgaaccaagccgccgctgcccaggccgccgccactgccgctgctatggggattccccaagccgttctgccccctctccctaagagacctgcccttgaaaaaactaatggggccaccgcagtctttaacaccggcatttttcagtaccagcaggcgttggccaatatgcaactgcagcaacataccgcatttctgccccctggttctatcctttgtatgacccctgcgacgtccgtcgtccctatggtccacggcgccacaccggcaacggtgtccgcggcaactactagtgctacatccgttccctttgccgccacagccactgcaaatcagatcccaatcatctctgccgagcacctgacctcccacaagtacgtgacccagatgtag

SEQ ID NO: 195814 - DNA, 1113 bp, synthetic construct
  misc_feature 1..1113: note = Description of Artificial Sequence: Synthetic coding sequence
  source 1..1113: mol_type = other DNA
atggccgtgagcgtgacccccatccgggacaccaagtggctgacccttgaagtttgtagagagttccagcgtgggacttgtagccgccccgatactgagtgtaagttcgcccatccctcaaagagctgtcaggtagaaaatggacgcgtaattgcctgctttgactctctcaaaggaagatgttctcgagagaattgcaaatatcttcaccctcccccccacttgaagacgcaacttgagatcaacggtcgaaacaacctgatacagcagaagaacatggctatgcttgcacagcagatgcagctcgctaacgcaatgatgcccggagctcccttgcaaccagtgccaatgttttccgtggccccctcccttgccacaaatgcttccgcagccgcatttaacccttacctcggccctgtgagcccctccctcgtgcccgcagagatcctgcccaccgcaccgatgttggtcaccggcaaccccggcgtgccagtcccagctgccgcagctgcagccgcgcagaagctcatgcggaccgataggctagaggtttgtcgagaatatcaacgcggaaactgtaacaggggggagaatgactgtcgcttcgcacatccagccgactccactatgatcgacactaacgataacaccgttactgtctgcatggactacattaagggacggtgctctcgtgaaaaatgtaagtacttccatcctccagctcatcttcaggctaaaatcaaggcagctcagtaccaggtgaaccaagcggccgccgcccaggccgccgccacggctgctgcgatgggcatccctcaggccgtgctgcccccccttccaaaaaggcccgcactggagaagactaacggcgcaacagctgtgttcaacaccggtatcttccaatatcagcaggctttggccaacatgcagctgcagcagcacaccgcattcctgcccccagtaccaatggttcacggcgctacacccgccactgtgagcgctgctactacatccgccacatccgtgccctttgccgccacggccactgccaatcagattccgatcatctctgccgaacacctgacgagtcacaagtacgttacccagatgtag

SEQ ID NO: 195815 - DNA, 1029 bp, synthetic construct
  misc_feature 1..1029: note = Description of Artificial Sequence: Synthetic coding sequence
  source 1..1029: mol_type = other DNA
atggccgtgagcgtgacccccatccgggacaccaagtggctgaccttggaggtgtgcagagaattccagcgcggcacctgttcccgaccagacactgaatgtaaatttgctcatcctagtaaaagttgtcaggtcgagaatgggcgcgtaattgcgtgcttcgactcactgaagggaaggtgttcaagagagaattgcaagtacctgcaccctccaccacacctgaagacccagctagaaattaatggtaggaacaacctcattcagcagaaaaatatggccatgcttgctcagcagatgcaactggctaatgcgatgatgcctggcgccccccttcaacctgtacccatgttcagcgttgcgccaagccttgcaactaatgcaagcgcagccgcatttaatccttacctcggtcccgtgagcccgagcctagtaccagcagagattctgcctaccgccccgatgctggtgaccggcaacccaggcgtgccagtgccggccgctgcagcagcagcagctcagaagctgatgaggaccgatcgcctagaagtctgcagagaatatcagagagggaactgcaatcgcggcgagaacgattgtcggtttgcccatccggcagattcaaccatgattgataccaacgacaacacggtaactgtctgcatggattatataaagggcaggtgttctcgggagaaatgtaaatacttccatccacctgcccacctgcaggcaaagatcaaagccgcccagtaccaggtgaatcaggcagctgcggcccaggccgctgccacagcagcggccatgggtatcccgcaggccgtgcttccacccctgcccaaaaggcccgcattggaaaagaccaatggggctaccgccgtctttaacactggcatattccagtaccagcaggcgctcgccaacatgcaattgcaacaacacactgccttcctgccgccaggaagtatactgtgcatgacaccagcaactagcgtcgacacacataatatctgccgtactagtgattag

SEQ ID NO: 195816 - DNA, 1167 bp, synthetic construct
  misc_feature 1..1167: note = Description of Artificial Sequence: Synthetic coding sequence
  source 1..1167: mol_type = other DNA
atggccgtgagcgtgacccccatccgggacaccaagtggctgaccttggaagtttgccgggagttccagagaggcacatgttcccggcctgatacggaatgtaagtttgctcacccctcaaagtcttgtcaggtagagaatgggagagtgatcgcatgcttcgatagcctcaagggccgatgctcccgggaaaactgtaagtacctgcatcctcctcctcatcttaagactcagctcgagatcaatggccgcaataacctgatacagcaaaagaacatggcaatgctcgcacagcagatgcaactggctaacgctatgatgcctggggctcccctgcagccggtacctatgtttagcgtcgctcccagtctggccacaaatgctagcgccgctgctttcaatccatacctgggaccagtctctcctagtttggttcctgccgagattctgcccaccgccccaatgctggtaacagggaacccgggcgttcccgtaccggccgcagcggcggctgcggcacagaaattgatgaggacagataggctggaggtgtgcagggagtaccagcgagggaactgtaatcgtggagagaatgactgtaggtttgcccacccggcagacagcacaatgatcgacacgaatgacaataccgtcaccgtttgcatggactatataaagggaaggtgctcccgggagaaatgcaagtatttccacccgcccgcccacttgcaggccaagatcaaggccgcgcagtaccaggtcaatcaagctgccgcggctcaggccgccgctacagcagccgcgatgacacagtcagccgtgaagagcctaaagcgcccattggaggctacctttgacctgggcattccccaggccgtgctgcccccattacctaagcggccggctttggagaagactaatggcgccaccgcggtttttaacaccggcattttccagtaccagcaagccctggccaacatgcagctgcagcagcacaccgctttcctgcctcccgtgccaatggttcacggggctacaccagccactgtgtccgcagctacgacgtctgcaacctccgtgcctttcgctgccacagccacggccaatcagattcccattattagcgccgaacacctcactagtcacaagtatgtgacccaaatgtag

SEQ ID NO: 195817 - DNA, 1023 bp, synthetic construct
  misc_feature 1..1023: note = Description of Artificial Sequence: Synthetic coding sequence
  source 1..1023: mol_type = other DNA
atggccgtgagcgtgacccccatccgggacaccaagtggctgaccctggaggtgtgcagagagtttcagcgaggaacttgtagtcgtccagataccgaatgcaaattcgctcatccgtctaaaagttgccaggtcgagaatggcagggtaatcgcatgtttcgactccctaaagggaaggtgttcacgagaaaactgcaagtatctacaccccccgccccaccttaagactcagctggagattaacgggaggaacaatctcatccagcaaaaaaatatggccatgctggcacagcagatgcagctagcgaatgctatgatgccaggcgccccactgcagcccgtcccaatgttctccgtggccccatcattggcaaccaacgccagcgctgcggctttcaatccctacctaggtcctgtgagcccatctctcgtccccgcagagatcctgccaacagccccaatgctggtaaccggaaatcctggtgtgccagttccagcggctgctgctgcagcggcccagaaactgatgaggactgaccggctcgaagtgtgcagggagtaccaacgagggaattgcaacaggggagagaatgactgtcgcttcgcccaccccgccgattcaacaatgatcgacaccaacgacaacacagtgacagtctgtatggattatattaaaggccggtgcagcagagaaaagtgtaagtacttccaccctccagctcatctccaggctaaaattaaggctgcccaatatcaggtgaaccaagcggctgcagcacaggcagccgccactgccgccgctatgttcccatggtgcacagtgctgaggcagccgctttgtccacagcaacagcatctgcctcaagtcttccctagtctccagcagccacaacctacttcccctatactggacgcgtccacactactaggtgccaccagttgtccagccgcggccggcaaaatgattccgatcatctcggccgagcatctgaccagtcataagtatgtgacacaaatgtag

SEQ ID NO: 195818 - DNA, 909 bp, synthetic construct
  misc_feature 1..909: note = Description of Artificial Sequence: Synthetic coding sequence
  source 1..909: mol_type = other DNA
atggccgtgagcgtgacccccatccgggacaccaagtggctgaccttagaagtatgtagggaattccagagggggacctgctccaggcccgacacagaatgcaaatttgcccatccgagcaagtcctgtcaggttgagaatggtcgcgtgatcgcatgcttcgattccctgaaaggcagatgcagccgtgaaaactgcaagtatctgcacccaccccctcatctgaagactcagctggaaatcaatggaaggaataacctcattcagcagaagaatatggcaatgctcgcccagcagatgcagctagcgaatgccatgatgcccggtgctcctcttcagccagtggtctgtagagagtatcagcggggaaattgcaataggggagagaatgactgccgctttgcacaccccgccgattctacaatgatcgacactaacgacaacacagttaccgtgtgcatggattacattaaaggtcgctgtagcagagagaaatgcaaatacttccacccgcctgcccatttgcaggcgaaaatcaaggcagctcagtatcaagttaatcaagcggccgcagcgcaggcagcagccaccgcggccgcgatgggaattccacaggccgtgctgccgccccttcctaaacgccccgccctcgagaagacgaatggcgctaccgcagttttcaataccggaatttttcagtaccagcaggccttagcaaacatgcaactccaacaacataccgcttttctgccgcccgtgcctatggtgcacggcgccactcccgcgaccgtgtctgccgctacgacgtctgcaacgtcagtgcctttcgctgctaccgctaccgccaatcaaatacccattatttcagcagagcacttaacaagccataagtacgtcacccagatgtag

SEQ ID NO: 195819 - DNA, 1029 bp, synthetic construct
  misc_feature 1..1029: note = Description of Artificial Sequence: Synthetic coding sequence
  source 1..1029: mol_type = other DNA
atggccgtgagcgtgacccccatccgggacaccaagtggctgaccctggaagtgtgccgggagtttcagcgcggcacctgctctcgcccagacacagagtgcaagtttgctcacccaagtaaaagttgtcaggtcgagaacgggcgagttatcgcgtgctttgactcactcaaaggccggtgcagcagggagaactgcaagtacctgcatcccccccctcacctcaaaactcagctggaaatcaacggccgtaacaacctgatccagcagaagaatatggctatgctggctcagcaaatgcaactggccaacgcgatgatgcctggagcccctctgcagccggtgcctatgttttcagtcgcaccatctttagcaacaaacgcaagcgcggccgcctttaatccataccttggccctgtatctccaagtttggtgccagcagagattctgcccaccgccccaatgctggtgacagggaatcctggagtccctgtcccggctgcagccgccgccgcagcacagaaacttatgcggaccgaccgcttggaggtgtgcagagagtatcagcgaggaaactgtaatcggggagaaaacgattgtaggtttgcccaccccgcggattccacgatgattgatacgaacgataatactgtgactgtttgcatggactacatcaaagggaggtgctcaagggagaaatgcaaatattttcaccctccggcccatctgcaggcgaagattaaggcagcccaataccaggttaatcaagccgccgccgcccaggccgcagctaccgcagctgccatgggaataccacaagccgtcctgccccccctccctaagcgccctgcccttgagaaaacgaatggcgcgaccgccgtgttcaacactgggatctttcaataccaacaggctttagccaacatgcagttacagcaacacactgcctttctgccccctgggtctattctgtgtatgacccctgcgactagtgtcgatacacacaacatttgccgaacctctgattag

SEQ ID NO: 195820 - DNA, 1032 bp, synthetic construct
  misc_feature 1..1032: note = Description of Artificial Sequence: Synthetic coding sequence
  source 1..1032: mol_type = other DNA
atgggccggtgcagccgggagaactgcaagtacctgcacccccccccacacttgaaaacccagctggagataaatgggaggaataacctgattcagcagaaaaatatggctatgctggcacagcaaatgcagcttgccaacgctatgatgcctggcgcaccactacagcccgtgccaatgttttcagtcgccccctccctagctactaatgcttccgccgccgcatttaacccctatctggggcctgtgtccccatccctggttcccgcagagatcctgcccaccgcccccatgctcgtgaccgggaaccctggcgtgcccgtaccagccgccgccgccgccgcagctcagaaactgatgcggactgatcgtctggaggtgtgtcgggagtatcagcgtgggaattgcaatagaggggagaacgactgtcgctttgcccaccctgccgacagtaccatgatcgatactaatgataataccgttaccgtttgtatggattacatcaaaggcaggtgtagtagagaaaagtgcaagtatttccatcctccggcacatctacaggcaaagatcaaagcagctcaatatcaggtcaaccaggccgctgctgcccaagccgccgcgaccgccgcagctatgacccagagtgctgtgaaaagcctgaagcgccccctggaggccactttcgatcttgggatcccacaggcagtgcttccaccactacctaagcggccagctctagagaagactaatggggctactgcggttttcaacacaggcatcttccaataccagcaggcacttgccaatatgcagttgcagcaacataccgcgtttttaccgcccggaagcatcctgtgtatgaccccggccacatctgtggtccctatggtgcacggcgctacccctgctactgtttcagctgctaccaccagcgcaacctcagtgccttttgcagcaactgccaccgcaaatcagatccccataatctccgcagagcacttgacatcacacaagtacgtaactcagatgtag

SEQ ID NO: 195821 - DNA, 945 bp, synthetic construct
  misc_feature 1..945: note = Description of Artificial Sequence: Synthetic coding sequence
  source 1..945: mol_type = other DNA
atggccgtgagcgtgacccccatccgggacaccaagtggctgaccttagaagtgtgccgagaatttcagcgcggcacatgcagtagacctgatacagagtgtaagtttgcccacccgagcaagtcttgtcaggtagagaacgggagagtcatagcttgttttgattctctgaaaggccgctgctcgagggaaaactgcaagtaccttcatcctccccctcacttgaaaacccaactggagatcaacgggcgtaataacttgatccagcagaagaatatggccatgctagcacaacagatgcaattggctaacgccatgatgcccggggcccctttgcagcccgttgtgtgccgggagtatcagaggggaaactgcaaccggggggaaaacgactgtagatttgctcatccggcagatagtacgatgattgatacaaacgacaacacagtgacagtgtgtatggactatataaaagggcggtgcagtcgagaaaagtgtaaatattttcaccctccggctcatctgcaggccaagatcaaagctgctcagtaccaggtgaaccaagctgccgccgcacaggctgctgccacagcagctgccatgggcattccgcaagccgtcctacccccactgccaaaacgtcccgctctggaaaagacaaacggcgccaccgccgtgttcaacacaggcattttccagtaccaacaggccctggcaaacatgcagttgcagcagcacaccgcgtttctgccacctggttctattttatgcatgacccctgctacttccgtggtccccatggtccatggcgctacccccgccaccgtgagcgcagccacgacaagtgccacctcagtccctttcgccgcgacagctactgctaaccaaatccctatcatatcagccgaacatctgacatcccacaaatatgtaacacaaatgtag

SEQ ID NO: 195822 - DNA, 1005 bp, synthetic construct
  misc_feature 1..1005: note = Description of Artificial Sequence: Synthetic coding sequence
  source 1..1005: mol_type = other DNA
atgaccgccgtgaacgtggccctgatccgggacaccaagtggctgacactggaggtttgccgtgaatttcagcgaggcacctgttcaagagcggacgcagactgcaagtttgctcacccaccccgggtgtgccatgtggagaatggtcgagtggtggcttgcttcgattctctgaaagggcgctgcactcgcgagaactgcaaatacttacatccccccccacacctcaagacgcagctagaaattaatgggcgtaacaacctcatccagcagaagaccgctgcggccatgtttgcccagcagatgcagctcatgttgcagaacgcccagatgtcttctttggggagttttcccatgactccgtcaataccagctaaccccccaatggcatttaacccatatattccccatcccggcatgggacttgtcccagccgaactggtgccgaacacccccgtgctgatcccgggaaaccctcctctggccatgccgggagctgtgggccccaagttgatgagatccgataaattagaggtctgcagagaattccagcgcggtaactgcactagaggcgagaacgactgtcgctacgcccacccgactgatgcctcaatgatcgaggctagtgataatactgtgaccatttgcatggattacattaaaggacgatgctcccgcgaaaaatgcaagtatttccacccacccgcacacctgcaggctaggttgaaagccgcccaccatcaaatgaaccactccgctgcctccgccatggccctgacaaacctgcaacttccccaacctgcatttatccctgctggccccatactctgcatggcaccggccagcaacatagtacctatgatgcatggagcaacacccacaacggtcagcgctgctaccacccctgcaacatcggtcccctttgctgcaccaactacaggaaatcagattcctcagttgagcattgacgagctgaactctagtatgtttgtgagccaaatgtag

SEQ ID NO: 195823 - DNA, 777 bp, synthetic construct
  misc_feature 1..777: note = Description of Artificial Sequence: Synthetic coding sequence
  source 1..777: mol_type = other DNA
atgttcgcccagcagatgcagctgatgctgcagaacgcccagatgtcctcgctgggaagctttcccatgacgcctagcatcccagccaatcctccaatggccttcaatccctatattcctcaccctgggatgggactcgtgcctgccgaactcgtgccaaacacacccgtcctcataccgggcaacccaccactggccatgcccggcgccgtggggcctaagctgatgagatctgacaaactggaggtttgtagagagttccagaggggaaattgcacccgcggagagaatgactgccgctatgctcatcccaccgatgcaagcatgattgaggcaagcgataacaccgtcaccatttgcatggactacatcaaaggccggtgctcgagagagaagtgcaagtactttcaccccccagcacatctccaggccagactgaaagccgctcaccatcagatgaatcacagcgccgcttctgccatggccttgcagccaggaactctccagctcatcccaaagaggagtgcgcttgagaaaccaaatggagcaactcctgtgtttaatcctaccgtgttccactgtcagcaggccctcaccaatcttcagttacctcagcctgcttttatccccgcaggtccaatcctctgcatggccccagcctctaatattgtgccaatgatgcatggtgcaacacctactacagtgtcagccgcaacaacgccagctacttcagtgcctttcgctgcgcctactaccgggaaccaacttaaattctag

SEQ ID NO: 195824 - DNA, 915 bp, synthetic construct
  misc_feature 1..915: note = Description of Artificial Sequence: Synthetic coding sequence
  source 1..915: mol_type = other DNA
atggagcgggccagcaagaacctgaagggccggtgcacccgggagaattgcaagtatctccatccacccccccaccttaaaacccagctggagattaacgggcgcaacaacttgatacagcaaaagaccgctgccgccatgttcgcccagcagatgcagttgatgctccaaaacgcccagatgtcatcactggggtccttcccaatgacacctagtatcccagccaatcctccgatggcttttaatccatatataccccatcctgggatgggactcgtccccgctgagctcgtccccaatacaccagtcctgatacctggaaaccctccactcgccatgcccggtgcagtgggcccaaagctgatgcgctctgacaagctggaggtgtgccgcgaattccaaagggggaactgcacgcgaggtgagaatgattgtcgttatgcccatcccactgacgccagcatgatcgaggcatccgacaataccgtgactatttgtatggattacatcaagggcagatgctctcgtgagaaatgcaaatacttccacccgcccgctcacctccaggccaggctaaaggccgcccatcaccagatgaatcattctgcagcatcagctatggccctgcagcccggcaccctgcagctgatacctaagcgctctgcactggagaaacctaatggggccacgccagtattcaaccccacagtgtttcactgccaacaggcgcttacaaacctccagctgcctcaacctgcatttatccccgccggacccatcttgtgcatggcacctgcctcaaacatcgtgccaatgatgcacggggctacccccacaacagtctcagccgccacaacgcccgctacttccgtccctttcgccgctcccacgaccggaaatcaactgaagttctag

SEQ ID NO: 195825 - DNA, 1065 bp, synthetic construct
  misc_feature 1..1065: note = Description of Artificial Sequence: Synthetic coding sequence
  source 1..1065: mol_type = other DNA
atgaccgccgtgaacgtggccctgatccgggacaccaagtggctgaccttagaggtgtgtagggagttccagagagggacatgcagtagggccgacgccgactgtaagttcgcacatcctccccgcgtctgtcacgtggagaatgggcgcgttgttgcctgttttgactctttgaaggggaggtgtacacgggagaattgtaagtacctgcatcctcctccacacttaaagacacagctggaaatcaatgggcgtaacaacctaatccagcagaaaacggcagctgcaatgtttgcacagcagatgcaactcatgttgcagaatgcgcagatgagttcgttgggcagctttcccatgactcccagtattccggccaacccccctatggcgttcaacccatatatcccccatccaggaatgggacttgtgcctgccgaacttgtcccgaatacgccggttctgattcctggcaatccacctttggccatgcctggcgccgtaggcccaaagctgatgcgctccgataagctggaggtgtgtagagagtttcagcgcggcaattgtacccgcggagaaaacgattgtagatatgctcatccaactgacgcaagcatgattgaggcctccgataatactgtgaccatatgtatggattatattaaagggcgctgttccagggaaaagtgcaaatatttccacccccctgcgcacctccaagcgcggctgaaagctgcccatcatcagatgaatcactccgccgcatcggcaatggcactgcagcccgggacactgcaactcattccaaagaggtcggcactcgagaaaccaaacggcgccaccccagtgtttaatccgacagttttccactgtcagcaggcattaactaacttacagctgcctcagccagcctttattcccgcagggcctattctttgcatggcccccgcttcaaacatcgtgccgatgatgcatggagcaacccccaccaccgtctctgcagccactaccccggccacatccgtgccctttgctgcccccactacaggcaatcaactgaagttctag

SEQ ID NO: 195826 - DNA, 1029 bp, synthetic construct
  misc_feature 1..1029: note = Description of Artificial Sequence: Synthetic coding sequence
  source 1..1029: mol_type = other DNA
atgaccgccgtgaacgtggccctgatccgggacaccaagtggctgacgttagaggtgtgtcgcgagtttcagcgtggaacatgttctcgcgcagatgcagactgcaagtttgcacatccgccacgcgtctgccatgtggaaaacggtcgcgtggtggcatgtttcgactctctgaaaggcagatgcacgagagagaactgcaagtatctgcacccgcccccacatctcaaaacacagctggaaattaatggacgcaacaatctgattcaacaaaagaccgctgccgctatgtttgctcagcagatgcagttgatgctccagaacgcccagatgagctctttggggagttttccgatgacacctagcatacctgctaacccacctatggcatttaatccctatatacctcatccgggcatgggattagtaccagctgagctcgtacctaataccccagtactcatccccgggaacccacccctcgccatgcccggtgccgtgggacctaaacttatgcgctccgacaaactggaggtctgtcgcgagttccaaaggggtaattgcacaagaggcgaaaatgactgcagatacgctcaccctactgacgcttctatgattgaagcctctgacaacacggttaccatttgtatggattacatcaaaggcagatgctccagagagaaatgcaaatacttccacccaccagcacatctgcaggccaggttgaaggccgcccaccaccagatgaaccacagcgccgcctctgcaatggcactgcagcctgggacattgcaacttatacctaagcggtcagcccttgaaaaacccaacggcgctacacctgtcttcaaccccaccgtgttccactgccagcaagcgctgaccaacctccagctgccccagcccgccttcatacctgcggtgcccatgatgcacggcgccacccccactactgtttccgccgcaaccacccctgcaacgtccgtgccctttgccgcacctactaccgggaaccaactcaagttctag

SEQ ID NO: 195827 - DNA, 777 bp, synthetic construct
  misc_feature 1..777: note = Description of Artificial Sequence: Synthetic coding sequence
  source 1..777: mol_type = other DNA
atgttcgcccagcagatgcagctgatgctgcagaacgcccagatgtcatcactaggaagctttcctatgaccccctctatccccgccaaccccccaatggccttcaacccctacattccgcaccccggtatgggcctcgttccagccgaacttgtgcccaataccccggttttaatccctgggaatcctccactagctatgccgggggctgtcgggcctaagttgatgcgtagcgacaagctcgaagtgtgtcgcgagttccagaggggcaactgcactcgtggagagaatgattgtcgctatgctcatcccaccgacgccagcatgatagaagctagtgacaatacagttaccatttgtatggactatatcaaaggccggtgctcaagagagaaatgtaagtattttcatccgcctgctcaccttcaggcgaggctgaaggcagctcaccatcagatgaaccacagcgccgcctctgctatggcattgcagcccggtactctgcagctaattccaaagaggtccgcactggaaaagcctaacggggccacgcccgtcttcaatcccactgtgttccactgtcagcaagctcttactaacctccagctcccccaaccagcctttatccccgctgggcccatcctctgtatggcccccgcatctaacattgtgccaatgatgcacggagcaaccccaaccaccgtttcagccgctacgactcccgcgacaagtgtcccatttgcagcaccgacgacggggaatcagctcaagttctag

SEQ ID NO: 195828 - DNA, 672 bp, synthetic construct
  misc_feature 1..672: note = Description of Artificial Sequence: Synthetic coding sequence
  source 1..672: mol_type = other DNA
atgttcgcccagcagatgcagctgatgctgcagaacgcccagatgtcttccctgggaagcttccctatgaccccaagtatacctgccaatcccccaatggcattcaacccctacatcccccatcctggaatgggattagtgcctgctgagctggtaccgaatactcctgtcctcattcccgggaacccacccctggccatgcctggggcagtggggcctaaactgatgagaagtgacaagctggaagtatgtagagagtttcaacgtggcaattgcacccgtggcgagaacgactgccggtatgcccacccaaccgacgcctcgatgatagaagccagtgataacaccgtcaccatctgtatggattatattaaaggccgatgcagcagagaaaagtgcaagtatttccacccccccgcccacctgcaggctagactcaaggcagcgcaccatcagatgaatcattcagctgcctccgccatggcgctgcagcctggaaccctgcagttgataccaaaacgctccgccctggaaaaacccaacggggccaccccggtcttcaatcccaccgtgtttcactgccagcaggcccttaccaatcttcagttaccccagccagctttcattccagccggaccgatactgtgtatggctcccgcctccaacatctag

SEQ ID NO: 195829 - DNA, 729 bp, synthetic construct
  misc_feature 1..729: note = Description of Artificial Sequence: Synthetic coding sequence
  source 1..729: mol_type = other DNA
atgttcgcccagcagatgcagctgatgctgcagaacgcccagatgagctccttaggaagcttcccaatgaccccaagcattcctgctaaccctcccatggcctttaatccatacatcccccacccagggatgggccttgttcccgccgaactagtgcccaacacacctgtattgatcccaggcaacccaccccttgctatgcccggtgccgtggggccaaagctgatgcggtctgacaagttggaagtctgccgcgaattccagcgaggaaattgcacaagaggggagaacgattgccgatacgctcacccaacagatgccagcatgatagaagccagtgacaacactgttacaatatgcatggactatattaagggacgatgttctcgcgagaagtgtaagtactttcacccccccgcgcacctgcaggcccggctgaaagcagcgcatcaccagatgaatcactccgccgccagcgccatggcactccagccgggtactctgcagctcatccccaaacggtctgctttagaaaaaccaaatggagccacaccagtcttcaatcctactgtgttccattgtcagcaggcactgactaatctccagctccctcagcctgcattcatcccagcaggacctatactgtgtatggctccggcaagcaacattgtgccaatgatgcacggagcgacccccaccacagtaagtgccgccaccactccggcatag

SEQ ID NO: 195830 - DNA, 453 bp, synthetic construct
  misc_feature 1..453: note = Description of Artificial Sequence: Synthetic coding sequence
  source 1..453: mol_type = other DNA
atcaagggccggtgcagccgggagaagtgcaagtacttccacccccccgcacatctgcaggctcgattgaaggccgcccatcatcagatgaaccactctgccgcgtctgccatggccctccagccggggactctgcagttgattcccaaaagatctgcactggagaagcctaacggcgcgacacccgtgttcaaccccacagtgtttcactgccagcaagccctgaccaatctgcagctgcctcagccagcctttatccccgcaggacctatcctctgcatggccccagcttcaaatattgtccccatgatgcatggcgcaacgcccaccacggtgtccgccgcaactacacctgcaaccagcgtgcccttcgctgcccccacaactggaaaccagatcccccaactatccatcgatgagctgaatagttcaatgtttgttagtcagatgtag

SEQ ID NO: 195831 - DNA, 879 bp, synthetic construct
  misc_feature 1..879: note = Description of Artificial Sequence: Synthetic coding sequence
  source 1..879: mol_type = other DNA
atggagcgggccagcaagaacctgaagggccggtgcacccgggagaattgcaagtacctacaccctccaccccatctgaagacacaattggagatcaatggccgcaataatcttattcagcagaagactgctgccgcgatgtttgcacagcagatgcagctgatgctgcagaacgcccagatgagcagcctggggtccttcccaatgaccccaagcatccccgctaatccacccatggctttcaatccctatatccctcatccggggatggggctcgtgcccgcagaactcgtccctaacacacccgttctcatcccaggtaatcctcctctcgcaatgcccggggccgtgggacccaagctaatgcggtccgataagctggaagtttgccgcgaattccaacggggcaattgcacccgaggagaaaacgattgcagatatgctcatcccaccgacgcatccatgatcgaagcatccgataacacagtgacaatctgtatggactacattaagggtcgctgttccagagaaaagtgtaaatactttcatccacccgcccatcttcaggcccgtttgaaagcagcccatcatcagatgaatcactccgcagcatcagctatggccttacagcctggcacgcttcagctcattcctaagaggagtgcactcgagaaacccaacggagcgacaccagtcttcaacccgaccgtgttccactgccaacaggcactcaccaatctgcaactcccacaaccagcgttcattccagctgtccctatgatgcacggagctaccccaacgaccgtgtcggccgctaccacaccagcaacaagcgttccttttgccgcgcctacgaccgggaatcagttgaaattttag

SEQ ID NO: 195832 - DNA, 1377 bp, synthetic construct
  misc_feature 1..1377: note = Description of Artificial Sequence: Synthetic coding sequence
  source 1..1377: mol_type = other DNA
atggagctggagaagcgggagaagcggagcctgctgaacaagaacctcgaggagaagctgaccgtttcggccgggggatccgaggctaagccgttgatcttcaccttcgtgcctaccgtccgacggctgccaactcacactcaacttgccgacacttccaagtttctcgtcaagatccccgaggagtcctccgacaagtctcccgaaaccgttaatcgctccaagtccaacgactacctgaccctgaacgcaggctcgcagcaggagcgggatcaggctaagctgacctgtcctagcgaagtgagcggcaccatccttcaggaacgggagttcgaggcaaacaagctccagggaatgcagcagagtgatttgtttaaggccgaatatgtccttatcgtggattctgagggcgaggatgaggccgctagccggaaagttgaacagggaccacccggcggcattgggactgctgcagtccggcccaaaagccttgccatcagcagtagcttggtttccgacgtagttcgacctaagacgcagggtaccgacctcaagaccagctctcacccagagatgttacacgggatggccccacaacagaagcacggacagcaatataaaaccaagagctcttacaaggccttcgctgctatccccactaataccctcttactcgagcagaaggctctagacgaacccgcgaaaactgagagtgtttcaaaggacaacactctggagccacccgtggagttgtactttcccgctcagctgagacagcagacagaagagctgtgcgccactattgacaaagtcctgcaggatagcctcagcatgcactctagcgatagcccctcaagatccccgaagaccctgttgggaagtgacacagtcaagacccccacaaccctgcctagagcggcaggcagggagacaaagtacgccaacctgtccagcccttctagtaccgtgtccgagagtcagctgaccaagcctggcgtgattaggccggtgcctgtgaagagcaggatcttattgaagaaggaagaagaagtatacgaacccaaccccttctcaaaatatctggaggataactcggacttgttcagcgaacaagacgtaacagtgcctcccaagcccgtcagcttacatcctctgtaccagaccaagttatacccccccgctaagtcacttctgcacccccaaacactatctcacgctgattgtctggccccaggccctttctcacacctcagtttctcgttaagtgacgaacaggagaattctcacaccctgttaagccacaacgcatgtaataagctctctcaccccatggtcgctatcccagagcatgaggctctcgactccaaggagcagtag

SEQ ID NO: 195833 - DNA, 873 bp, synthetic construct
  misc_feature 1..873: note = Description of Artificial Sequence: Synthetic coding sequence
  source 1..873: mol_type = other DNA
atgaccagctgcatcctgagcggcagcatccagaccaccccccaggtgagcgcaggaggcagcgaggcgaagcccctaatttttacgtttgttcccacagtcagacggctcccaactcatacccaactggccgatacatctaaattcctggtgaaaattcctgaggagtccagtgacaagagcccagagactgttaatcgcagtaaaagcaacgattatctcaccctcaatgctggatcccaacaggagagagaccaggccaagctcacgtgcccatccgaggttagcggaacgattctgcaagaacgggagttcgaggcaaacaaactgcaggggatgcagcagtcagacctatttaaggccgagtacgttctcatagttgattccgagggcgaggacgaggccgcttcaaggaaagtggagcaagggcctcccggcggcattggtaccgccgccgtgaggccgaaatcactggccatttcctcatccctggtctcggatgtagtgcgcccaaaaacccagggtacagatctgaagacgagcagccatcctgaaatgctgcatggcatggcccctcagcagaagcatggccagacccctactacgctgccccgggccgccggacgggaaacaaaatatgcaaacttatcctccccctcttccacggtttcagaatctcagctcacgaagccaggcgttatccggcctgttccagtgaaatcccggattctgctaaagaaagaagaagaggtttatgagcctaaccctttttccaagtacctggaggataatagcgatcttttcagcgagcagttatcgcatcccatggtggccatccccgaacacgaggcactggattctaaagaacagtag

SEQ ID NO: 195834 - DNA, 705 bp, synthetic construct
  misc_feature 1..705: note = Description of Artificial Sequence: Synthetic coding sequence
  source 1..705: mol_type = other DNA
atgtgcagctggtacctgggcttcgagtgcagcagcaagagcaacgattacctgacgcttaacgccgggtcccagcaggagcgggatcaagcaaaattgacttgcccctctgaggtaagtggtaccattctgcaggagagggagttcgaggctaacaagctgcaagggatgcagcagtcagacctatttaaggcagagtacgttctgatcgtggatagcgagggcgaggatgaagccgccagcaggaaagtcgagcagggccctcccgggggcataggcactgccgcagtgaggcccaaaagcctcgcaatttccagcagcttagtgagcgacgtcgtgcgcccgaaaacccagggcactgatttgaaaacaagttcccaccccgaaatgttacacgggatggctccacagcaaaaacatggccaaacccccacgacactgccccgggccgccggaagagagaccaagtacgcaaatttgtcttcaccgtcctctaccgtgagcgagtctcagctgacaaaacccggcgtaattaggcctgtacctgtgaaaagccgaatcctgctcaagaaggaggaagaggtttacgagcctaatccattttccaagtatctcgaggacaacagcgatcttttttcagagcagttgtctcaccccatggtggctatacccgagcacgaagctctggattccaaagagcagtag

SEQ ID NO: 195835 - DNA, 489 bp, synthetic construct
  misc_feature 1..489: note = Description of Artificial Sequence: Synthetic coding sequence
  source 1..489: mol_type = other DNA
atgcagcagagcgacctgttcaaggccgagtacgtgctgatcgtggactcagaaggcgaggatgaagccgcaagtcgcaaagtagagcagggaccaccaggtggcatcggtaccgcggccgtccgacctaagtctctggctatatcctcaagcctggtgagcgacgtggtccgtcctaaaacacagggaaccgacctgaaaacttcctctcacccggagatgctgcatggtatggcacctcagcagaaacacggccagcagtataagaccaaatcttcctacaaggcatttgctgctattcccacaaacaccctgctcttagagcagaaagccctcgacgaacctgctaaaacagagagtgttagtaaggacaacacccttgagccccctgtggagacccctaccacactacctcgggcagccggtcgagaaacaaaatacgcaaacttgtcttccccaagcagcacagtctcggagtcacaactatag

SEQ ID NO: 195836 - DNA, 2208 bp, synthetic construct
  misc_feature 1..2208: note = Description of Artificial Sequence: Synthetic coding sequence
  source 1..2208: mol_type = other DNA
atggccgccggcggcgccgtggccgccgcccccgagtgccggctgttgccctatgcactgcacaaatggagctcgttcagctcgacctatctgcccgaaaacatcttagtggataagccaaacgaccagtcctccaggtggtccagtgagagcaactacccgcctcaatatcttatcttgaagctagagcggccagctattgtgcagaacatcacctttggaaagtatgaaaaaacccacgtgtgcaacctgaagaagttcaaggtattcggaggaatgaacgaagagaatatgacggagttgctttcctcaggcctcaaaaacgactacaacaaggagactttcacactgaaacataaaatcgatgagcagatgtttccctgcaggtttatcaagattgtcccactgctcagttgggggccaagtttcaactttagcatttggtatgtcgagctctccggcattgacgatcccgatattgtccaaccctgtctgaattggtatagcaagtacagggagcaggaggccatccgcctctgcctcaaacatttccgtcagcacaattatacagaggcattcgagtcactacagaaaaagacaaagatcgctctcgagcatcccatgcttactgacatacacgacaaactagtgctgaaaggggattttgacgcctgcgaggaacttatcgagaaggctgttaacgacggtcttttcaaccagtatatctcacaacaagagtacaagccgcggtggtcccagatcatccccaaaagcaccaaaggcgatggggaggataatcgcccaggcatgagggggggccaccaaatggtgatcgacgttcaaacagaaaccgtatacctttttggtggttgggatggtacacaggacttggcagatttctgggcctattccgtgaaggagaaccagtggacctgcatttcccgtgacacagaaaaggagaatggaccctctgctcggagctgccataagatgtgtatagacatccagaggcgacagatctacactctgggtagatatctggatagctccgtccgcaactcaaagagtctcaaatccgacttttacagatatgacatcgataccaacacatggatgttgctgtcagaggacacagctgccgatggcggtcctaaactcgttttcgatcatcaaatgtgtatggattccgaaaagcacatgatctacacatttggggggagaatactgacatgtaacggatcagttgatgacagccgggcaagtgagccgcagttttccgggctctttgctttcaactgccagtgccagacatggaagctgttgcgagaggatagctgtaacgccggtcctgaagacattcaatcacgtatcggccattgtatgctgtttcactcgaagaacaggtgtctgtacgtatttgggggccagcgcagcaagacctacctgaacgactttttttcatatgacgttgatagtgaccatgttgacataatttctgatggtaccaagaaagactcaggtatggtcccgatgacaggatttactcagcgagccaccatagaccctgaactcaacgagatccatgtgctgagtgggctcagcaaggacaaagagaagcgcgaggaaaacgtgagaaattctttctggatctacgacatagtgcggaacagctggtcctgcgtgtacaaaaacgatcaggctgctaaggacaatccgacaaagtcactacaggaagaagaaccttgcccaagatttgctcaccagctagtatacgatgagctgcacaaggtgcactacctgtttggcggcaaccccggtaagagctgcagccctaagatgcgtttagatgacttttggtccttgaagctgtgtcgaccaagcaaagattatctgctgcgtcattgtaagtatttgatccgcaagcatcgtttcgaagagaaggcacaggtagatccgctatccgcactgaagtacctgcagaacgatctgtatataacagttgatcatagtgacccggaggagacaaaggagttccagctactggcttccgccctgttcaaatcggggtcagatttcaccgctctgggattttcagatgtcgatcacacctatgctcagcgtacccaactattcgataccctggtgaatttctttcctgactcaatgaccccacccaagggtaacctggtggacttaataactctttag

SEQ ID NO: 195837 - DNA, 558 bp, synthetic construct
  misc_feature 1..558: note = Description of Artificial Sequence: Synthetic coding sequence
  source 1..558: mol_type = other DNA
atgaccggcttcacccagcgggccaccatcgaccccgagctgaacgagattcatgtgttgtccggcctgagcaaggacaaggagaagagggaagagaacgtacgcaactccttctggatctatgatattgtgagaaactcctggtcatgtgtgtataagaatgatcaggccgcaaaggacaaccccaccaagagcctccaagaagaggagccttgcccccggttcgctcaccagctggtatacgatgaattgcataaagtgcactatctgttcggcgggaaccctggcaaaagctgttccccgaaaatgcgtttggatgacttctggagcctgaaactgtgtagaccatcaaaggattacctactacggcattgtaagtacctgatcagaaaacatcgattcgaggagaaggcccaagtcgaccctctcagcgctcttaagtacttgcaaaatgacctttacattactgtggatcactctgacccggaggagaccaaggaagccttccttatgtggatcacacccatgctgaaggaactcagctccctgactccttag

SEQ ID NO: 195838 - DNA, 3060 bp, synthetic construct
  misc_feature 1..3060: note = Description of Artificial Sequence: Synthetic coding sequence
  source 1..3060: mol_type = other DNA
atgatggccgccgccgccgccgccgccgccggcagcagcagcagcggaggcggcggcggcggaagcggctctagcagctcatcttctgatactagcagtacaggtgaagaggaacgaatgcgccggttattccagacctgtgatggggacggcgacggctacatttcccgcaacgatctgctcatggtgtgtaggcagctaaacatggaagaatctgttgcggagattatgaaccagttaggagcagatgagaacggcaagatcagtttccaggactttacgcgatgtcgtatgcagctggtgcgtgaaatcagaaaggaggaggttgacttgtctgctaagtctgacaacagttgtacaaagaagctacgggaccggatagccagctggcctacttcatctgataactccctgggagctttatctgctgccagggagagctgggaatacgacagcggcgcaagggatctccaatccccagatgtgcagagtcagagcgccctccaaaaattgcttgaatacggagggtctagcctccaccagcaggctgcactgcataagctactgacacagtcgccccacatcggcaactccgtgggagggtcctatctggagctggccaatactctgcacagcgctgctcttgcaagcttgaagggggatatcgtggaattaaacaaaagactacagcaaacagagagagagcgggatctgctcgagaaaaagttagcgaaggcccagtgcgagcagtcgcatcttatgagagagcacgaagacgtacaggaaagaaccactcttagatatgaggagcgcatcactgagctgcatagtgttatcgcggagttgaataagaagatcgatcggctgcaaggcaccactattcgcgaagaggacgagtactcggagctaagatccgaattgtctcagtcacagcatgaagtgaacgaagatagtcgctcgatggaccaggaccagacctctgtatccattccagaaaaccagagtaccatggtcacagccgacatggacaactgtagtgacctcaactcagagctgcagcgcgtgctcaccggtcttgagaacgtagtgtgcggtagaaagaaatccagctgctcgctgtccgtcgctgaagtcgacaagcacatcgaacagctgacaactgcctcagaacactgcgatctggccatcaagaccgtggaagaaatcgaaggagtactcggacgcgacctgtaccccaatcttgccgaggagcggtcacgctgggaaaaggagcttgcaggactgcgtgaagagaatgaaagcctgacagcgatgctgtgcagtaaggaggaagagctgaatcggacgaaggccactatgaatgctatcagagaggaacgcgatcgtctgagacgccgcgtaagggagctccaaacccgtctccagtccgtccaggccacaggaccatcgagtccagggagactaaccagcacgaatcggccaatcaatccttccaccggagaactttccacatcgtcttcatccaatgacatccccattgcaaaaattgcagagagagtgaaactgagtaagactcgctcggaatccagttctagcgaccgtcctgtcctcgggagtgaaatttctagcattggggtctcttcttccgttgctgaacatctggcgcactccctgcaggattgtagtaatattcaagaaatcttccagactctgtattcacacggaagtgccatatctgaaagtaagatccgcgaatttgaggtggagaccgagcgcctcaactcacgtattgaacacctgaagtctcagaatgacctgttaaccatcacccttgaggaatgcaaaagcaacgctgaacggatgtctatgctggtcggcaagtatgagagcaatgccaccgctctccgcctggccctgcagtatagtgaacagtgcattgaggcctacgagctgcttctcgcccttgccgaatctgaacaatctctcatcttggggcagttcagggccgctggcgttggctcctcgccaggcgaccagtccggagacgagaacattacccagatgttgaagagagctcacgactgccggaagacggcggagaatgccgctaaggcattgctcatgaagctggacggctcatgtgggggagccttcgctgttgccggttgttcagtgcagccgtgggagtcgctgagctccaactcacacacatctacgactagctcaacggctagcagctgtgacacagaattcactaaggaggatgaacagagactgaaagactacatccagcaactgaaaaacgacagagccgcagtaaagcttacaatgctggagctggagtccattcacatcgacccactgagctacgatgtaaagccacgcggagactcccaaaggctagacttggagaacgccgtgttgatgcaggagcttatggcaatgaaggaagagatggctgaactgaaggcgcagctgtatctccttgagaaggaaaagaaagccctcgagctgaagctgtccacgagggaagcccaggagcaggcctatctggttcatattgaacatctaaagagcgaggttgaggaacagaaagagcagcggatgcggtctctgtctagtacaagcagcggatccaaagacaagcccggaaaggagtgtgcagatgctgccagcccagcccttagtctcgctgagcttagaactacatgcagcgaaaacgaactcgcagcagaattcactaacgcaattcgtcgagagaagaagctaaaagcccgagtgcaagaactggtttcggctctggagaggctcaccaaatccagtgaaatacgacatcagcaatcagcagagttcgtgaacgacttgaaaagggctaactccaatcttgttgccgcatatgaaaaggccaaaaagaaacatcaaaacaagttaaagaaacttgagtcccagatgatggcgatggttgaaaggcacgaaacacaggtgaggatgctgaaacagagaattgcccttcttgaagaggaaaattccaggccccatacaaatgagacctctctatag

SEQ ID NO: 195839 - DNA, 564 bp, synthetic construct
  misc_feature 1..564: note = Description of Artificial Sequence: Synthetic coding sequence
  source 1..564: mol_type = other DNA
atgagcggcggcggcaccgagacccccgtgggctgcgaggccgcccctggtggcggctccaaaaagcgcgacagtctgggcacagcaggcagtgcccacctgatcatcaaagatctgggcgagatacatagcaggcttcttgaccaccggcctgtaatccagggtgagacaaggtactttgtgaaagagtttgaagagaagaggggactccgggagatgagggtacttgagaacttaaagaatatgattcatgagacaaacgagcatacactgcctaagtgccgggacactatgagagatagcctgagccaggtattgcagcgcctgcaggctgcaaacgattccgtttgccgattgcaacaacgtgaacaggaacgtaaaaaaattcattcagaccacttggttgccagcgagaaacagcacatgttgcagtgggataatttcatgaaagagcagcctaataaacgcgccgaggtggatgaagaacaccgtaaagctatggagaggcttaaggagcagtacgcggagatggagaaagacctcgccaaattttccaccttctag

SEQ ID NO: 195840 - DNA, 372 bp, synthetic construct
  misc_feature 1..372: note = Description of Artificial Sequence: Synthetic coding sequence
  source 1..372: mol_type = other DNA
atggagaagcggggcctgcgggagatgcgggtgctggagaacctgaagaacatgatacacgaaaccaatgaacacaccctccccaagtgtcgggataccatgcgagacagtctgagccaggtcctgcaacggctacaggcagcgaatgacagcgtctgtagattacagcagcgcgagcaagaaagaaagaagatccattcagatcatctggtagcttctgagaaacagcacatgctgcaatgggacaactttatgaaggaacagcccaacaagcgtgccgaagttgacgaggagcataggaaagcaatggagcgtctcaaggagcagtacgccgaaatggaaaaggacctggcaaaattcagtactttttag

SEQ ID NO: 195841 - DNA, 3987 bp, synthetic construct
  misc_feature 1..3987: note = Description of Artificial Sequence: Synthetic coding sequence
  source 1..3987: mol_type = other DNA
atggagagccgggaccccgcccagcccatgagccccggcgaggccacccaatctggcgccaggccggccgatcgctatggacttctcaagcacagtcgagagtttttggactttttttgggacatagcgaagcccgaacaagagacaagattggcagccaccgagaagctcttagaatatctgcgcggccgccccaaaggatccgaaatgaaatacgcactgaaacgactcattaccggccttggagtgggccgcgaaaccgcccgtccttgctattctctggctctggctcagctgctgcagtcattcgaagacctgccgctgtgttcgatactgcaacagatacaggagaaatatgacctgcatcaggtgaagaaagcaatgcttcggcccgcactgttcgccaacttgttcggcgtgctcgccttgtttcagtcaggaagactcgttaaggaccaggaggcccttatgaaatcggtcaaattactccaagcactggcccaataccagaatcacctacaagaacaaccaagaaaggctctcgtagacatcctatccgaagttagcaaggccaccctgcaggaaattctgcccgaggtgttaaaagcagacctgaacattatcctgtcttcccctgaacagttggagctctttcttcttgcccagcagaaagtgccatcaaaactgaagaagttggtaggctcagtaaacctgttctcagacgaaaatgtccctaggttagtcaatgttctcaagatggctgcttcaagtgtgaagaaggaccgtaaactccctgcaatcgctcttgacctccttaggttagccctaaaggaagataaatttccgcgtttttggaaagaagttgttgaacagggccttttgaaaatgcagttctggcccgctagctacctgtgtttcaggctcctaggcgcggccctgcccctgcttaccaaagagcaattgcacctggtcatgcagggagatgtaatacggcattacggtgaacacgtctgtacggcgaagctgccaaagcaatttaaatttgcgcctgagatggatgattacgtcggtacttttctcgagggatgtcaagacgaccctgagcgacagctagcggtcttagtggccttcagctcagttaccaaccaggggctgcctgtaacccctacattctggcgcgttgtgaggtttctatcccctccagccttacagggttacgtcgcgtggctccgcgccatgttcctgcaaccggacctggattctctggtagattttagcactaacaatcagaaaaaagcacaagacagctctctgcatatgcctgagcgcgctgtgtttcggctgcggaagtggatcatcttcaggctggttagtatagtggacagcctgcatttggagatggaggaagccctcacagagcaggttgccaggttctgcctgtttcattcctttttcgtcactaagaagcccacttcccagattccggaaaccaagcacccttttagctttcctctggagaaccaggccagggaggccgttagcagtgcctttttctccctgcttcagacactgagtacacaatttaaacaggcaccaggccaaacacaggggggacagccctggacctaccacctcgtgcagtttgccgacctcctgctcaaccatagtcacaatgtgacaaccgtgactccattcacagcccaacaaagacaagcctgggaccggatgctacagacactcaaggagcttgaagctcatagcgcggaagctcgcgccgccgcctttcagcaccttctgctgctagtgggaatccatcttctgaaatcccctgcagaatcatgtgatttactcggggacatccagacatgtataaggaaatctctcggagaaaagccacggcgctcacgtactaagaccattgatcctcaggagcctccctgggtcgaagttctagtggaaattctcctggcactcctggcacagccttcccacctcatgagacaggtggcaaggagcgtgttcggccacatttgctcccatttgactccaagagcactccaactgatcttggatgtgcttaaccctgagaccagtgaggatgaaaatgaccgtgttgtggtgacagatgacagcgacgaacgcagactgaagggagctgaggacaaatccgaagaaggtgaggacaaccgaagtagtgagagcgaggaggagtccgaaggggaagaaagcgaggaagaagaaagggatggggatgtagaccagggctttcgggagcagctcatgactgtgctgcaggctgggaaagccctgggaggggaggatagcgaaaatgaagaggagctcggcgacgaagccatgatggctctggatcagtctctggcctctctgttcgccgagcagaagctgaggatccaggcgcgacgcgatgaaaagaacaaactccaaaaggagaaagccctgaggagagatttccagattagggtgttagatctggtggaggttctggtcaccaagcagccggagaatgctctggtactggagttgctggaacctttgctgtctattatcaggcgatccctgagatcttcgtcttctaagcaagagcaggacctcctgcacaagactgccagaattttcactcaccacctttgccgtgccagaaggtactgccacgatttgggcgagcgcgcgggcgccctgcatgcccaggttgaacggctcgttcagcaagccggacgccaacccgactcccctaccgctctctaccatttcaatgccagcctctacttgctgcgagtgctgaaggggaacaccgcggaaggatgtgttcacgagactcaagagaagcaaaaggctgggactgatcctagccacatgccaacaggcccacaggctgcaagttgtctagacctgaacctcgtcacacgcgtgtattcaactgccttgagctctttcctaactaagaggaattcacctctcaccgtacccatgttcctgagcttattttccaggcacccagtgctgtgtcagtccctcctacctatccttgtgcagcatatcactggccctgttcgacccaggcatcaggcatgtctgttgctgcaaaaaacattaagtatgagggaggtgcgaagctgctttgaggaccccgagtggaaacagctgatggggcaagtcttggccaaggttactgagaatctgcgcgttctcggcgaggcccagactaaagcccaacaccaacaggcattgtcatcactcgagctgctgaacgtgctgttccgcacctgtaaacacgagaagttaacgctcgacctcacagtgctgctcggcgtgctgcaggggcaacaacagtctttgcaacagggtgcccactcaactggctcatctcgacttcatgacctctattggcaagctatgaagaccctcggggtccagcgcccaaagcttgagaagaaggacgccaaggagattccctcagccacacagagccccatctctaaaaagcgtaagaagaaagggttcctccccgagaccaagaaaaggaagaagcgcaagtctgaagacggaacccctgcggaagacgggacaccagcggccacaggcggatcccaaccgccatccatgggccgaaagaagaggaaccgaacaaaggccaaagttcctgcccaggccaatggcaccccaacaacgaagagcccagctcccggagcccccacacggagcccttcaaccccggccaagagcccaaagctgcagaaaaaaaaccaaaagccttcccaagtgaacggcgctccgggcagccctaccgaacccgccggccagaagcaacatcagaaagccctgccgaagaaaggggtgctagggaagtcgcctctcagcgcactcgcccgcaaaaaggcaagactgagcttggtcataaggtcccctagcctcctacagagcggtgctaaaaagaaggcccaagtgagaaaagccgggaagccttag

SEQ ID NO: 195842 - DNA, 3999 bp, synthetic construct
  misc_feature 1..3999: note = Description of Artificial Sequence: Synthetic coding sequence
  source 1..3999: mol_type = other DNA
atggagagccgggaccccgcccagcccatgagccccggcgaggccacccagtccggcgcaagaccagccgatcgctatggtctactaaaacatagccgagaatttctcgacttcttctgggatattgcaaagcccgaacaggaaacacgcttggccgctaccgagaagctattagagtacctgcgcggccggccgaaaggatccgaaatgaagtacgcgcttaagcgcctgatcacaggattgggagttggacgggagaccgctaggccctgttactcccttgctctagcacagttgcttcaatccttcgaggacctcccactctgtagtatactgcaacagatccaggagaagtacgacctgcaccaggttaagaaagcgatgctaagacccgccctgtttgccaacttgttcggagtgctcgctctgttccaatccgggcggctggtgaaagatcaggaagcactgatgaagtcagttaagttgttgcaggccttagcccaataccagaaccatctgcaagagcaacctcgtaaagccttggtggatatcctcagcgaggtatcaaaagctaccttgcaggagatcctgccagaggtgctcaaggcggacttgaacattatcctttctagccccgagcagctggagctctttctgctggcacagcagaaggtgccatcgaagctgaaaaagctggtgggctcagtgaacctgttctccgacgagaacgttcctaggttagtgaacgtgctcaagatggccgccagcagcgtgaaaaaggatagaaagctgcctgccatcgctctggatctgctgcgtttagccctgaaagaggataagttcccccgtttttggaaggaagtcgtggagcaaggactgctcaagatgcagttctggccagctagttacctttgcttcaggctccttggtgctgctctgcctttactcaccaaggaacaactacacctggtcatgcagggcgacgtgattcgccactacggggaacacgtctgtaccgcgaagcttccaaagcagtttaagtttgctcctgagatggacgactatgtgggcacattcttggaggggtgccaggatgatcctgaacgacaactggccgtgcttgtggccttttcaagcgtgacaaatcagggccttccagttacgccgacgttctggcgcgttgtgcgatttctctcccctcccgctctgcagggctatgtggcctggttacgagcaatgtttttacaaccagacctggacagtttggtagatttctcaacgaacaaccaaaaaaaggcccaggactcaagtctccatatgcctgagcgcgccgtcttcaggcttcgcaagtggatcatctttagactggtgtctatcgtagacagcctccacctggagatggaggaagccctgacggagcaggtggccagattttgtctctttcattccttctttgtcaccaaaaagccaactagccagatacctgaaactaagcacccttttagctttccgctggaaaaccaggcccgggaggccgtgagctctgcattcttctcactcctccagactctgtccacccagttcaagcaggccccagggcagacccaggggggccaaccctggacgtatcatttggtccagttcgccgacctgttgctgaaccattcccacaatgtaactacagtgaccccattcactgcccagcagagacaggcgtgggatcggatgcttcagaccctcaaagagttagaagcccactcagcggaggctagggctgctgctttccaacatctgctcctactagtcggaatacatttgttaaagtcgccagcagagtcatgcgacctgttaggcgacatacagacctgtattagaaaaagcttaggggagaagccccgtaggagtcggacgaaaaccatcgatcctcaggagccgccctgggtagaggtgctcgtcgaaatattattggcgctcttggcacagcctagccacctaatgcggcaggtggctcgctcggtgtttggtcacatttgtagccacctgacccccagggcacttcagctgattctcgatgtgctgaatcctgaaacatcagaggatgagaatgatcgagtcgttgtgacagacgactccgatgaaagacgtctaaagggagccgaggacaaatccgaggagggagaggacaatcgttcttccgagtccgaggaggaatcggagggagaggagagtgaggaagaagaaagagacggcgatgttgaccagggctttcgagagcaacttatgacagtcctgcaagcaggcaaggccctggggggggaggacagtgaaaacgaggaggaactaggagatgaggccatgatggccctcgaccagtcactagctagtctattcgctgaacagaagttacgaattcaggcgagaagagacgaaaaaaacaagctccagaaggagaaggcactacggcgtgattttcagattcgagtccttgatctcgtcgaggtgttggtgactaagcagccggaaaacgccctggtgctggagcttctggaacctctgctctcaattatcaggcgctctctcaggtcgagtagcagcaaacaagagcaggatttgctgcacaagacggctaggatcttcactcaccatctctgtcgggcgcggagatattgccacgatcttggggaaagggcgggcgctctccacgcccaagtcgagcgcctggtccagcaggcaggacgtcagcctgattctcctactgccctttaccactttaacgccagcttgtacttactcagggtcctgaaaggtaacacagccgaagggtgtgtgcacgagacccaggaaaagcagaaagctggcaccgacccgagtcacatgcccacaggaccccaagctgcctcctgcctggacctcaacctggtgaccagggtctacagtaccgccctttcctcctttctgaccaagcggaattccccccttactgtaccaatgtttctctccttgttctctaggcaccctgtgctgtgtcagtccctgctgcccatactggtgcagcacatcaccgggccagtgagacctcgccaccaggcatgtctgttgctgcagaaaacattatcaatgcgcgaggtgcgtagctgtttcgaggaccctgaatggaaacagctgatgggccaggtcctggccaaggtcacagaaaacttacgtgtcctgggggaagcccaaaccaaggctcaacaccagcaggccctctcgtcacttgaacttctgaacgtattgtttagaacttgcaagcacgaaaagcttactttggacctaacagtgttgcttggtgtgttgcaaggacagcagcagtcactgcagcagggcgcacactcaaccgggtcttcccggctccatgacctgtattggcaggccatgaagacactgggggtacagcgtcctaagctggaaaagaaagatgccaaagagataccttcagcaactcagtctcccatctccaagaaaagaaaaaagaaaggattcctgcccgagaccaaaaaacgaaaaaaacgcaaaagtgaagatggaactcctgctgaagatgggactccggcagcaacgggaggcagtcaaccaccgagcatgggtcgcaaaaagagaaacaggaccaaggctaaggtgcctgctcaggccaacgggacccctactaccaaatcacctgccccaggggcccccacacgatcgccatccacccccgctaaatccccaaaattacagaaaaagaaccagaaaccttcacaagtaaacggtgcgcccggttctcccactgagcccgctggccagaagcagcaccaaaaagccctacccaagaaaggggtcctgggtaagagcccactaagcgcactagccagaaagaaggcacgtctgtctctggttatcagatcgccttcactgctccagtcgggagcaaagaagaaggctcagacccttcggttcaccatctccagcagtaaaaagtag

SEQ ID NO: 195843 - DNA, 1812 bp, synthetic construct
  misc_feature 1..1812: note = Description of Artificial Sequence: Synthetic coding sequence
  source 1..1812: mol_type = other DNA
atggagagccgggaccccgcccagcccatgagccccggcgaggccactcagtctggcgcccggcccgctgaccgttatggcttgctaaaacatagtcgggaattcctggatttcttctgggatatcgccaaacctgaacaggagaccaggttagccgcaacggagaaactcctggaatacctgcgcggcaggccaaaggggtctgagatgaaatacgctctcaagcgactcatcaccggactgggggtggggcgcgagacggcccgaccctgttactccctcgccctggcgcagctgctccagtccttcgaagatctgcccctgtgtagtatactacagcaaattcaggagaagtatgacctgcatcaagtcaagaaagcaatgttgagaccagccctgtttgccaaccttttcggagtcctggccctattccagtctggacggctggtcaaggaccaggaggccctgatgaaatccgtaaagctcctgcaggctctggcacagtaccaaaaccacctccaagaacagcccagaaaagccctggttgatattcttagtgaggtgtccaaagcgactctacaggagattcttcccgaagtgctgaaggccgacctcaacatcatcctgtcctctccggagcaactagagcttttcctcttagcccagcagaaagtcccttccaagctgaaaaagctggtgggctcagtcaacctgttctcagacgagaatgtccctcgactggtaaacgtcttgaagatggcagccagtagcgtgaagaaagatcggaaattacctgcaattgccctggatctcctgcgactggccctgaaagaagacaaattccccagattctggaaggaagtggtggaacaaggccttctcaagatgcagttttggcctgcctcgtacctgtgcttccgtctgctgggcgcagccctcccgttgctcacaaaggagcagttacacttggtcatgcagggagacgtgatacggcactacggtgaacatgtgtgcaccgccaagctgcccaagcagtttaaatttgcgcccgagatggatgactacgtgggtacattcctggaaggctgccaggacgaccccgaaagacagcttgctgtgctggtggccttttctagcgttacgaatcagggcttaccagtgacgccaacattctggcgcgttgtgcggttcttaagtcctccagcactccaagggtatgtcgcctggctccgcgccatgtttcttcagcccgatcttgattccttggtggatttttccaccaacaaccagaagaaggcccaggatagcagtctccacatgccagaaagggctgtattccgtctgaggaagtggattatcttccgccttgtgtcaatagtggattcactgcacctcgagatggaggaagccttaaccgaacaggtggcacgcttctgcctgttccattcgttctttgtaaccaagaagcccacatcgcagattccagaaacaaagcctcaggagaggtccgaggggcccgcacaaccaccccacgcacccggagggccggagcggccaaaactagaaaagaaggatgcgaaggagatcccttcagccgaagatggcacccctgcagccacaggcggaagccagcctccgtctatgggtcggaaaaagagaaacagaaccaaggcaaaggtgccggcccaggcgaacgggacaccgaccaccaaatcaccagcgcctggggctcctaccagatccccatctacccccgccaagtcaccgaaacttcagaaaaaagcccaggttcgtaaagctggcaaaccctag

SEQ ID NO: 195844 - DNA, 2487 bp, synthetic construct
  misc_feature 1..2487: note = Description of Artificial Sequence: Synthetic coding sequence
  source 1..2487: mol_type = other DNA
atggccgccgaggaggccgacgtggacatcgagggcgacgtggtggccgccgctggcgcacagccaggttccggcgagaacaccgcctctgttctgcaaaaggatcactacttggactccagctggcgcactgagaacggactgatcccctggacactggacaacacaattagtgaggagaatcgggccgtgattgaaaagatgctgctggaagaagagtactatctcagcaagaaatcccaaccagaaaaagtatggttggaccagaaagaagatgataaaaaatacatgaagtccctgcagaagaccgccaagatcatggtccactctcccacaaaacctgcttcgtacagtgtgaagtggaccatcgaggaaaaggagcttttcgaacagggtctggcaaaattcggaaggagatggaccaaaatcagcaagctgatcggcagccgcacagtcctgcaagtcaagtcctatgcccggcagtattttaagaataaggtgaaatgtggattggataaagagacccctaaccaaaaaaccggacataatttgcaggtcaagaacgaggataaaggcactaaagcttggactcccagttgcctacgaggcagagccgatccaaacttgaacgctgtcaagattgagaagttgagcgacgacgaggaggtggatattacagacgaggtagatgagctttcctcccagaccccgcagaagaacagtagctcagacctattactggactttcccaattccaaaatgcatgaaaccaatcaaggggaatttatcacgtctgattcgcaggaagccttgtttagtaagagctctaggggatgtctgcagaacgaaaaacaggatgagacactgtccagtagcgagatcactctctggactgagaaacagtccaacggagacaagaagagtatagaactcaacgaccagaagtttaacgaactaattaaaaactgcaacaagcacgatggaaggggtattattgttgatgcaaggcagctaccgagtcccgagccttgcgagatccagaaaaacctcaacgataacgaaatgctattccattcatgtcaaatggtggaggaaagccacgaggaggaggagctgaagccgccggaacaagagatcgagattgaccggaatattattcaggaggaagagaagcaggcaattcctgagttttttgagggcagacaagccaagacgcccgagagatatctgaagatcaggaactatatcctggaccagtgggagatctgcaagcccaagtacctcaataaaacctcggtccggccaggtctgaaaaactgcggcgatgtcaattgtattgggagaatccatacttacctcgagctgataggtgccattaactttggctgtgagcaggcagtgtacaatcgtccacagactgtggataaggtgcgcattcgtgacaggaaggatgccgtggaagcctatcagctggctcagcgactgcagtcaatgaggacccggagaagaagagtgcgtgatccttggggaaattggtgtgatgccaaggatctcgaaggacagacatttgagcacctttccgcagaagagctggccaaaaggagagaggaagaaaaagggcgccctgtgaagtcactgaaagttccacggcctaccaagtccagcttcgacccttttcagcttatcccttgtaactttttttcggaggaaaagcaagagccatttcaggtgaaggtagcttccgaggccctgcttattatggacctgcacgcccacgtatctatggctgaggtgattgggcttctcgggggacgatactccgaagtggataaagtcgtagaagtgtgtgccgccgagccctgcaatagcctcagtacaggcctgcaatgcgagatggatcccgttagtcaaacacaggcttcagagacactggccgtcagggggttttccgtgatcggctggtatcatagccacccagcttttgacccaaatccgagtctgagggatatagatacccaggccaagtaccagtcttacttctccagaggcggcgctaagttcattggaatgattgtttccccttacaatcggaataaccctctcccttactcacagattacatgcttggtgattagtgaagaaatctcgccagatgggtcttacaggttgccatacaagtttgaagtgcaacagatgttggaggaaccccagtgggggctggttttcgagaagacacggtggattattgagaagtatcgactcagccattcatccgtgcccatggacaaaatattcagacgtgacagtgatctcacgtgtctgcagaagcttttagaatgcatgagaaaaaccttgagcaaagtgactaactgcttcatggcggaggagtttctaaccgagattgagaatctgtttctgagcaactacaaaagcaaccaggagaacggtgtcacagaggagaactgcacaaaggagctcctgatgtag

SEQ ID NO: 195845 - DNA, 843 bp, synthetic construct
  misc_feature 1..843: note = Description of Artificial Sequence: Synthetic coding sequence
  source 1..843: mol_type = other DNA
atgcccaagaaggccaagcccaccggcagcggcaaggaggagggccccgccccatgcaaacagatgaagctggaagccgcggggggcccatctgccctgaacttcgactccccgtcgtccttgttcgaatcactgatttcccctatcaagaccgagaccttcttcaaagagttctgggagcagaaaccactgttaattcagagagatgaccctgctcttgccacatactacggctccctctttaagctgaccgatctgaaaagtctatgctctagaggcatgtattatggcagggacgtgaatgtttgcaggtgtgtgaacgggaagaagaaagtattgaataaggatggcaaggcccacttcctacagcttcgcaaagattttgatcagaaacgagcaaccatccagtttcatcagccacagcgtttcaaggatgagctatggcgcatacaggaaaaacttgagtgctacttcggctccttggtgggctctaatgtgtacataaccccagctgggtctcagggtctacccccccactacgatgacgtggaggtattcattttgcaattggaaggggagaagcattggagactgtatcatcctacagttcctctggctcgggaatacagcgtggaagcggaggagaggatcgggcggcctgttcacgagttcatgctgaaacctggcgacttactatactttcctagagggacaatccatcaggccgataccccagccgggctcgcccactctacacacgtgaccataagcacttaccagaataacgatgcgggcgcgagaatgagaaggtgtgacctgcgcgctatcgcaccccagaagtag

SEQ ID NO: 195846 - DNA, 1398 bp, synthetic construct
  misc_feature 1..1398: note = Description of Artificial Sequence: Synthetic coding sequence
  source 1..1398: mol_type = other DNA
atgcccaagaaggccaagcccaccggcagcggcaaggaggagggccctgccccctgcaagcaaatgaaattggaggctgctggaggcccgtccgctctcaactttgactccccgtcttccctcttcgagagcctcatatccccaattaaaactgaaaccttttttaaggaattttgggagcagaaacctttgctgattcagcgcgacgaccctgctttagcgacatactacggaagcttgttcaaactgaccgacctgaaaagtctgtgcagtcgcggaatgtactatggacgtgacgttaatgtgtgcagatgtgtcaacggaaagaagaaggtcctgaacaaggatgggaaagcgcacttcctgcaattgaggaaggacttcgatcagaagagagcaacaattcagttccatcagccacagagatttaaagacgaattatggaggatacaagagaagctggaatgttacttcgggtcacttgttggcagcaacgtgtacattacacccgctggaagtcagggcctcccaccccactatgatgacgtggaagtcttcatactacagctggagggcgaaaaacactggcgcttgtaccacccaactgtgccactcgctcgcgaatattctgtggaggccgaagaaaggatagggcgccctgtgcacgagtttatgcttaagcccggagatctgctgtacttcccaagggggaccattcaccaagcagacactcccgcaggtctggcacattcaacgcacgtgacaattagcacctaccagaacaactcttggggagacttcctgcttgataccatctcaggcctagtgttcgacacagccaaggaggatgtggagttaaggactgggattcccagacagcttttactgcaggtcgagtctacgactgttgccactcggcggctgagtgggttccttaggaccctcgccgacaggctggaaggcactaaagaactcctgtcaagtgatatgaaaaaggacttcataatgcatcggctccccccgtacagtgccggggacggcgctgaactgagcacgcctggagggaagttacccaggttggactctgtagttaggctccaatttaaagatcatatcgtcctcacggtgttgcccgatcaggaccagagtgacgaagcgcaggaaaaaatggtgtatatctaccacagtctgaaaaattccagggaaactcacatgatgggtaatgaggaggagacagagttccatggcctcaggtttcccctcagccatctggacgctctgaagcagatctggaacagcccagctatcagtgttaaggatctcaaactgacaacagacgaggagaaagagagtctggtactcagtctctggacggagtgtctaattcaggtggtctag

SEQ ID NO: 195847 - DNA, 1395 bp, synthetic construct
  misc_feature 1..1395: note = Description of Artificial Sequence: Synthetic coding sequence
  source 1..1395: mol_type = other DNA
atgcccaagaaggccaagcccaccggcagcggcaaggaggagggccctgcaccttgtaaacagatgaagctggaagcagctggcggcccctcagcgcttaatttcgacagccctagctctctattcgagtcgttgatttcaccaattaaaacggaaaccttcttcaaagaattttgggagcagaagcctttgctcatacaaagggacgacccagcgttggctacttactacgggtccctctttaaactgaccgatttgaaatccctgtgctctcgggggatgtattatggaagagacgtgaacgtttgcaggtgtgtgaacgggaagaaaaaagtgctcaacaaagatgggaaagcacatttcttgcagctgagaaaagattttgatcaaaagcgggcaactattcagtttcaccagcctcaacggttcaaagacgagctctggagaatccaggagaaactggaatgttatttcgggagcctggtcggcagcaacgtgtacatcaccccggctggtagccagggactccccccccactatgatgatgttgaagtgtttattctgcagttggagggcgagaaacattggcggctgtaccatccaacagtgcccctggccagagaatactcagtagaggctgaagaacgaatcggcagacccgtgcatgagtttatgcttaagccaggcgatctgctatactttccacgaggcacaattcatcaggctgacactcccgcaggtctagctcatagcacccacgttaccatctcaacgtaccagaataattcctggggcgacttcctgctggatacgataagcggcctggtgtttgacactgctaaggaggacgtggagttaaggactgggatcccgcggcagctgctgttggtggaaagtactacagtagcgactaggaggctcagcggatttcttaggactttagccgatcgactcgaaggaacaaaagaattactttcttccgacatgaaaaaggatttcatcatgcatcgcctgcccccttactcagctggagacggcgcggagttgtctaccccagggggtaaattaccccggctggacagcgtagttagactccagtttaaagaccacatcgtgctcacggtgctcccagaccaggaccaatcagacgaagcgcaggaaaagatggtctatatttaccatagtttaaaaaattcgagggaaactcatatgatgggtaatgaggaggagaccgagtttcacggcctgcggtttcccctgtctcacctggacgctttaaaacagatctggaacagccccgccatctcggtcaaagacctcaaattgacaactgacgaagagaaagaaagtctcgtactgagtctgtggaccgaatgcttgatccaagtagtgtag

SEQ ID NO: 195848 - DNA, 1398 bp, synthetic construct
  misc_feature 1..1398: note = Description of Artificial Sequence: Synthetic coding sequence
  source 1..1398: mol_type = other DNA
atgcccaagaaggccaagcccaccggcagcggcaaggaggagggccccgccccatgcaaacagatgaagctcgaggccgctggaggtcctagcgcactcaactttgattccccatcatctcttttcgaatcactgattagccctatcaagacagagacgttttttaaggagttctgggaacaaaaaccgcttctgattcagcgggacgatcctgcattagccacctattacggctcgctgtttaaactcaccgatttaaaatctttgtgctcccgcgggatgtactatggaagagacgtcaacgtgtgccggtgtgttaacggcaagaagaaagtgctcaacaaagacgggaaagcacattttctgcagctgagaaaggattttgatcagaagcgcgctaccattcagtttcaccaaccacagcgcttcaaggatgagttatggcgtattcaagagaaactggaatgctactttggaagcctggtcgggagcaacgtgtacatcaccccggcagggagccagggtctgccgccacattatgacgatgttgaagtctttatcctccagttggagggcgaaaagcactggcgcctttatcaccccaccgtgcctctcgcacgtgagtacagcgttgaagccgaagaacggatagggagacctgtccacgagttcatgttaaagcccggcgacctgctgtacttccctcgtggaaccattcaccaggccgacaccccggccggcttggcccacagtacccacgtaacaattagcacctatcagaataactcctggggtgatttcctcctcgatactatatccggcctcgtatttgatactgccaaggaggatgtggaactgaggactggcatccctaggcagctgttactgcaggtggagtccactacagtcgctacccgtagattgtcgggtttcctgcggaccctggcagacaggctggagggcactaaagagctcctgtccagtgacatgaagaaggattttatcatgcacagactccccccatacagcgctggcgacggggcagagttatctacacccgggggcaaactcccccgcctcgattctgtagtgaggctgcaatttaaagaccatattgttctgactgtacttccggaccaggaccagagcgacgaagctcaggagaaaatggtttatatttaccattctctaaagaactccagggaaacacacatgatgggaaacgaggaggaaaccgaattccacggcctgaggttccctctgagccacttagacgccctgaagcaaatttggaatagccccgctatttccgtcaaggatctgaaattgacaactgacgaggagaaagaaagtctagttttaagtctctggacggagtgtctaatacaagtggtctag

SEQ ID NO: 195849 - DNA, 636 bp, synthetic construct
  misc_feature 1..636: note = Description of Artificial Sequence: Synthetic coding sequence
  source 1..636: mol_type = other DNA
atgctgctgcaggtgccctgcaacagctggggcgacttcctgctggacaccattagtgggcttgtgttcgacaccgccaaagaagacgttgaattgcgaacagggattccacgccagttgttgcttcaggtagaatctaccacggtggcgacccgccgcctgtctgggttcctaaggactctggctgacagactggagggcactaaggagctgctgagtagcgatatgaagaaagattttattatgcatagactgccaccctactccgctggcgatggtgcagagctgagtactcctggcggaaagttaccacggctggactctgtggtgcgactgcagttcaaagatcacattgttctgactgtcttacctgaccaagatcagtcagatgaagcccaggaaaaaatggtttatatatatcactctttaaaaaatagtcgagagacccatatgatggggaatgaggaggagaccgaattccatggactgaggtttcctctgagccatctggatgccctgaaacagatctggaacagcccggcgatcagcgtgaaggacttaaaactgaccacggacgaggaaaaggagtctttggtgctctcactgtggacggaatgtttgattcaggtggtttag

SEQ ID NO: 195850 - DNA, 339 bp, synthetic construct
  misc_feature 1..339: note = Description of Artificial Sequence: Synthetic coding sequence
  source 1..339: mol_type = other DNA
atgcccaagaaggccaagcccaccggcagcggcaaggaggagggccctgccccctgcaagcagatgaagctggaagccgctggcgggcctagcgctctcaactttgattctccatcgtctcttttcgagtctcttatctctcccataaaaacagagacattctttaaggaattttgggaacagaaacctctgttgattcagcgggatgacccggccctagcaacatactacggctctctttttaagctaacagatctgaagtcgctttgcagcaggggaatgtactacggccgagacgtgaatgtctgtagatgcgtgaatggaaagaaaaaagtatag

SEQ ID NO: 195851 - DNA, 459 bp, synthetic construct
  misc_feature 1..459: note = Description of Artificial Sequence: Synthetic coding sequence
  source 1..459: mol_type = other DNA
atgggcccccccagcctgcacagccccacccccagcctgggccccctgggcgctctagtgctaagtagtcagcacactagccccgacagctgcaagtccccttggactttgaaggctgttagggctgcccgccaggctgcagactttacactaaaagttgaggttgagtgtagtagcctgcaggaagccgttcaggcggccgaagctggcgcggatctggtactgctggacaattttaagcccgaagaattacatcctactgccaccgtacttaaagcgcagtttccgagcgtggcagttgaggccagcgggggaatcactctcgataatctgcctcaattctgtggacctcatatcgacgttattagcatgggcatgctaacacaggctgcccctgctctcgatttctctcttaaacttttcgcaaaggaggtggcccctgtgcccaagatacactag

SEQ ID NO: 195852 - DNA, 1434 bp, synthetic construct
  misc_feature 1..1434: note = Description of Artificial Sequence: Synthetic coding sequence
  source 1..1434: mol_type = other DNA
atgttccccgtgttcccctgcaccctgctggccccccccttccccgtgctggggttagatagtcgcggagttggcggactgatgaatagcttccctcctcctcaggggcacgcgcaaaatcccctgcaagtgggcgccgagctgcagtcaagatttttcgcaagtcagggttgtgcccagtcgccgttccaggccgctccagcccccccacctactccacaggcacccgccgcagagcctctgcaggtggacctactgccagtgctcgctgcagcccaggagagcgccgctgccgccgccgctgcagcagccgcagcagccgccgtggcggctgctcctccagctccagctgcagcctctaccgtggataccgctgccctcaagcagccccctgccccgcccccacccccacctccggtatccgccccagccgccgaggccgctccccccgcaagcgcagctaccatagccgccgccgctgcaacagccgtcgtcgccccaacttcaactgtggccgttgcccctgtagcctccgcacttgagaaaaagaccaagtctaaggggccttatatttgcgccctgtgcgccaaagagttcaaaaatggatacaatctgagacgccatgaagcaattcacaccggggcaaaagccggccgcgttccctcaggcgcaatgaaaatgcccaccatggtgcccctgagtctgctgtctgttccacagttgagcggtgccggagggggcggtggtgaggcaggagccggtggaggtgctgcagccgttgccgccggtggtgtcgtgactactactgccagcggaaaacgaattagaaaaaatcacgcatgtgaaatgtgcgggaaagcattccgggatgtctaccacttgaaccgccacaagctcagtcactcagacgagaagccataccaatgtccagtatgccaacaaagattcaagcggaaggacaggatgtcctatcacgtgagaagtcacgatggagctgttcacaagccctacaactgtagccattgtggtaagagtttctcacgccctgaccacctaaacagccacgtcaggcaggtgcattcaacagaaagaccctttaagtgtgagaaatgcgaagcggccttcgctactaaggatcgcttacgcgcccatactgttcggcacgaggagaaagtgccatgccacgtttgtggaaagatgctgtcatcagcgtatatctctgaccacatgaaagtccattctcaggggcctcatcatgtctgtgaactttgtaacaaaggcaccggcgaagtgtgtcccatggctgcggcagccgcagcggccgcggcagctgcggccgctgccgtggcagccccccctacggctgtgggatcactgagcggagcagaaggagtgcccgtgtcatctcagcctctgcccagccagccctggtag

SEQ ID NO: 195853 - DNA, 759 bp, synthetic construct
  misc_feature 1..759: note = Description of Artificial Sequence: Synthetic coding sequence
  source 1..759: mol_type = other DNA
atgaagatgcccaccatggtgcccctgagcctgctgagcgtgccccagctttccggtgccggcggaggaggcggagaagctggagccggggggggagctgcagctgtggcagctggcggcgttgttactaccaccgcttctggcaaacggatccggaaaaatcacgcgtgtgagatgtgcggaaaggccttcagggacgtgtaccacctgaatcgtcacaagctgtctcatagcgacgaaaagccttatcaatgccccgtgtgccaacaaagattcaagaggaaagataggatgagctatcacgtgcggagccataggcggtgtgcgaaaccgtacaattgctcccattgtggcaaatccttttccagaccagaccatctgaatagccacgtgcgccaggtccacagtacagagcgaccctttaagtgcgagaagtgcgaggccgccttcgccacaaaagatagactgcgcgcgcatactgtgcgccatgaggaaaaagtgccgtgccatgtttgcggcaaaatgcttagtagtgcttacatcagcgaccatatgaaagtccacagtcagggaccccatcacgtgtgtgagctatgcaataaaggtacgggggaggtatgtcccatggcagcggctgccgcagctgccgcagcagccgccgctgcagcagtggctgccccaccgaccgccgtcggcagcctgagcggagccgaaggcgtgcccgtcagttctcagcctctgccttcgcaaccatggtag

SEQ ID NO: 195854 - DNA, 1365 bp, synthetic construct
  misc_feature 1..1365: note = Description of Artificial Sequence: Synthetic coding sequence
  source 1..1365: mol_type = other DNA
atggaccccagcaactggagcagcttcatcttccagggccacgcccagaatccgttgcaggtgggagccgagctgcagtcacgattttttgcgagccaaggctgtgctcaatccccttttcaggccgcgcccgccccccctcctaccccccaggcgcccgctgccgagccgctgcaggttgatcttcttccggtgttagccgctgctcaggagtccgcggccgctgctgccgcagcagccgctgctgctgctgcagttgccgccgccccgcccgcacctgcggcggcttccacggtggacacagccgcactaaagcagcctcccgcgcctccacctccccctcctcccgtgtccgcccctgccgccgaagctgcaccccccgcctcagctgccaccattgccgcagctgctgctactgcagtagtggcgccaacctctacagtagcagtggcccctgtcgcctcagctcttgaaaaaaaaactaagtccaaaggtccgtatatctgcgcgctttgcgcaaaggaattcaagaatggttataatctccgccgacacgaggccatacacaccggagcgaaggcaggccgggttccatcaggcgctatgaaaatgccgacaatggtgcctctgtcacttctgtccgtcccccaactgtcgggcgctggcggcggagggggtgaggcgggcgccgggggcggagccgccgctgtggccgctggcggggtggtgaccacaaccgcctcgggcaagagaattagaaagaaccatgcctgcgaaatgtgcgggaaggcgttcagagatgtctaccatctgaaccgccacaagctgtcccactcagacgagaaaccataccagtgcccggtctgtcagcagcggttcaaaagaaaagatcggatgagctaccacgtcagatcacatgatggggccgtgcacaaaccctataattgctcacattgcggcaagtcattcagtagacctgatcacctgaactcccatgttcgtcaagtacacagcacagagcgcccgtttaaatgcgagaagtgcgaggccgcgttcgctacaaaggaccgcctgcgtgcccacacggtgagacatgaagagaaagtgccttgtcatgtatgcgggaagatgttgtcatccgcatatatctcagatcacatgaaagtgcattcacaggggccacaccatgtgtgtgagctatgtaataagggcacgggcgaggtctgtcctatggcggctgccgcagcagcagccgcagctgcagcagcggctgcagtcgcagccccacccactgccgtgggctcgttgtccggcgctgaaggtgtgcctgtgtcctcccagcctcttcccagccagccttggtag

SEQ ID NO: 195855 - DNA, 2955 bp, synthetic construct
  misc_feature 1..2955: note = Description of Artificial Sequence: Synthetic coding sequence
  source 1..2955: mol_type = other DNA
atgcgggcccccgcccggggcaccggctgctgcggccggagcggcggccggtggttggccggcgccgcacagccccgctgcttatgggccggtggtgcaggccaacgcttcatggtgcccggtggaacaatgaaatctcttaaaaaggattcccggcttcggataacccccacaaggctgctggaagctagcgagaatgtaaaggagaagaaaagagcgaaaggtccggagcagcccacgccaaccatacaggaagagcccgaacccgttagtaacgtgttgcagggcgatgacatactggcgcttgccataaaaaaggaggatctgaaagaacaacacattcccagactgacggagaaagaggacaaacgcgtgatcacacaaaagttcattatccgcaagctgaaaccaatggatccacggcggaaggtgtgtcatctggtcgcccggcccgctaatcccgacgaagcaactaaaccactcgattattccgggccaggagactcctttgacggctctgatcagattctcccccatcatatccttggcagcttgcaggattttaaacggatcgctctcgccagaggtaatacgcaactggcagagagaatccccacaagcccctgcctcatgaccctgatctccgccgaaggcgagagcaaacaaaaggcccctaaggaagaaaagcgccctccatgggccccaccgccccagcacaatttcctcaagaactggcagaggaatactgcattgagaaaaaagcaacaggaggccctgagcgagcacttgaagaagcctgtgagtgaacttctgatgcacacaggcgaaacttatcggcggattcaagaggaaagagaactaatcgactgcactttaccaacacgcagagatagaaagtcctgggaaaacagtggtttttggtccagactggaataccttggagacgaaatgactggcttagtcatgacaaaaacgaaaacccagcgtgggttgatggagccaataacacacatccgaaaacctcacagtattagagtggaaacgggcctgccagctcagagggatgcaagctaccggtacacctgggacaggagtttgtttttgatttataggcgcaaggaactccagcgtatcatggaggaactagacttctcacagcaagacatcgatggcctcgaggtggttggcaaagggtggccgttcagtgccgtaaccgtcgaagactatacagtcttcgaaagatcacaaggtagctcctcagaggacacggcctatctcggcactttagctagctcctctgatgtctcaatgcctatcttgggcccttccctcctattctgtggcaagcctgcctgctggatccgaggtagtaacccacaggacaaaagacaggtagggattgccgcacatcttacattcgagacgctggaaggcgagaagacgagcagtgaattgaccgtagtgaacaacggcaccgtggccatctggtatgactggcgtagacagcatcaacctgatacatttcaggacctgaagaaaaacaggatgcagaggttctattttgataaccgagaaggagtcatcctgccaggtgagatcaagactttcactttctttttcaagtcactcaccgccggtgtcttccgcgaattctgggaatttagaacacaccccacccttctgggaggggccatcttacaggtcaacctccatgccgtgtcactgactcaggacgtgtttgaggacgaacggaaggtacttgagagcaaacttacagctcacgaagccgtaactgtagtgcgggaagtgctgcaggagctgcttatgggcgttctcacaccggagaggactccttctccagtggacgcctacctgacggaggaggatcttttcaggcacagaaaccccccactccactatgaacatcaggtcgtccagagcttgcaccagctttggcgccaatatatgacactcccagcaaaagctgaagaagcccgcccgggcgacaaggaacacgtttcccccatcgctaccgagaaggcgagtgtgaacgccgaacttctgccgaggttccggtcgccaatctctgagactcaggttccacgaccagagaacgaggctcttcgggagagtggctcacagaaagcccgcgtgggtacaaaaagtccccagcgcaaaagcatcatggaagagattcttgtcgaggaatcacccgatgttgactctactaagtccccttgggaaccggacgggctacccttattggaatggaacctgtgtctggaagacttcagaaaagcagttatggtgctacccgacgaaaaccatagggaagatgccctcatgcgattgaataaagccgccctggagctgtgccagaaacccagaccacttcaatcgaacctccttcaccagatgtgcctacagttatggagagatgtgatcgacagcctggtgggacactccatgtggctgagatctgtcttggggctgccagagaaggagacaatttacctgaacgtgcccgaggaacaggaccaaaagtcccctccaattatggaggtgaaagtgccggttgggaaggctgggaaggaagagagaaagggcgcagcccaggagaaaaaacagctagggatcaaagacaaggaagataaaaaaggcgctaagctgctgggaaaggaggatagacccaatagtaagaagcacaaggccaaggatgacaaaaaggtcataaagagcgcaagtcaggatcggttttcactggaagatccaaccccagacattatcctttcttcccaggaacccattgatcccctcgtgatgggaaagtatacgcagtcactgcattccgaagtgaggggcctgttggacacactggttactgacctgatggtgttggccgatgagctgtccccaattaagaatgtcgaggaagccctgcgattgtgtcggtag

SEQ ID NO: 195856 - DNA, 2829 bp, synthetic construct
  misc_feature 1..2829: note = Description of Artificial Sequence: Synthetic coding sequence
  source 1..2829: mol_type = other DNA
atggtgcccggcggcaccatgaagagcctgaagaaggacagccggctgagaataactccaacaaggctgctggaagcatcggagaacgtcaaagaaaaaaaacgcgccaaaggaccggaacagcccacacctaccatacaggaagagcctgagccggtgtccaatgttcttcaaggcgacgacatcctggctctggccatcaagaaagaggacctgaaggaacagcacattcctaggctgacagagaaagaggacaagcgagtcattacccagaaattcataattcggaagctaaaacccatggatccgcgacgcaaagtgtgccacctggttgcgagacctgcgaaccctgatgaggctaccaagcccctcgactactccggaccgggagattccttcgatggttctgatcagatcctgcctcatcatatcctgggatcgctccaggactttaaaaggatcgccctggctagggggaatacccaactcgcagaacggattcccacaagcccctgtctgatgactctgatttctgcggagggggaaagcaaacaaaaggcccccaaagaggagaagcgtcctccttgggctcccccaccccagcacaactttcttaagaattggcagcggaatacagcactgaggaagaagcaacaggaagctctatccgagcacttaaaaaagcctgtgtctgagctgcttatgcatacaggggaaacgtaccgtaggatccaggaagagagagaactgatcgactgcaccctccctacccggagagatcgaaagagttgggagaattccggcttctggagcaggttggaatatctcggagatgagatgaccggcttggtgatgacaaagactaagacacagagaggcctgatggagcccatcacccatatccggaagccacactccattagagtggagacgggcctgccggctcagagggacgccagttatagatatacctgggaccgctcactgttcttgatatatcgcagaaaagagcttcagaggattatggaagaacttgacttttcgcagcaggacatagatggacttgaggtcgtcggcaaaggttggcccttctctgccgtgaccgtcgaggactataccgtctttgaacgtagccaggggagcagtagtgaggacactgcctacctgggcacactggcaagcagtagcgacgtgtccatgccaatcctaggcccgtccctcctcttctgcgggaaacccgcatgttggatccgggggagtaatccacaggataagcgacaggtgggaatagccgcacatctaacattcgagacactggagggggaaaaaacttcctctgaactgactgtggttaacaatgggaccgttgcgatatggtatgattggcgcagacagcatcaacctgacactttccaggaccttaaaaagaacagaatgcagagattctatttcgacaatcgggagggcgttatcctgccaggcgaaattaagacatttaccttcttctttaaaagtctgacagccggcgtgtttcgggaattctgggagttccggacccaccccactcttttgggcggtgctatcctgcaggtcaatcttcacgccgtttcacttacacaggatgtgtttgaggatgagcggaaagtgcttgagagcaagctgactgcacatgaggccgttaccgtggttcgcgaggtgcttcaggagttactcatgggcgtgctcacccctgagaggacccctagcccagtggatgcatatctgacagaagaggacctgttccgccaccggaatccaccgctgcactacgaacaccaggtcgttcagtcgttacatcagctttggaggcagtacatgaccttacctgccaaggccgaagaagctcgacctggagacaaagagcacgtttccccaatcgccacggaaaaggcctctgttaatgctgagttactgcctaggtttaggagccccatttcagaaacacaggtccctcggcccgaaaacgaggctctgcgcgagagcggctctcaaaaagccagggttggcactaagtccccccaacgcaaaagtatcatggaagagattctagtggaggagtcaccggatgtggacagtacaaagagcccctgggaaccagatggtttgcctctcctggaatggaatctttgtctagaggattttcgtaaagctgtaatggtcctacccgatgagaaccacagggaagacgctctgatgaggctcaacaaagccgctcttgagctgtgtcagaagccgcggcctctgcagagcaacctgttgcaccagatgtgccttcagctgtggagagatgttattgattcattagtcgggcactctatgtggttacgtagtgttttggggctgccggaaaaagaaacaatttacctgaatgtgcccgaagagcaggaccagaagagcccaccaatcatggaggtgaaggtgcctgttggcaaggccggaaaggaggaacgtaagggggctgcccaggaaaaaaaacagctcgggatcaaggacaaggaggacaagaagggtgcgaagttattgggtaaggaagacagacctaactctaagaagcacaaggccaaggacgataagaaggttatcaaaagcgcttctcaggaccggttctcacttgaagaccccacccctgacatcattttgtcttcccaggaacccatcgatcccctggtcatgggaaagtatacacaatccctacactctgaggtccacccagggcgctgcgtaccttgggaaaatacaatgcagggcgcctttccttctaccacacggtgcggtggctcatgcctgtag

SEQ ID NO: 195857 - DNA, 1992 bp, synthetic construct
  misc_feature 1..1992: note = Description of Artificial Sequence: Synthetic coding sequence
  source 1..1992: mol_type = other DNA
cggagccggggcgccgaggccaccgagagcaagctgagcggcggctttcggtggacccagaagacgtcccctacacagggggacagtgccatcactcactcgctgtaccggatgatcttcctaactgcactgcctctgttctggatcatgatttctgcctcacgaggagggcactggggagcctggatgccctcatccatttctgctttcgagggcacctgtgtcagcattccttgcagattcgactttcccgacgagctgcggcctgctgtggtgcatggggtatggtacttcaacagtccttaccctaaaaactaccccccagtggtcttcaagagccggacccaggttgtgcacgagagcttccagggtaggtccaggctgctgggcgatttgggcttgcgcaattgtactcttctcttatctaatgtctccccagaactgggcggaaagtattattttagaggcgacctcggaggatacaatcagtataccttcagcgaacatagcgtgttagacatagtgaatacccctaatattgtggttcctcctgaagtggttgccgggaccgaggtggaggtgtcttgtatggtgcccgataactgtccggagctgagacctgagctatcctggctcgggcatgagggccttggagaaccggccgtgctgggccgcctgagggaagacgagggcacctgggtccaggtctcgctgctgcattttgttcctacccgcgaagcaaatggacataggctggggtgccaagcttctttcccgaataccactcttcaattcgagggttatgcaagtatggacgtgaaatatccacccgtgattgtggagatgaacagctcagtggaagccattgagggatcacatgtgagtctactctgtggcgccgactccaaccctccaccgctcctcacctggatgagagatgggacagtgctgagggaagctgtggccgaatccttgctcctggagctagaagaagttactcccgcggaagacggggtctatgcttgcctcgcagaaaacgcctatggccaggataaccgaactgtgggactctcagtgatgtacgcaccatggaagcctacagtaaacggaactatggttgccgtggagggcgagaccgtgagcattctgtgttcgacacaatccaacccagaccccatactgaccatcttcaaagagaagcaaattctgtcaacggttatctacgagtcagaactgcagctggaactacccgcagtgtcgcccgaggacgacggagagtactggtgtgtcgccgaaaatcagtatggtcagcgcgcaacagcgtttaacctgtcagtagagttcgccccagtcctactactggagagccactgcgctgctgcaagggatactgtgcagtgcctgtgcgtggtcaagagtaacccagaaccctctgtggccttcgaattgccatccaggaatgttacagtgaatgaaagcgaacgagaatttgtatactccgagcgatccggactcgtcctgacttccatcctgactttgcgcggtcaggctcaggcgcctccgcgcgttatatgcacagcaaggaacctgtacggcgccaaatccctcgaactcccctttcaaggtgcccataggcttatgtgggccaagatcgggcccgttggcgcagtggttgcttttgctattctgatagctatcgtttgttacatcacccagacacggcgcaaaaagaacgtcactgagagtccatccttttctgctggcgataaccctccggtactgttctcaagcgactttcggattagcggcgctcccgaaaaatacgagtccgaaagacgcctgggaagcgaacgacggctcctgggccttagaggtgaacctccagaactggatctgtcatatagccacagcgatctggggaagcgcccaactaaagactcttacacactcaccgaggagcttgcagaatacgctgagataagggtgaagtag

SEQ ID NO: 195858 - DNA, 1749 bp, synthetic construct
  misc_feature 1..1749: note = Description of Artificial Sequence: Synthetic coding sequence
  source 1..1749: mol_type = other DNA
atgatcttcctgaccgccctgcccctgttctggatcatgatcagcgcatcgaggggagggcattggggggcttggatgccaagcagcatctccgccttcgagggtacctgtgtctccattccctgccggtttgatttcccagatgaattgcgacccgccgtggtccacggggtgtggtactttaattctccttatccgaaaaattatccccccgtggtattcaagagccgaacgcaggtggtgcacgagtctttccagggcaggagccggttgctgggggatctgggccttagaaattgcacattgctcctgtctaatgtttcacctgagttgggggggaaatattactttaggggggacttgggggggtacaaccaatacacattttccgaacactcagtcctggatattgtcaacacacccaatatcgtggttccgcctgaggtggtggcaggaaccgaggttgaggtgagttgtatggtcccggacaactgtcctgagttgaggcccgagctcagctggctcggacacgaagggcttggcgagcctgcggtcttgggccgtttgagagaggatgaaggcacatgggtacaggtatcactgctgcatttcgtccctaccagagaggctaacggccaccgacttggctgtcaagcctcattcccgaatacaacccttcaatttgaggggtatgctagcatggatgtgaaataccccccagtgatcgtggaaatgaatagttcagttgaggctatagagggttcacacgtgtcactgctgtgtggtgcagattctaatcctccccccctactgacttggatgcgcgacgggacagtcttgagagaggcagtggctgagtcccttctgcttgagctagaggaggtcacacccgccgaggacggcgtctacgcttgtctggccgaaaacgcgtacggccaggacaacagaacagttgggctcagcgtgatgtatgcaccatggaaacccaccgttaacgggactatggtggcagtcgagggagagactgtttccatcctttgctctacacaatccaaccccgacccaattttgacgatattcaaggagaagcagatcttgtctaccgtcatctatgaatccgagctgcagctggagcttcctgccgtgtcccccgaggatgatggtgaatactggtgtgtcgctgaaaatcagtacgggcaaagggctaccgctttcaacttgtccgtcgagtttgccccggtgctcctcctcgagtcacattgcgccgctgcgagagacacggtgcagtgcctctgcgttgtgaagagtaacccagagcctagcgtggccttcgaactcccttccagaaacgtcacagtgaatgagtctgagagagaattcgtctacagtgagagaagcggactggttctgaccagcattcttactctgagggggcaggctcaggcaccgccccgtgtaatctgcacggccagaaacctttatggtgctaagtcactggaactgccattccagggcgcgcatcgcctgatgtgggccaaaattggccctgtgggtgctgtagtcgcctttgccattctgattgccatcgtgtgttacatcacacagacccgccgcaaaaagaacgtcacagaaagtccgagtttttcagcgggagataacccgccagtgctgttttccagcgattttcggatttccggagcacccgagaaatacgaaagcaaagaggtctctaccctggaaagtcattag

SEQ ID NO: 195859 - DNA, 1881 bp, synthetic construct
  misc_feature 1..1881: note = Description of Artificial Sequence: Synthetic coding sequence
  source 1..1881: mol_type = other DNA
atgatcttcctgaccgccctgcccctgttctggatcatgatcagcgctagtcgaggaggacattggggagcctggatgccatcatccatttctgcgtttgagggcacatgcgttagcattccttgtaggttcgacttccccgacgagctgagacctgccgtggtgcacggtgtgtggtactttaacagcccttatcctaaaaactacccccctgtggtgttcaaaagtcgaacacaggtcgtgcacgagtcttttcagggacggtctcgcctcctcggcgacttgggattgaggaactgcacactgttacttagtaatgtcagtcctgagcttggcggaaagtactattttcgcggggatctcggcgggtataatcagtatactttttccgagcatagcgtgttggatatcgtcaatacccctaacatcgtggtgcctcccgaggtcgtggccggaaccgaggtggaagtctcctgtatggttcctgacaattgcccagagttaagacccgaactcagttggttgggtcacgagggccttggcgaaccggctgtgctggggaggctgcgagaagatgaaggaacttgggtgcaggtcagccttttacatttcgtgcctacaagggaagccaatgggcatagactggggtgtcaagcctcctttccgaacacaacactgcagttcgagggttacgcgtctatggatgtaaagtatcctccggttattgtcgagatgaattcctctgtggaagcgatagagggctctcatgtcagtctcctttgtggggcggactcaaacccaccgccactcttgacgtggatgagagatggtaccgtgctgcgggaagcggtggctgaatccctgctgctcgaactggaggaagtaacaccagcagaagacggagtttacgcctgtctcgccgaaaatgcttacggacaagacaatcggaccgtgggcctatctgtgatgtatgccccatggaagcccactgtcaatgggacaatggtggcagttgagggtgagaccgtgtccatcttatgctcgacacagagcaatcccgacccaatattgacgattttcaaggaaaaacagatactcagtactgtcatttatgagtctgagttgcagctggaactaccagccgtgtcccccgaggacgacggagagtattggtgcgtggccgagaatcaatatggacagcgcgctactgccttcaacttaagtgttgaattcgctccagtactgttgttggagagccactgtgccgccgctagggacactgtgcaatgcctttgcgtggtgaagtctaaccccgaaccctcagtggcatttgagctcccaagccggaatgttacagtaaatgaatcagaaagagagtttgtgtactcagaacgatccggcctcgtcctgacgtcgatactgaccctgcgcggtcaggctcaagctccccctcgcgttatctgcaccgcgaggaatctatacggagccaagtcactggaacttccatttcagggcgcccatcgcctgatgtgggccaagataggtccggtgggggcagttgtggcctttgcaatccttatcgctattgtatgctatattacacagacccgcaggaagaagaatgttactgagtctccaagcttttccgccggtgataatcccccagtgctcttttcctccgatttccggataagtggagcacctgaaaagtatgagtctgaacgaaggctcggttcggagcgcaggctgttgggactgcgtggcgagcctccagagttagacctgtcctatagccactccgacttgggcaagcggccgacaaaggatagttacacgctgaccgaggaattagcagagtacgccgagatccgggtgaagtag

SEQ ID NO: 195860 - DNA, 1806 bp, synthetic construct
  misc_feature 1..1806: note = Description of Artificial Sequence: Synthetic coding sequence
  source 1..1806: mol_type = other DNA
atgcccagcagcatcagcgccttcgagggcacctgcgtgagcatcccttgtaggtttgattttcctgacgagctccggcccgctgtcgtgcacggcgtctggtattttaacagcccctacccaaaaaattacccccccgtggtctttaaatcaagaactcaggttgtccatgagagcttccaggggcggtccagattattaggcgacctaggcttgcgaaattgcacactgctcctgtctaatgtgagccctgaactcggaggcaaatactactttaggggagatctgggcggttataatcaatataccttctcagagcactctgtactggatatcgtcaatactcccaatatcgtcgtgccgccagaagtcgtggccggcactgaagtcgaagtttcctgcatggtaccagataactgccccgagctgcgaccagaactaagctggctaggccatgaaggattgggtgaacccgccgtgttggggcggctccgagaagatgagggtacgtgggtccaggtcagcctacttcatttcgtgccaacccgagaggcgaacgggcaccgcctaggctgccaggcctcctttcccaatactactctgcagttcgagggttacgcctcaatggacgtgaagtaccccccagtgattgtggagatgaattcttcagtcgaagccattgaggggagccatgtgtctctactctgcggcgctgactctaatcccccacccctactaacctggatgagggatggaacggtcctgagagaagctgtagcagagtctttgttactggagctggaagaggtgaccccagcagaggacggcgtgtatgcctgcctggcggagaacgcctacggacaagacaatcgcacagtcgggctaagtgtgatgtacgctccctggaagcccacagtgaatggcaccatggtagccgtggagggagaaaccgtgagtattctttgcagtactcagtcaaaccccgaccccattctgactatcttcaaagaaaaacagattttgagcaccgtgatctatgagagtgagctacagttagagttgccagccgtcagtcctgaggatgacggcgaatattggtgcgtggctgaaaatcaatatggtcagcgggccaccgcttttaacttgagcgtggaattcgccccagtgctcctgctcgagtctcactgtgctgctgcccgcgacaccgtgcaatgcctatgtgtcgtgaaatcgaatccggaaccctccgtcgccttcgaattaccctcacggaacgtgacggtgaatgaaagtgagcgagaattcgtgtactcagagcggagtggactcgtcctcacgtctatccttaccttgagaggacaggcccaagctccccccagggtcatctgcactgcgcggaacctgtatggcgcgaagagcctggaactcccgtttcaaggcgcacacagacttatgtgggcgaagattggcccggtgggtgcagtggtcgccttcgcaattcttatcgctatcgtgtgctatattacccaaactcgcaggaaaaaaaatgtgactgagagccctagtttttctgctggcgataaccctccggtgctgttttcctcagatttccgtattagtggggcccccgagaagtatgaaagtgagcggcgcctggggtcggagcgcaggttgctgggcttgagaggcgaaccgcctgagttagatctttcctatagccattccgatctgggtaagaggcctaccaaagattcctacaccctgacagaggagctggcggaatacgccgagatcagagtgaaatag

SEQ ID NO: 195861 - DNA, 915 bp, synthetic construct
  misc_feature 1..915: note = Description of Artificial Sequence: Synthetic coding sequence
  source 1..915: mol_type = other DNA
atgggcaaccacgccggcaagcgggagctgaacgccgagaaggccagcactaactcagagacaaatcgcggcgagagcgagaaaaaaagaaacctgggggaactgtccagaacaacttcagaggacaatgaagtcttcggcgaggccgatgcaaaccagaacaacggcacaagtagtcaggatacagcagtgactgattcaaaacggacagccgaccccaaaaacgcatggcaggacgcccaccctgcagatcccggaagccgaccgcacttgatcaggcttttttcacgggacgctcctggaagggaggataatacatttaaggatcgccccagcgaaagcgacgagttgcagactatacaggaggattccgctgctacatctgagtcactagatgtgatggcctcgcagaagagaccttcacagcggcacggctccaaatatctagccaccgccagcacgatggatcatgctcggcatggctttctccctagacatagagacacagggattttagacagcatcggacgtttttttggaggggaccgtggggcccctaagagggggagtggcaaggactcccatcatcccgcaaggaccgcacattatggctccttgcctcagaagagtcacggacgtacccaagacgagaaccctgtggtccactttttcaagaacatcgtcacccccaggaccccaccgcctagtcaggggaagggacgggggctcagtctttcacgcttcagttggggggccgagggacagcgacccggctttggctatgggggacgggctagcgactacaaatccgcacacaagggttttaagggcgtggatgctcagggaaccctttctaaaatcttcaagcttggcggacgcgactctcggagcgggtcacctatggccagacgttag

SEQ ID NO: 195862 - DNA, 561 bp, synthetic construct
  misc_feature 1..561: note = Description of Artificial Sequence: Synthetic coding sequence
  source 1..561: mol_type = other DNA
atggccagccagaagcggcccagccagcggcacggcagcaagtacctggctacagcaagtacgatggaccacgcccgccatggtttcctgccaaggcacagagacacaggcatcctggacagtatcggcaggttttttggtggagatagaggcgccccaaagcgcggctctggcaaggtgccatggttgaagcccggacgcagtcctttgccatcacatgccagatcacagccgggcctatgtaatatgtacaaagactcgcaccacccggcacgaacagctcactatgggtctctgccccaaaaaagtcatggtcgtacccaggacgaaaatcctgtagttcacttcttcaagaacatagtaactcccaggacccccccaccatctcagggaaaaggcgccgagggccagcgtcccggatttggatacgggggaagagcctccgattacaagtcggcccacaagggtttcaaaggcgtggacgctcagggtaccttgtccaagatcttcaaactgggcggaagagattccaggtccgggtctcccatggcccggcggtag

SEQ ID NO: 195863 - DNA, 594 bp, synthetic construct
  misc_feature 1..594: note = Description of Artificial Sequence: Synthetic coding sequence
  source 1..594: mol_type = other DNA
atggccagccagaagcggcccagccagcggcacggcagcaagtacctggctacagcttccacaatggatcacgcaagacacggttttcttccacgacatcgggatacaggcatactagattctatagggagattctttggaggagacaggggcgctcctaaacggggctccggcaaggttccttggctaaaaccagggcggtccccgctcccttctcatgccagatcccaacctgggttgtgtaacatgtacaaggactcccatcaccctgctaggacagctcactacgggtcattgccacagaaatcgcacggaagaacacaggacgagaacccagtagttcatttctttaagaacattgttaccccgcgcactccgccgccatcgcaaggtaagggacgcggcctgtcactgagcagattctcctggggggccgagggccaaaggccaggtttcgggtacggaggccgggcaagcgattacaaatccgcccacaagggcttcaaaggggtggatgcccaggggaccttgagcaagatttttaagttagggggaagagattccaggagcggaagtccgatggctcggcgatag

SEQ ID NO: 195864 - DNA, 594 bp, synthetic construct
  misc_feature 1..594: note = Description of Artificial Sequence: Synthetic coding sequence
  source 1..594: mol_type = other DNA
atgggcaaccacgccggcaagcgggagctgaacgccgagaaggccagcaccaattcggaaacaaaccggggtgagagcgagaagaagaggaaccttggggaactctctcggactacaagcgaggacaacgaagtgttcggcgaggctgatgctaatcagaacaacggtacttcttcccaagataccgccgtcacagatagtaagaggaccgccgatcctaagaatgcctggcaagatgcccacccagccgatccaggttctcggccgcacctgattcggctgttctctcgagatgcgcccgggcgcgaggataataccttcaaagataggccttccgagtcagacgagcttcagaccatacaggaggatagcgctgccacgtctgagagcctggacgtcatggcgagccagaaacggccttctcaaagacatggatcaaagtacctcgcaaccgcctccactatggaccacgccaggcacggtttcctaccccgtcatcgtgacactgggatactggatagcataggacgcttcttcggaggcgatcgcggagctccaaaaagagggtcagggaaggtctctagcgaggagtag

SEQ ID NO: 195865 - DNA, 594 bp, synthetic construct
  misc_feature 1..594: note = Description of Artificial Sequence: Synthetic coding sequence
  source 1..594: mol_type = other DNA
atgggcaaccacgccggcaagcgggagctgaacgccgagaaggcctctacaaattctgagaccaatcgaggggaaagcgagaagaagagaaacctgggcgagctgtcccggaccacctctgaagacaatgaagtgtttggcgaagcagacgctaaccagaataacggaacttcttcacaggatacagccgtgacagactccaagcgcacagccgacccaaaaaatgcttggcaagacgcgcaccctgccgatccagggtctcgcccgcatctgattaggctgttcagtcgagacgcccccggcagagaagataacacctttaaggaccgacctagtgaaagtgacgaactgcagacaatacaggaggactcagcggccactagtgagtccctggatgttatggcctctcagaagcgaccatctcagaggcatggtagtaaatacctggcaacagcgtctactatggaccatgcccggcatgggttcctccctcggcaccgggatacgggtatcttagatagcattggtagatttttcggaggggaccggggtgcacccaagcgcggatctggtaaagtgtctagcgaagaatag

SEQ ID NO: 195866 - DNA, 483 bp, synthetic construct
  misc_feature 1..483: note = Description of Artificial Sequence: Synthetic coding sequence
  source 1..483: mol_type = other DNA
atggccagccagaagcggcccagccagcggcacggcagcaagtacctggccacagccagcacaatggaccacgctaggcacggcttcttgcccagacatagagacacagggattctagacagcatcggtagattttttggaggggaccgcggtgcccccaaacgcggatccggaaaagattcccatcacccggcacgcacagcccactatggttctttgcctcaaaaaagccatggccgcacgcaggacgagaatcctgttgtgcacttctttaagaatatagttacaccacgaaccccgcctcccagccagggaaaaggtgcagagggccagcgaccgggattcggttatggaggtagggcatccgactataaatctgcccataaaggctttaagggggttgacgcgcaaggcaccctcagcaagatattcaagctcggtggccgggactcccgttcggggtcaccgatggcccgcaggtag

SEQ ID NO: 195867 - DNA, 516 bp, synthetic construct
  misc_feature 1..516: note = Description of Artificial Sequence: Synthetic coding sequence
  source 1..516: mol_type = other DNA
atggccagccagaagcggcccagccagcggcacggcagcaagtacctcgctactgcatctacgatggaccacgccaggcacggctttcttccacgccacagagataccggcattctcgattcaatcggacggttcttcggaggagatagaggggctcctaaacggggctccgggaaggacagccatcaccccgcccggactgcccactacggatcactacctcagaagtcacacggacgcacccaggatgagaatcctgtggttcacttcttcaaaaatattgtaaccccacgcactccaccccccagtcaggggaaaggcagggggcttagtctgagccggttttcctggggcgccgagggtcagaggccggggtttgggtatggaggccgggccagcgactacaagtcagcacacaagggtttcaagggagtggatgcccaggggactttgtctaaaatctttaagttagggggacgggattctcgttccggatcccccatggcaagaaggtag

SEQ ID NO: 195868 - DNA, 261 bp, synthetic construct
  misc_feature 1..261: note = Description of Artificial Sequence: Synthetic coding sequence
  source 1..261: mol_type = other DNA
atggccagccagaagcggcccagccagcggcacggcagcaagtacctggccactgcctccactatggatcatgctcgacatgggtttctgcctagacaccgggatacagggattcttgattccattggcagatttttcggcggggatcgcggcgctccaaagcgtggctccggaaaggacagtcatcatccagcacgcaccgcccattatggctccctcccacaaaagtcccatggacgcactcaggacgagaatccctag

SEQ ID NO: 195869 - DNA, 888 bp, synthetic construct
  misc_feature 1..888: note = Description of Artificial Sequence: Synthetic coding sequence
  source 1..888: mol_type = other DNA
atggccagcctgagccggcccagcctgcccagctgcctgtgcagcttcctgctgctgctcctcctgcaggtgtcatcatcatacgccgggcagttcagagtgatcgggccaagacaccctatacgcgctttggttggcgatgaggtggaattaccgtgcaggatatctccaggcaagaatgctactgggatggaggtaggctggtatcgcccacctttctctcgtgttgtgcacctctatagaaatggtaaagaccaagacggcgaccaagcccctgagtacaggggaaggactgagttgctgaaagacgccatcggggagggcaaggtcaccctaagaatccgcaacgtcaggttttccgacgaggggggatttacatgcttcttccgggaccattcataccaagaagaagccgctatggaattgaaggttgaggaccccttctattgggtttcgccgggagtgctcgtgctgctcgctgtgttgcccgtacttctcctccagataactgtgggcctcgtgtttctgtgtctgcaataccgccttaggggaaaattgcgagccgagatcgaaaatttgcaccggacctttgatccgcattttcttcgcgtgccttgctggaagatcacactgttcgtgattgtgcccgtcctgggtccattagtggctctgattatctgctacaactggctccatcgtcgcctcgccgggcagttcctggaagagctccgaaaattttcaagcctatgctataagcagcgtattaagtcacaggaacgggaaactgaggccacccgcggacgaggaggactgctccgggatcacattccacgcgggaaggaggagctggagtccctgggaggaggcaagactcccccaggtaggtag

SEQ ID NO: 195870 - DNA, 642 bp, synthetic construct
  misc_feature 1..642: note = Description of Artificial Sequence: Synthetic coding sequence
  source 1..642: mol_type = other DNA
atggccagcctgagccggcccagcctgcccagctgcctgtgcagctttctgctattattactactgcaagtgagttcgagctacgccggacagtttcgagtcatcgggcccaggcacccaatccgggccttggtgggcgacgaggtcgagcttccttgccgaatcagccctgggaagaacgccacgggcatggaggtcggttggtatcggccacccttctccagagttgttcatctataccggaatggcaaggaccaggacggcgaccaggcgcctgagtatagggggaggactgagctactcaaggacgctatcggagagggtaaagtgactcttaggattcgaaacgttcgcttctcagacgaagggggttttacatgcttcttcagggatcattcataccaagaggaggccgccatggaattgaaggtggaagatccattctattgggtgtcacctggagtgctggttctgttggctgtgcttccagtgctgctcctccagatcacagttggcctcgtgttcctgtgcctccagtaccggctccgaggtaagttacgcgcagaaattgagaacctccataggacatttggacaatttctagaggaacttctcttccatctcgaggccctgtccggttag

SEQ ID NO: 195871 - DNA, 396 bp, synthetic construct
  misc_feature 1..396: note = Description of Artificial Sequence: Synthetic coding sequence
  source 1..396: mol_type = other DNA
atggccagcctgagccggcccagcctgcccagctgcctgtgcagctttctactgctgctgctactccaggttagttctagctacgctgatcccttctactgggtttctcctggagtgctcgtcctactcgcggtcctgcccgtgctgcttctccaaattacagtgggcctgatcttcttgtgccttcagtatcggttgagggggaaactgcgggctgaaatcgagaatctgcatagaacattcgatccccatttcctgcgggtcccctgctggaagatcaccctgtttgtgatagtgccagtcctggggccactcgttgctttaattatctgctacaactggctgcatagacgtttagccgggcagtttctggaagagctgagaaatcctttctag

SEQ ID NO: 195872 - DNA, 621 bp, synthetic construct
  misc_feature 1..621: note = Description of Artificial Sequence: Synthetic coding sequence
  source 1..621: mol_type = other DNA
atggccagcctgagccggcccagcctgcccagctgcctgtgcagcttcctcctgttacttttactgcaagtttccagctcctatgcgggacagttccgcgtaatagggcctaggcacccaatccgtgcgctggtgggcgacgaagtcgaactcccttgtaggatcagccctggaaagaacgcaactggtatggaggtggggtggtatcggccccctttttctagggtggtacacctttacaggaacggtaaggatcaggacggggatcaagcccctgaatatagggggcggacagagctgctcaaagatgccatcggtgagggcaaagtcactctgcggatccgaaatgttagattttctgacgaaggagggtttacttgcttctttcgcgatcacagttatcaggaggaggctgccatggagttgaaggtggaggatcctttctactgggtgtctcccggagttctcgtactgctggctgtgctccccgtccttctgctccagataaccgtggggcttatcttcctgtgtctgcagtacaggttaaggggcaagcttagggccgaaattgaaaatctccaccgcacctttgtctttcatctcgaggccctctccggttag

SEQ ID NO: 195873 - DNA, 759 bp, synthetic construct
  misc_feature 1..759: note = Description of Artificial Sequence: Synthetic coding sequence
  source 1..759: mol_type = other DNA
atggccagcctgagccggcccagcctgcccagctgcctgtgcagctttttgttgttactcctgctgcaggtgtcctcctcttacgctgggcagtttcgggttatcggcccgcgccacccgatcagagctctagtgggtgatgaggtggagctgccgtgcaggataagccccgggaagaatgcgaccgggatggaggtggggtggtaccgcccccccttttccagagtcgtgcatctttatcgcaacggtaaggatcaagacggcgaccaggcccctgagtatagagggcgcacagaacttctgaaagacgccattggggaggggaaggtcaccctacgtatccgaaacgtgcgatttagcgacgaaggcggctttacctgtttctttcgcgaccacagttaccaggaggaagcagccatggagctgaaagtcgaagaccccttttactgggttagccctggtgtgctggttcttctggcagtactgcctgtgttattacttcagatcaccgttggcttgatattcctctgccttcaataccgactgcgcgggaagctcagagctgagatcgagaacctgcatcgcacctttgatccacatttcctcagagtgccatgctggaagatcacactctttgtgatagttcccgttttaggccctctcgtggcgcttattatctgctacaattggctgcatcgtaggctcgccggccagttcctcgaagaactactattccacctcgaagccttgagcggctag

SEQ ID NO: 195874 - DNA, 516 bp, synthetic construct
  misc_feature 1..516: note = Description of Artificial Sequence: Synthetic coding sequence
  source 1..516: mol_type = other DNA
atggccagcctgagccggcccagcctgcccagctgcctgtgcagcttccttctgttgctcctcctgcaagtgagcagcagttacgccggtcaattcagagtcatcggacccagacaccccattagggccctggtaggggacgaggtagaattaccgtgcagaatttctcccggtaagaacgctacaggcatggaggttggctggtaccggcccccctttagccgggtcgtgcatttgtatcgtaacgggaaggaccaggatggcgaccaggcaccggagtaccggggcagaacagaactgctgaaggatgcaataggagaaggaaaggttacactccggatccgcaacgtgagattctccgatgaaggaggtttcacgtgtttcttccgcgaccactcttaccaagaggaagctgccatggagttaaaggtagaagtgagtcactctgtgacacaagactggctgcagtggcacgaccatggatcactgcaacctccccctccccgactgaaatag

SEQ ID NO: 195875 - DNA, 744 bp, synthetic construct
  misc_feature 1..744: note = Description of Artificial Sequence: Synthetic coding sequence
  source 1..744: mol_type = other DNA
atggccagcctgagccggcccagcctgcccagctgcctgtgcagcttcctgctgttgttattgcttcaggtgtcttcctcctatgccggacaattcagagtcatcggcccgcgccacccaattcgagctctggtgggcgacgaagtggagcttccgtgcagaataagtccgggtaagaatgctacagggatggaggttgggtggtatcgccctccgttcagtagagtggtccacctctaccggaacgggaaagaccaggacggggatcaggcgcccgaatatcgcggccgaacagagctgctgaaggacgcaattggggagggaaaagttaccttgaggattcgtaacgtgcgcttttccgacgaaggcgggtttacttgtttcttccgagatcactcataccaggaggaagcggccatggagcttaaggtggaggatcctttctattgggtttcccctggcgtcctggttctgctggccgttctgcctgtattgctactccagatcacagtcgggctgattttcctgtgtctgcaatacaggctgagaggaaagcttagagcagaaatcgagaaccttcacaggacattcgatccacacttcctgagggttccctgctggaagatcactctgtttgtgatcgtacccgtactggggcctctcgtagctctgatcatatgttacaattggctgcacagaagactggcagggcaatttctggaggagttacgaaatcctttttag

SEQ ID NO: 195876 - DNA, 396 bp, synthetic construct
  misc_feature 1..396: note = Description of Artificial Sequence: Synthetic coding sequence
  source 1..396: mol_type = other DNA
atggccagcctgagccggcccagcctgcccagctgcctgtgcagcttcctattactgctcttactacaggtctcatccagttacgccgatcctttttactgggtgagcccaggcgtgctggtcttgctcgccgtgctgccggtgcttctcctgcagattaccgtaggattggtcttcctgtgcctgcagtaccggctgcgcggaaagctgcgggctgagattgaaaacctacacagaaccttcgatccacacttcttaagggtcccctgttggaagatcacacttttcgtcatcgtccccgtcctcgggcctctggtcgcacttataatctgctacaattggctccaccggcgactggcaggccaatttctcgaggagctgcgtaatccattttag

SEQ ID NO: 195877 - DNA, 744 bp, synthetic construct
  misc_feature 1..744: note = Description of Artificial Sequence: Synthetic coding sequence
  source 1..744: mol_type = other DNA
atggccagcctgagccggcccagcctgcccagctgcctgtgcagcttccttcttctgcttttgttacaggtcagctcaagctatgccggtcagttccgggtgatcggtcctaggcatcccatccgagctcttgttggagacgaagtcgagcttccttgtagaatctcacctggcaagaatgccacgggaatggaggtggggtggtatcggcctcctttctcacgggttgtgcatctgtaccgcaatggaaaggatcaagacggagatcaggcgccagaatatcgtggccgaacggaacttttaaaagatgccatcggggagggaaaggtgactctcagaatccgcaacgtgcgattctccgatgagggaggctttacctgcttcttcagggatcatagctaccaggaggaggccgcaatggaactgaaagtggaggaccccttttattgggtgagtccaggcgtgctagttctgctggccgtccttccagtgcttcttctgcaaatcaccgtgggactggtgtttctgtgcctgcaatataggttgcgaggtaagctgcgagcagagatcgagaatctgcatcgcacatttgacccacactttctccgcgtgccttgctggaaaattaccctgtttgttatagtcccagtgctcggacccttggtggctttgatcatttgctacaactggctgcatcgcagactggcaggtcagttcctggaagagctgcgcaatcctttctag

SEQ ID NO: 195878 - DNA, 744 bp, synthetic construct
  misc_feature 1..744: note = Description of Artificial Sequence: Synthetic coding sequence
  source 1..744: mol_type = other DNA
atggccagcctgagccggcccagcctgcccagctgcctgtgcagctttctgctgctcctgctgcttcaggtttctagcagttacgcaggtcagtttagggtaatcggccctcgtcatccgataagagcgctggtaggtgacgaagtcgagctgccatgcagaatcagtccggggaaaaacgcaacaggaatggaggtcggatggtacagaccccccttttcccgggtcgtgcacttgtaccggaatggaaaagatcaggacggagatcaggcccccgaatatcgcggacggacagagctgttaaaggatgcaattggcgaaggaaaggtaactcttaggattcggaacgtgcgcttctctgacgagggcgggttcacatgcttctttagagatcatagttaccaggaagaagccgccatggaattgaaagttgaagatccgttctattgggtgagcccaggagtcctggtgctgctggccgtcctgcctgtgctcctccttcagataacagtgggactcgtgttcctgtgtttgcagtaccgactgcgcgggaaactgagggccgagatcgagaacctacaccgtaccttcgatccccacttcctccgcgtgccgtgctggaagatcaccttatttgtcattgtccctgtgttgggcccactggttgccctaattatctgttacaattggctacataggcgtctggcgggccaattcctggaggaactcaggaatccgttctag

SEQ ID NO: 195879 - DNA, 690 bp, synthetic construct
  misc_feature 1..690: note = Description of Artificial Sequence: Synthetic coding sequence
  source 1..690: mol_type = other DNA
atggccagcctgagccggcccagcctgcccagctgcctgtgcagctttctccttcttcttttgctgcaggtaagtagctcatacgctggccagttccgcgtgattggccctcggcacccaattcgagcactggtgggggacgaagttgaactgccttgtaggatttcacccggaaagaatgcaacggggatggaggtcggctggtatcgccctcctttctctcgagttgtgcatttatatcgaaatgggaaggaccaggacggggaccaggctccggagtaccgcggacggaccgagttgttaaaggacgccattggcgaaggtaaggttaccttacggattcggaatgtgagattcagcgatgagggaggcttcacctgcttttttcgcgaccattcttaccaagaagaagcagccatggaattaaaagtggaagaccccttttattgggtcagccccggcgtcctggtgctgctggccgtgctcccagtgctgcttctgcagattacggtcggattggtgttcctttgtctgcagtaccgtctgagaggcaagctccgtgcggagattgagaacctgcaccgtactttcgagtctttcggagtgctggggccacaggtaaaagagccaaagaagaccgggcagtttcttgaagaactgctgttccatctagaagcactctccggctag

SEQ ID NO: 195880 - DNA, 642 bp, synthetic construct
  misc_feature 1..642: note = Description of Artificial Sequence: Synthetic coding sequence
  source 1..642: mol_type = other DNA
atggccagcctgagccggcccagcctgcccagctgcctgtgcagctttctgttgctcctgctgctacaagtgtcaagttcatacgccggccagttccgtgtcatcggtccgcgacaccccattcgggcgttggttggagatgaggtggagctgccttgtcggatcagcccaggcaaaaacgctaccggtatggaggtaggctggtacaggcctcccttctcccgcgtggtgcatctttaccgaaacggtaaagatcaggacggcgaccaagctccagagtacagaggcagaactgagctgctcaaagatgccattggcgaggggaaggttaccctgaggatccggaacgttcgattttcagacgaaggcggtttcacatgtttctttcgtgaccattcttatcaggaagaggccgccatggagctgaaagtggaggacccattttattgggtttcacccggggtgctcgtactattagcagtgctccccgtcctgctgttgcagattacagtcggcctgatcttcctgtgtctgcagtacaggctgcgtgggaaactgagggccgagatcgaaaatctacatagaacctttgggcagttccttgaggaactgttgttccatctggaggccctttccgggtag

SEQ ID NO: 195881 - DNA, 675 bp, synthetic construct
  misc_feature 1..675: note = Description of Artificial Sequence: Synthetic coding sequence
  source 1..675: mol_type = other DNA
atggccagcctgagccggcccagcctgcccagctgcctgtgcagcttcctgctgttgctgttgctgcaggtgagtagttcctacgccggacagtttagggtgatcgggcctcggcatccaattcgtgctcttgtcggagatgaagtggagctcccttgccggatttctcccgggaagaatgccactggtatggaagtgggatggtatagaccgccatttagtagagtggtgcacttgtaccgtaacggaaaagaccaggacggagaccaggcgccagagtacagagggaggactgagctcttaaaggacgctataggggagggcaaggttaccctgagaattcggaatgtgagattcagtgacgagggaggcttcacatgcttcttcagggaccactcttaccaggaggaagcggccatggaactgaaggtcgaagatccgttttattgggttagcccgggagtgctcgttctgttagccgtgctgccggtcctgttgttgcagataactgtcggacttatttttctgtgccttcagtaccgccttcgcggtaagctgcgagctgaaatcgagaaccttcatcggacatttgagtccttcggcgtgctcggcccacaggtgaaggagccgaagaagactggacagttcttggaagaactgcggaatcctttctag

SEQ ID NO: 195882 - DNA, 675 bp, synthetic construct
  misc_feature 1..675: note = Description of Artificial Sequence: Synthetic coding sequence
  source 1..675: mol_type = other DNA
atggccagcctgagccggcccagcctgcccagctgcctgtgcagcttccttcttcttctcctgctccaagtcagctccagctatgcaggtcaattccgcgtgataggtccaaggcatcccattcgagccctggttggcgatgaagttgaattaccgtgccggatctctcctgggaagaatgccaccgggatggaggtagggtggtaccgccccccattttcccgtgtggtgcacctgtatcggaatggaaaggatcaggatggggatcaggcccccgagtaccgtgggcgaaccgaactccttaaggacgctatcggggaggggaaagtgacattgcgcattcgcaacgtcagattttccgatgaggggggatttacctgttttttcagggaccatagttatcaagaagaggccgccatggaactgaaggtggaagatccattctattgggtctctccaggggtcttggtattgctggctgttctccctgtcctactcctacagattacactcgggcttgtgtttctgtgcttacagtacagattaagaggaaagcttcgagcagaaattgagaacttacaccggacattcgaatcctttggcgttctcggtccccaggtgaaagagcctaaaaagacggggcagttcctcgaagagctgagaaaccccttctag

SEQ ID NO: 195883 - DNA, 690 bp, synthetic construct
  misc_feature 1..690: note = Description of Artificial Sequence: Synthetic coding sequence
  source 1..690: mol_type = other DNA
atggccagcctgagccggcccagcctgcccagctgcctgtgcagcttccttttacttcttctcttacaagtgagctcttcctatgcaggacagtttcgagttatcggtccccggcatcccataagagctctcgtcggggacgaggtggaactcccatgtagaatcagccccggtaaaaacgctaccgggatggaagtcgggtggtaccgaccacccttctccagggtcgtgcacctatatagaaatggaaaggaccaggatggcgaccaggctcctgaatatcgggggcgaaccgagttgctgaaggatgcaattggtgagggtaaggtgacgttgaggattcgcaacgtcagattcagtgatgaaggtggcttcacttgcttcttccgggaccacagctaccaagaagaagcagccatggaacttaaggtcgaggacccattttattgggtatcccctggcgtcctggtgcttcttgcggtcctacctgtactccttctgcaaattaccgttggattagtgttcctgtgcctgcagtatcgactgagaggaaagttgcgcgccgaaatagagaaccttcaccgcacattcgagagctttggcgtcctgggacctcaagttaaagaacccaagaaaaccggacagtttttggaggaacttttgttccacctggaggccttatccggctag

SEQ ID NO: 195884 - DNA, 642 bp, synthetic construct
  misc_feature 1..642: note = Description of Artificial Sequence: Synthetic coding sequence
  source 1..642: mol_type = other DNA
atggccagcctgagccggcccagcctgcccagctgcctgtgcagcttcctcctgcttttactgctccaggtttccagttcgtacgctgggcagtttagggtgatcggccccaggcatcctatcagagctttggtgggggatgaggtagaattgccctgtcgaatttcaccaggcaaaaacgcaactgggatggaggtcggctggtataggccccctttttctcgcgtggtgcatctttaccgcaacgggaaggaccaggatggagaccaggctcccgaatacaggggacgcaccgaactgctgaaagacgcaatcggggagggcaaagtgactctgcgaattcgcaacgttcgtttcagcgacgaagggggcttcacatgtttcttcagggaccacagttaccaggaagaagcagcaatggaattgaaagtagaagatcccttttactgggtgagtccaggggtgctggtcctactggctgttctgcccgtgctcctcttacagatcacggtgggactggtgtttttatgtcttcagtatcggctgagagggaaactgagggccgaaatcgagaatctgcacaggactttcggtcagtttctcgaggagttgctgttccatctggaggccctctccggatag

SEQ ID NO: 195885 - DNA, 540 bp, synthetic construct
  misc_feature 1..540: note = Description of Artificial Sequence: Synthetic coding sequence
  source 1..540: mol_type = other DNA
tgacagttccgggtgatcggcccccggcaccccatccgggccctggtcggagacgaggtcgaactgccttgcaggatctctcctgggaaaaatgctactggtatggaggtggggtggtacagacctccgttctctcgtgtggtacacctgtatagaaatgggaaggaccaggatggcgaccaagccccggagtatcgaggccgaaccgagttgctgaaggatgccattggagagggtaaagtcacactgcgcatccggaatgttcggtttagcgacgaaggcggcttcacctgtttcttccgagaccacagctaccaggaggaggccgcaatggagctcaaagtcgaagatcctttctattgggttagccctggtgtactcgtcttgttggcggtcctgccagttctgctcctgcaaatcacagtcgggctcgtgtttctgtgtctccagtacagactcagggggaaactgagggccgagatagaaaatttacatagaactttcgggcagttccttgaagagctccgaaatccgttttag

SEQ ID NO: 195886 - DNA, 396 bp, synthetic construct
  misc_feature 1..396: note = Description of Artificial Sequence: Synthetic coding sequence
  source 1..396: mol_type = other DNA
atggccagcctgagccggcccagcctgcccagctgcctgtgcagcttcttgctgctcctgctgctgcaggtaagctcctcttatgccgaccccttctactgggtctctccaggcgtacttgtgctccttgcggtgctaccggtgcttctgcttcagatcacagttggcctggtgttcctgtgtcttcagtaccgactcagaggcaaattaagagctgaaatcgagaatctgcaccgtacatttgatccgcacttcctgcgcgtaccctgttggaaaatcactctcttcgtgatcgtccccgtgttaggaccgctggttgcactgattatctgctacaactggctgcatagacgtttggcgggccaattcttggaggagttacggaatcccttttag

SEQ ID NO: 195887 - DNA, 615 bp, synthetic construct
  misc_feature 1..615: note = Description of Artificial Sequence: Synthetic coding sequence
  source 1..615: mol_type = other DNA
agcctgagccggcccagcctgcccagctgcctgtgcagcttcctgctgctgctgttgctgcaggtgtcatcatcctacgcgggccagttcagggtgatcgggccccgacaccctattcgggctctcgtcggcgacgaagtggagctcccatgtcgaattagtcccggcaagaacgccaccggaatggaggttggctggtaccggccaccattctcaagagtggttcacctgtatcggaatgggaaagatcaggacggtgaccaagctcctgagtataggggccgaaccgaacttctcaaagatgccatcggggaagggaaagtgactcttcgaattcgcaacgttcggttctccgatgaaggcggctttacctgttttttcagagaccactcctaccaagaagaggccgcgatggagctgaaagtggaagaccccttctattgggtctcgccaggcgtgctggtgttactggccgtgctgccagtcctcctgctgcagattacggtggggctggtgtttttgtgcctgcagtataggttgcgcgggaaactgcgcgcagaaattgagaatctgcatcggacattcgtattccacctcgaagctctgtcgggatag

SEQ ID NO: 195888 - DNA, 396 bp, synthetic construct
  misc_feature 1..396: note = Description of Artificial Sequence: Synthetic coding sequence
  source 1..396: mol_type = other DNA
atggccagcctgagccggcccagcctgcccagctgcctgtgcagctttcttctccttctgctattgcaggtttcttcttcgtatgccgaccctttttactgggtgagccccggcgtgctagtcctactggccgtgttacctgttcttctgctgcagatcactctgggactggtgttcctctgtctccagtaccgattgcgaggaaaattaagggccgaaatagaaaacctgcatcggacatttgacccccattttctcagagtaccttgctggaaaattacattgttcgtgatagtgcccgtgctaggacctcttgtggccttgatcatatgctataattggctgcaccgaaggctcgccggccaattcctggaagagctgagaaatcctttctag

SEQ ID NO: 195889 - DNA, 675 bp, synthetic construct
  misc_feature 1..675: note = Description of Artificial Sequence: Synthetic coding sequence
  source 1..675: mol_type = other DNA
atggccagcctgagccggcccagcctgcccagctgcctgtgcagcttcctccttctgctcttgctgcaggtttctagcagttacgctggccaatttagggtgattgggcctcggcaccccattcgtgctctggtgggagacgaggtggaattaccctgccgcatctctcctgggaagaatgcaacggggatggaggtcggttggtatcgcccacctttcagcagggtggtgcatctgtataggaatggaaaggaccaggatggggatcaagccccagagtaccgcggccgcactgagctgctgaaagatgccattggcgagggcaaagtgacacttagaattcgcaacgtgcgattctctgacgagggggggttcacctgcttctttcgggaccactcctaccaggaagaagcggcaatggaactcaaagtagaagatcctttctattgggtgtcacctggcgttctggttctgcttgccgtgttgccagtgctactcctgcaaataactgttggactggtgttcctatgtctccagtacagattgagagggaagctgcgcgccgaaatagagaatctccatcgcacctttgaatctttcggagtcctcggtcctcaagttaaggagcccaagaaaacgggacagttcttggaggagttacggaatcccttctag

SEQ ID NO: 195890 - DNA, 675 bp, synthetic construct
  misc_feature 1..675: note = Description of Artificial Sequence: Synthetic coding sequence
  source 1..675: mol_type = other DNA
atggccagcctgagccggcccagcctgcccagctgcctgtgcagctttctgctgctcttattactgcaggtgagtagcagttacgcgggtcagtttcgtgtgatcggacctagacatcccatacgtgctctggttggagatgaagtagagctcccttgccgaatttccccaggtaaaaacgccacaggaatggaagtggggtggtacagaccccctttttcaagagttgttcacctgtatagaaacgggaaagatcaggacggggaccaggcccctgagtaccgcggtagaacggaactccttaaggacgccatcggggagggcaaagtgacattaagaatccggaacgtccgattctcagatgagggaggatttacctgcttttttagagatcactcctaccaggaagaagccgcaatggagctgaaggtggaagacccgttttattgggtctctcctggcgtcctggtactcctcgcggttctccccgtacttttgttgcagattactgtcggactagtgttcttatgtttgcagtacaggctccggggaaagttgcgcgcagagatcgagaatctccaccggacatttgaaagtttcggggtgctaggcccccaggtgaaggagccaaagaagactgggcagtttctggaagaactcagaaatccattctag

SEQ ID NO: 195891 - DNA, 675 bp, synthetic construct
  misc_feature 1..675: note = Description of Artificial Sequence: Synthetic coding sequence
  source 1..675: mol_type = other DNA
atggccagcctgagccggcccagcctgcccagctgcctgtgcagctttctcctacttctgctgctccaagtatcaagctcatatgccggacaattcagagtaattggaccgaggcaccctattagggctctggtaggcgatgaagtggagctaccttgtaggataagtccaggcaagaacgccacgggcatggaagtggggtggtaccgcccccccttctcccgagtggtgcacctgtacagaaatggcaaggaccaagacggtgaccaggcccccgagtatcgtggtcgcaccgagctgctgaaggacgctattggtgagggaaaggtcacactaagaattcggaacgtcagattttctgacgagggcggattcacatgctttttccgagatcattcctatcaggaggaggcagccatggagctgaaggttgaggatcccttctactgggtcagtccgggggtgctggtactcctggcagtacttcctgtgttgctcctgcaaatcaccgtggggctggttttcttgtgcctgcagtacagattacgcggaaagctgcgcgcggagatcgagaaccttcatcgaacattcgagtccttcggcgtgctggggcctcaggtgaaagaaccaaagaagaccggccagtttctggaagagctgaggaatcccttttag

SEQ ID NO: 195892 - DNA, 759 bp, synthetic construct
  misc_feature 1..759: note = Description of Artificial Sequence: Synthetic coding sequence
  source 1..759: mol_type = other DNA
atggccagcctgagccggcccagcctgcccagctgcctgtgcagctttctgctgctgctgctcctccaggtgtcttcctcctacgctggccagtttcgcgtcattggtcctaggcatcctatacgcgcattagttggggacgaagtcgaactgccttgtcggatcagtccaggaaaaaatgccacgggcatggaggtcggctggtaccgaccccccttcagccgagtggtgcacctgtataggaacggaaaagatcaggatggagatcaggcccctgagtaccgaggacggactgaattgctgaaagatgctatcggcgagggaaaagtcaccctgagaatacgcaacgtgcgttttagtgatgagggagggtttacttgtttttttcgggaccactcatatcaggaggaggcggctatggagctgaaagtggaagaccctttctattgggtgtctccaggggttctggtgttgctggctgtcctacccgttctcttgctgcaaatcaccgtagggttagtcttcctgtgcctgcagtatcgtttgcgggggaaactgcgagcggagatcgagaacctgcataggacatttgacccccacttccttcgggtcccatgttggaagattaccctattcgttattgttccggtgctcggaccactcgtcgccttaatcatctgctataattggctccaccgacggctggccggacagtttctggaggaactcctattccatctcgaggctctgagcggttag

SEQ ID NO: 195893 - DNA, 744 bp, synthetic construct
  misc_feature 1..744: note = Description of Artificial Sequence: Synthetic coding sequence
  source 1..744: mol_type = other DNA
atggccagcctgagccggcccagcctgcccagctgcctgtgcagctttcttttactcctgctcctgcaagttagctcgtcttatgctgggcaattcagggttatcggcccacgtcatccaattcgggcacttgttggcgatgaagtagagttgccttgcaggattagccctgggaagaatgcgaccggcatggaggttggctggtaccgcccaccattttcacgcgtggtccacctctaccgtaacggaaaggaccaagatggcgaccaagcgcccgaatatcgtggtcggacggagctgctcaaagatgctatcggtgagggaaaggtgactctgagaatcagaaacgtgaggttttctgacgagggcgggtttacctgtttttttagggaccacagttatcaggaggaagctgcaatggagctgaaggttgaggacccattttattgggtgagcccaggagtgttggtgctgctagccgtcctccccgttctgttgttacagatcacagtagggctggtgttcctttgcctacagtaccggctgagagggaagttgcgggctgaaatcgaaaatctccatcgtaccttcgatcctcatttcttgcgcgtaccgtgctggaagatcacactcttcgtgattgttcccgtgctggggcccctcgtggcactcattatttgctataactggctgcaccggcgtctggccggtcagtttttagaggagctgcggaaccccttttag

SEQ ID NO: 195894 - DNA, 540 bp, synthetic construct
  misc_feature 1..540: note = Description of Artificial Sequence: Synthetic coding sequence
  source 1..540: mol_type = other DNA
tgacagttccgggtgatcggcccccggcaccccatccgggccctggtgggggatgaagtcgaactcccgtgtcgtatctccccgggcaaaaatgcaaccggaatggaggtgggctggtaccggcctccatttagcagggtcgtccacctgtatagaaacgggaaggatcaggacggagaccaggctccagaatatagggggaggaccgaactgttaaaagacgcaattggggagggcaaggtgaccctgcgaatcagaaatgtccgtttttccgacgaaggcgggttcacctgtttctttagagatcattcttaccaggaggaggccgctatggaactgaaagtggaggaccctttctactgggtgagtcccggcgtgctggtgcttctggcggtacttccagtgttgctgctccaaatcaccgtaggtctggtgtttctttgtctgcagtataggcttcgggggaaactcagagctgagattgagaacttgcacagaacattcggccaattcctggaggaactcaggaatcccttctag

SEQ ID NO: 195895 - DNA, 540 bp, synthetic construct
  misc_feature 1..540: note = Description of Artificial Sequence: Synthetic coding sequence
  source 1..540: mol_type = other DNA
tgacagttccgggtgatcggcccccggcaccccatccgggccctggtcggcgacgaagtggagctgccttgtaggataagccccggtaagaacgcaacagggatggaggtggggtggtacaggcctcccttcagcagggtggttcatctatatcgaaatggtaaggaccaggacggagatcaggctcctgaataccgaggacgtactgaattactcaaggacgctatcggcgaaggcaaggtgactcttagaatccggaatgttagatttagcgatgaaggcgggttcacatgtttctttagagatcacagctaccaggaagaggccgctatggagttgaaggtagaggatccgttctactgggtttccccgggggttctggtcctcctggccgtgctccctgtcctgctgctgcagatcacggttggtcttgtatttttgtgccttcagtacaggttgcgaggcaaactgcgggcagagatcgaaaacttgcaccgcacatttggtcagtttctggaggaactacgtaatcccttttag

SEQ ID NO: 195896 - DNA, 759 bp, synthetic construct
  misc_feature 1..759: note = Description of Artificial Sequence: Synthetic coding sequence
  source 1..759: mol_type = other DNA
atggccagcctgagccggcccagcctgcccagctgcctgtgcagcttcctgctgctgctgctgctccaggtgagctcttcatatgcaggacagttcagagtgattgggccaagacacccgattcgggcgctggtgggcgatgaggttgaactgccatgtcgtatctctccggggaaaaacgcaaccgggatggaggtggggtggtaccgtccccctttttctcgggtggtacacttgtatagaaatggtaaggatcaggatggcgatcaggcgcccgagtaccggggacggacagagctccttaaagatgctattggcgaaggaaaggtgaccctgcgcatccggaatgtcagatttagcgacgagggcggctttacatgcttcttccgtgaccacagctatcaggaagaggccgcaatggagctaaaagtagaggacccattttactgggtgtcgcctggagtgttggttctgttggccgtgttacccgttctgctcctgcaaatcacagtgggcctcgttttcctgtgccttcagtatcgcctgaggggtaaactgagagccgagattgagaacctccacaggacgttcgacccgcactttctgagggtgccctgttggaagatcactctgtttgttatcgtgccagtcctgggtccgctggtagccctgataatatgttacaattggcttcaccgcagactggcaggacaattcttggaggaactcctgtttcatttggaggccttgagcggttag

SEQ ID NO: 195897 - DNA, 690 bp, synthetic construct
  misc_feature 1..690: note = Description of Artificial Sequence: Synthetic coding sequence
  source 1..690: mol_type = other DNA
atggccagcctgagccggcccagcctgcccagctgcctgtgcagcttcttgctactgttattgctccaggtgagctcttcatatgcaggtcaattcagagtgatcggcccgcgacatcccattagagcactggtcggagatgaggtggaacttccgtgcaggataagcccgggcaagaacgccacgggaatggaagtaggttggtaccgacctccgttcagcagagttgtgcatttatatcgaaacggcaaggaccaagatggtgatcaagcccctgagtacagagggagaactgaacttctaaaggatgccataggggaagggaaagtgacgctgagaattcgaaatgtccgattctcggacgaaggcggatttacatgtttttttcgcgatcattcgtatcaggaggaggccgctatggaactgaaggttgaagaccctttttattgggtctctcctggggtacttgtgctgctcgctgttttgcctgtgctgctactgcagatcaccgtgggcttagtcttcctttgccttcagtaccgcctcagaggaaaactgagggccgagattgagaaccttcatcggacgtttgaatcatttggagtgctagggccacaggtgaaagaaccaaagaagacgggtcagttcctcgaagaactactgttccacttggaggctttatctgggtag

SEQ ID NO: 195898 - DNA, 888 bp, synthetic construct
  misc_feature 1..888: note = Description of Artificial Sequence: Synthetic coding sequence
  source 1..888: mol_type = other DNA
atggccagcctgagccggcccagcctgcccagctgcctgtgcagcttccttctcctactgctgctgcaggtttcctcaagttacgcagggcagttccgcgttatagggcctagacaccctattcgtgcccttgtgggcgatgaagtagaactaccttgtaggatttcccccgggaaaaatgccactggcatggaggtggggtggtatcgtccgcctttttctcgagtcgtgcatctttaccggaacggaaaggaccaagatggcgatcaggcacctgagtacagaggtcgcacagagctgcttaaggacgctattggggagggcaaggtgaccctcaggatccgaaatgtacgtttttccgatgaaggagggtttacctgcttctttagagatcacagctatcaggaagaagccgcgatggagctcaaggtggaggacccattctactgggtatctcccggagtcctggtcttgctcgccgtgctacccgtactgctacttcagattaccgtcggcctcgtcttcttgtgtctgcagtacaggctgcggggcaagctcagagctgagattgaaaatctgcaccgcactttcgaccctcattttctccgagtgccatgttggaagatcacactgttcgtgattgttcctgtgcttggtccgctcgtcgccttgattatctgctacaactggttacaccgcaggctggcaggccagtttctggaggagcttcggaaattcagttctctctgctacaagcagcgaattaagagccaggagagagaaaccgaagccactagggggcgcggcgggctgttgagggatcacatccccagaggaaaggaggagctggagagccttggaggagggaaaaccccccccggaaggtag

SEQ ID NO: 195899 - DNA, 642 bp, synthetic construct
  misc_feature 1..642: note = Description of Artificial Sequence: Synthetic coding sequence
  source 1..642: mol_type = other DNA
atggccagcctgagccggcccagcctgcccagctgcctgtgcagctttctgctgcttctcttactgcaggttagctcctcatatgcaggacagtttagagttatcggcccacgacacccgattagagccttggtaggcgacgaagtggagctgccttgtcgaatcagtccagggaagaacgctactgggatggaggttgggtggtaccgccccccattctcacgggtggtgcatttgtatagaaacggcaaggaccaagatggagatcaggcaccagagtataggggtcggacagagttgcttaaggacgccatcggcgaaggcaaggtgacgttgagaatccgcaacgtgcgcttttccgacgaaggggggtttacgtgtttcttcagggatcacagttaccaggaggaggctgctatggagttgaaggtcgaggacccgttttattgggtgagcccaggagtgctggtgctattggccgttttgcccgtgctcctcctacagatcactgtagggctcgtgtttctgtgtttgcagtatagattgcgggggaaattacgagccgaaatcgagaatctgcatcggacttttgggcaattcctcgaggaactcctcttccatctggaggcactcagtggatag

SEQ ID NO: 195900 - DNA, 759 bp, synthetic construct
  misc_feature 1..759: note = Description of Artificial Sequence: Synthetic coding sequence
  source 1..759: mol_type = other DNA
atggccagcctgagccggcccagcctgcccagctgcctgtgcagcttccttcttttgctcctgttgcaggtcagtagtagctatgcaggacagttccgagttataggcccacggcaccccattcgtgccctggtgggagacgaggtcgagctgccctgcaggatcagccccggcaagaatgcaacagggatggaggtgggatggtataggcctccttttagtagagttgtccacctgtataggaatgggaaagaccaagatggggatcaggcccccgagtatcgcggcagaacagaactacttaaagatgctataggtgaaggaaaggtaactctcagaattcggaatgtgcgcttttcagatgagggcggcttcacctgttttttccgagatcacagctatcaggaggaggcagcaatggaactgaaggttgaagacccattctactgggtctcaccaggggtgctcgtcctgctggcagtgttacccgtgctacttctgcagatcacagtcgggctcgtattcctatgtctgcagtatcgccttcgagggaagctccgtgctgagatcgagaatctgcatcgcacctttgaccctcacttcctgagggtgccctgttggaagattactctctttgtgatcgtgccagtgttggggccccttgtcgcccttattatttgctacaattggctgcaccgacgtctagcaggccagttcctggaagaattgctgtttcacctggaggcgctctccggttag

SEQ ID NO: 195901 - DNA, 540 bp, synthetic construct
  misc_feature 1..540: note = Description of Artificial Sequence: Synthetic coding sequence
  source 1..540: mol_type = other DNA
tgacagttccgggtgatcggcccccggcaccccatccgggccctggtgggagacgaagtggagctgccctgccgcataagccctgggaagaacgctactggtatggaggtgggctggtaccggccccccttcagtcgcgttgttcacctgtataggaacggcaaggatcaggacggggatcaagcaccggagtatagaggcagaaccgaactgcttaaggacgcaattggggagggcaaagtgacgcttcgaattcggaatgtacggttttcggacgaggggggttttacctgtttcttcagagaccactcctatcaggaggaggcagctatggaactaaaagtagaagatcccttctactgggtttctccaggagttcttgtgctgctcgcagttctccccgtgctgttgcttcaaatcactgttgggctcgtttttttgtgcctgcagtaccgtctccgaggcaaattacgtgctgagatcgagaacctccataggacttttgggcaattccttgaggagctccgaaatcccttctag

SEQ ID NO: 195902 - DNA, 888 bp, synthetic construct
  misc_feature 1..888: note = Description of Artificial Sequence: Synthetic coding sequence
  source 1..888: mol_type = other DNA
atggccagcctgagccggcccagcctgcccagctgcctgtgcagctttctgcttctcctactgcttcaggtgtccagcagctatgccgggcagtttcgagtgatcggcccaagacacccgataagggcacttgtgggcgacgaggtggagttgccgtgccgaatcagcccgggtaagaacgccacagggatggaagtgggctggtacaggccacccttttcacgggtggttcatctctacagaaatggcaaagaccaggacggcgaccaggcccctgagtacagagggagaacggaacttttaaaggatgcgataggggagggaaaagtgactcttagaatccgcaacgtgcggttcagcgatgaaggcggattcacatgcttcttcagggaccacagctatcaggaagaggctgccatggagctgaaggtcgaggacccattctactgggtctcgcccggggtcctggtcctccttgccgtgctccctgtgctattattacagatcactgtgggactggtatttctatgcctgcagtacagattaaggggcaagcttcgagccgagattgaaaaccttcaccggacctttgacccgcacttccttcgggttccctgctggaaaataaccttgttcgttattgtccctgtgctgggcccactggtggcgctgatcatctgttataactggttacaccggcgtctggctgggcagtttctagaagagctgagaaagttctcctctttatgttataagcagcgaatcaagtcgcaagaacgagaaactgaagctactaggggaagggggggactcttgcgcgatcacatccccaggggcaaagaggagctggagtccctgggtgggggcaaaacacccccaggtagatag

SEQ ID NO: 195903 - DNA, 888 bp, synthetic construct
  misc_feature 1..888: note = Description of Artificial Sequence: Synthetic coding sequence
  source 1..888: mol_type = other DNA
atggccagcctgagccggcccagcctgcccagctgcctgtgcagctttctgttgcttcttctcctacaagtgtcctcttcgtacgctggccagttccgagtgatcggacctcggcacccgatccgggcattggttggcgacgaagtggagctgccttgtaggattagccccggaaagaacgcaactgggatggaagtgggctggtatcggcctcccttttccagagtggtgcatttgtataggaatgggaaagaccaggacggggaccaagccccagagtacagaggaagaactgagctgttgaaggacgccattggtgagggaaaggtcacgctgagaattagaaatgtaagattctctgatgagggcggattcacttgtttcttccgcgaccatagctaccaggaggaggccgctatggaactgaaagtcgaagacccgttctattgggtgagtccgggcgtgctggttctcctggccgtgttgccggtattgctgctgcagataaccgtgggccttgttttcctctgtctgcagtatcggttgagaggaaaattgcgcgctgaaattgaaaacctgcatcggacattcgacccacattttttacgggtcccttgttggaaaataactctctttgtcatagtacctgttctggggcccctggtggctcttatcatttgctataactggctgcatagacgcctggccggtcaattcctcgaagagctgcggaagttctcttccctctgttacaagcagcggattaagagtcaggaaagagagactgaagcaaccagaggaagggggggcttgctgcgcgaccatattccacgtgggaaggaagagttggagtccctggggggcgggaaaacccccccagggcgttag

SEQ ID NO: 195904 - DNA, 396 bp, synthetic construct
  misc_feature 1..396: note = Description of Artificial Sequence: Synthetic coding sequence
  source 1..396: mol_type = other DNA
atggccagcctgagccggcccagcctgcccagctgcctgtgcagcttcctgttgttgctgctccttcaggtctcaagtagctacgccgatcctttctactgggtgtcgcccggggtgctggtactgttagctgtgctaccagttctgctcctacaaatcacagtgggcctagtcttcctctgcctacagtatcgcttgcggggtaagctcagggcagagatcgagaacctccacagaacctttgacccccatttcctgagagtgccctgctggaagattactctgttcgtgatagtccctgtgctgggcccactggtcgctctcattatctgttacaactggctccacagacgccttgccggccagtttctggaagagttacgtaacccgttctag

SEQ ID NO: 195905 - DNA, 759 bp, synthetic construct
  misc_feature 1..759: note = Description of Artificial Sequence: Synthetic coding sequence
  source 1..759: mol_type = other DNA
atggccagcctgagccggcccagcctgcccagctgcctgtgcagcttcttgttgctgttgctgctgcaggtgtcgagtagctatgccgggcagttccgggttattggaccacgccaccccatacgcgccctcgtaggtgatgaggtggagcttccgtgccgcattagccccggaaaaaatgccacaggcatggaagtggggtggtaccggccgccattttcccgagtggttcacttgtatcgcaacggaaaggaccaagatggtgaccaggcaccggaataccgcggacgaactgagctcctcaaagacgccatcggagaaggcaaggtcacattgcggattcgcaatgtgcgtttcagtgatgaaggtgggttcacttgtttctttcgggatcatagttatcaggaggaggcggctatggagttgaaagtggaggatcccttctattgggtgtcacctggggtgttggtactgctggctgtcctgcctgtccttctgctccagattacggtgggattggtgtttttgtgcttgcaatacaggttgagaggcaaactgcgggcagagatcgagaacctccacaggacatttgacccccattttttgcgggttccatgttggaaaatcaccctgtttgtgatcgttcctgttctcggtccactggttgcgctgattatctgttacaactggcttcatcgccgacttgcaggccagttcctggaagagctgctcttccatttggaggctcttagcggctag

SEQ ID NO: 195906 - DNA, 744 bp, synthetic construct
  misc_feature 1..744: note = Description of Artificial Sequence: Synthetic coding sequence
  source 1..744: mol_type = other DNA
atggccagcctgagccggcccagcctgcccagctgcctgtgcagcttccttctgctcctccttttgcaggtgtctagttcatatgctggccagttccgcgtcataggtccccgccacccgattagagcactcgtcggggacgaggtagaactgccttgtcgaatttcacccggtaagaatgccaccggaatggaagtgggctggtacaggcctcccttttcacgcgtcgttcacttgtatcgcaatggcaaggatcaggacggtgaccaggcccccgaatacagaggacggaccgaacttcttaaggatgcgattggggaaggaaaggtcactcttaggattcgaaatgtgcgattttccgatgaggggggattcacgtgtttcttcagagatcactcataccaggaggaggccgcgatggaactcaaggttgaggatccattctactgggtcagtcctggtgtattggtcctgttggccgtgttacccgtgttgctgctgcagataacagtcgggttagttttcctgtgtctgcagtatcggttgaggggaaagctgagagcagaaattgagaacctgcaccgcaccttcgatccgcactttttacgggtgccttgctggaaaataaccctgtttgtgattgtgccggtcttggggcctctagttgcactgatcatctgctataactggctgcacagacgccttgctggccagtttctggaagagctccgtaatccgttctag

SEQ ID NO: 195907 - DNA, 615 bp, synthetic construct
  misc_feature 1..615: note = Description of Artificial Sequence: Synthetic coding sequence
  source 1..615: mol_type = other DNA
agcctgagccggcccagcctgcccagctgcctgtgcagcttcctgctgttgctactgctgcaagtttcatcctcctacgctggacagttccgcgtaatcggacctcgccaccctatccgtgcgttagtgggagacgaggtagagttgccctgtcggatttccccgggaaagaacgccactggtatggaagtaggttggtatcgtcctcccttcagccgagtagtgcatctttaccgtaatggaaaggatcaggacggagaccaggcccccgagtatcggggtcgaacggagctgctgaaagacgcaatcggggaggggaaagttactctccggattcgaaacgtccggttttccgacgagggggggttcacatgcttcttcagagatcactcttatcaggaggaagctgccatggagctgaaagtcgaggaccccttttactgggtcagtcctggcgttttggtgctgctagccgtactcccagtccttttgctgcaaattacagttggccttgtattcttatgcctgcaatatcggttgaggggaaaattgcgcgccgagatagaaaacctccaccgcacttttgtgtttcacctcgaggcacttagcggttag

SEQ ID NO: 195908 - DNA, 888 bp, synthetic construct
  misc_feature 1..888: note = Description of Artificial Sequence: Synthetic coding sequence
  source 1..888: mol_type = other DNA
atggccagcctgagccggcccagcctgcccagctgcctgtgcagcttcttactcttattattgcttcaggtgagctcaagctatgccggacaatttcgcgtcatcggaccgcgtcatccgatcagagctttagtgggagatgaggtggaactgccgtgtcgaattagccccggcaaaaatgccaccggcatggaggtggggtggtataggccacctttcagcagggttgtccacctttacaggaacggaaaggatcaggacggggatcaagcacccgagtaccgaggccgaaccgaactgcttaaggatgcgatcggcgagggaaaggtgacactccgcatccgcaatgtgcgtttctcagatgagggcggctttacgtgtttcttccgcgatcatagctatcaagaggaggctgccatggaacttaaagtagaggatccgttctattgggtctcccccggcgtgctagtgctgctggcggtgcttccagttctgctcctccagatcactttgggtctggtatttctctgcctgcagtatcgtctgcgcggcaagctgagggccgaaattgagaacctacaccggactttcgatcctcactttcttcgggtgccctgctggaagattacgttgtttgtgatcgtccctgtgctggggccactcgtagctctgatcatctgttacaattggctgcatcgcaggctggctggccagttcctggaggagttgcgtaaattttctagtctctgttataaacaaaggattaaatctcaggagcgggaaacagaggcaactcgaggccggggagggttgctgcgcgatcatatccctagagggaaagaggagctcgagagtctggggggagggaagactccacctggaagatag

SEQ ID NO: 195909 - DNA, 690 bp, synthetic construct
  misc_feature 1..690: note = Description of Artificial Sequence: Synthetic coding sequence
  source 1..690: mol_type = other DNA
atggccagcctgagccggcccagcctgcccagctgcctgtgcagcttcctgctgctgctcctgctgcaggtctctagctcctacgctggccagttccgcgttatcggaccacgccacccaatccgcgcactagttggcgacgaagtggaactgccttgcagaataagccctggcaagaacgccacaggtatggaggtcggctggtatcgacctccttttagcagagtcgtgcatctgtacagaaatgggaaagaccaagatggcgatcaggcccccgagtacagaggtcgcactgagctgctcaaggacgcgattggcgagggcaaagtgactctaaggattaggaatgttaggttttccgacgaaggcgggtttacttgtttcttccgggaccattcatatcaggaagaggcagcgatggaactaaaagttgaagatcctttctactgggtatcccctggcgtactcgtcctgctcgcagtcttgcccgtgctactgttacagatcactgttggtctggtctttttatgcctccagtatcggctgagaggaaagctacgcgccgagattgaaaatctacataggaccttcgagtcttttggagtgttagggcctcaggtaaaagaacccaagaagaccggccaatttctcgaagagctgctgttccacctggaggccctgtcgggctag

SEQ ID NO: 195910 - DNA, 396 bp, synthetic construct
  misc_feature 1..396: note = Description of Artificial Sequence: Synthetic coding sequence
  source 1..396: mol_type = other DNA
atggccagcctgagccggcccagcctgcccagctgcctgtgcagcttcctgctgcttcttctgttgcaggtcagttcttcatacgctgaccccttttattgggtgtctccaggggtgcttgtgctgctggcagtcctcccagtgctgctgctccagatcaccgtgggcctggtctttctgtgtctgcagtatcgcctgagaggaaagttgcgagcagagattgagaatctgcaccgcacctttgatcctcactttttgagagtgccatgctggaaaatcactctattcgtgattgtgcctgttctgggacctctggtggcactcattatttgctacaactggctccaccgaagactcgcaggccagttcctcgaggagctgcggaacccattctag

SEQ ID NO: 195911 - DNA, 540 bp, synthetic construct
  misc_feature 1..540: note = Description of Artificial Sequence: Synthetic coding sequence
  source 1..540: mol_type = other DNA
tgacagttccgggtgatcggcccccggcaccccatccgggccctggtgggagatgaggtggaactgccttgtagaatcagtcccggcaagaacgccacagggatggaagtgggatggtataggccacctttctccagggtcgtccatctttatcgcaacggaaaggatcaggacggcgatcaggctcccgagtatcgcgggcgcacagaactcctcaaggacgctattggcgagggtaaggtcacgctgcgcatcagaaatgtcagattctctgatgagggtggttttacctgcttctttcgagaccacagttatcaggaagaagctgctatggagctcaaggtagaggacccattctactgggtctcaccgggtgtcctggtgctgctggcagtgttacccgtactgctactgcagattacccttggtttagtgttcctgtgcttacagtacagacttagaggcaagctgagggccgaaatcgagaacctccatcgaacattcggacagtttctggaagagctgcgcaaccctttctag

SEQ ID NO: 195912 - DNA, 627 bp, synthetic construct
  misc_feature 1..627: note = Description of Artificial Sequence: Synthetic coding sequence
  source 1..627: mol_type = other DNA
atggccagcctgagccggcccagcctgcccagctgcctgtgcagctttcttctgctgttactactgcaggttagctcttcctacgctggtcagtttagagttatcggtcctcggcatcctatcagagccctggtaggcgacgaggtggaactcccatgcaggatcagtccagggaaaaatgccactggaatggaggtgggctggtacaggcccccgttctcccgcgttgtacatctgtatagaaatgggaaggatcaggacggcgatcaggcccctgaatacaggggtcgtacagagctgttgaaagacgccatcggggagggaaaggttaccctccgcatacggaacgtgcgtttttctgatgaaggggggttcacctgcttctttcgcgaccatagctaccaagaagaagctgcaatggaactgaaggttgaggatccattctattgggtctcccccggagtgctggtcctgcttgccgtgctgcccgtcctgcttctccagatcaccgtaggactcatctttctgtgcttacagtaccggctgcggggcaagcttagagccgaaatagagaatctgcacagaactttcggccagttcctcgaggagctcaggaatcctttctag

SEQ ID NO: 195913 - DNA, 744 bp, synthetic construct
  misc_feature 1..744: note = Description of Artificial Sequence: Synthetic coding sequence
  source 1..744: mol_type = other DNA
atggccagcctgagccggcccagcctgcccagctgcctgtgcagcttcctgcttttactcttgcttcaggtatcctcgtcatatgccggtcagtttagagtgatcggtccacgccatccaatccgcgctttagtgggcgatgaagtcgaactgccctgtagaatatctcccggcaagaacgccactggaatggaggtcggctggtaccgcccacctttctctcgggttgtccatctctatcgtaacggcaaagatcaggatggcgaccaggcgccagaatatcgaggacgaacagaattgcttaaggacgccatcggagagggtaaagtgactctgcgcatacggaacgtgagattctctgatgaaggggggttcacgtgtttctttcgagaccattcttatcaggaggaagcagccatggagctcaaggtggaggatccattctactgggtgagccccggcgttctggtcctgctggctgtgctacccgtccttctcctacagatcacggtgggactggtgttcctgtgtctccagtataggctcagaggaaaattgagagccgaaatcgaaaacttacacaggacatttgacccacacttcctccgcgtgccttgttggaaaatcacactttttgtcatagttcctgtgctggggccactggttgcccttatcatctgttataattggctgcaccgccgtcttgccggtcagtttctggaggaactgaggaatccattttag

SEQ ID NO: 195914 - DNA, 396 bp, synthetic construct
  misc_feature 1..396: note = Description of Artificial Sequence: Synthetic coding sequence
  source 1..396: mol_type = other DNA
atggccagcctgagccggcccagcctgcccagctgcctgtgcagcttccttctgctgctgctgctgcaggtgtcatctagttacgccgacccattctactgggtgagtccgggcgtgctcgttctgctggctgtgcttccggtcttgctgttacaaattacagtcggcctggtgttcttgtgtctccagtaccgtctgaggggaaagttacgggctgagatcgaaaacctacatcgaacattcgacccacacttcctaagggtaccatgttggaagataacactgtttgtcattgtgcctgtgctgggacccctagtggcgctcatcatttgttacaactggttacacagacggctggcagggcagttcctggaggaattgaggaatcccttttag

SEQ ID NO: 195915 - DNA, 642 bp, synthetic construct
  misc_feature 1..642: note = Description of Artificial Sequence: Synthetic coding sequence
  source 1..642: mol_type = other DNA
atggccagcctgagccggcccagcctgcccagctgcctgtgcagcttccttctcctgctcttactgcaggtgagctcctcatatgcagggcagttccgggtcattggcccccgtcatcccattcgcgcccttgtgggcgacgaagtcgagctcccctgtagaatatcacctggcaagaatgccactggaatggaggtgggatggtacaggccacctttcagccgtgtcgtgcatctctataggaatggaaaagatcaggacggagatcaggcaccagaataccgaggtcgcaccgagttgctgaaggatgcgataggcgagggcaaagttactctacggatacgcaacgtgcgcttctcagacgagggtgggtttacttgtttttttcgagaccattcatatcaggaagaagcagctatggaactgaaggttgaagatcccttttactgggtcagccccggtgtgctggttcttctggcagtgctgcccgttctgctcctgcagatcacagtcggactcgtttttttgtgtctgcagtataggttgcgcggcaaattacgagcagagattgaaaatctgcacagaacttttggccaattcttagaggagctgctgtttcacctagaggctctgtccggatag

SEQ ID NO: 195916 - DNA, 615 bp, synthetic construct
  misc_feature 1..615: note = Description of Artificial Sequence: Synthetic coding sequence
  source 1..615: mol_type = other DNA
agcctgagccggcccagcctgcccagctgcctgtgcagcttcctgctgctgctgcttctccaggtttcatcatcctacgctggccagtttcgcgttatcggcccccggcatcccatccgagctctggtcggggacgaggttgagctgccatgccgcatcagtccagggaagaacgcaacggggatggaggtgggttggtaccggcccccctttagtagagtggttcatctgtacaggaatggcaaggaccaagatggtgatcaggccccagagtacagaggtcggacagaactcctgaaggatgctatcggggaggggaaagtcacactgcgtatccggaatgtcagattttccgacgaggggggcttcacctgttttttcagggaccactcttaccaggaagaagctgctatggaactgaaggttgaggatccgttttattgggtgtccccaggcgtgctcgtcctgttggctgtgctgcctgtactcttactacagattacccttggcttggtctttctctgtctgcagtacaggctgcgcggcaaactccgagccgagatagaaaatttgcacagaacgtttgtgtttcatcttgaggccctgtcaggatag

SEQ ID NO: 195917 - DNA, 675 bp, synthetic construct
  misc_feature 1..675: note = Description of Artificial Sequence: Synthetic coding sequence
  source 1..675: mol_type = other DNA
atggccagcctgagccggcccagcctgcccagctgcctgtgcagcttcctgcttttgttactccttcaggtctcaagttcctatgcgggacagtttagggttatcggcccccgacaccccattcgggcactcgttggcgatgaggtggagctgccatgccggatttcccctgggaaaaacgccactggaatggaggtggggtggtatcgcccccccttttctagagttgtgcacttgtatcgtaatgggaaggaccaagacggggaccaggcccccgaataccgggggagaactgaactgttgaaggatgctattggcgaaggaaaggtcacccttcgaatccgaaacgttcggttctcagacgaagggggattcacgtgctttttcagagaccattcctaccaagaggaggcagctatggagctgaaagtcgaagatcccttttactgggttagtcccggggttctggtcctgctggcagtactgcccgtcttgctgctgcagatcacagtaggactggtttttctttgtctgcagtacaggctgcggggaaaactgcgcgctgaaatagagaatctgcatagaactttcgaatccttcggggtactcggaccccaggtgaaagagcctaagaagacagggcaattcctcgaggaactgcggaatcctttctag

SEQ ID NO: 195918 - DNA, 690 bp, synthetic construct
  misc_feature 1..690: note = Description of Artificial Sequence: Synthetic coding sequence
  source 1..690: mol_type = other DNA
atggccagcctgagccggcccagcctgcccagctgcctgtgcagctttctgctccttctcctccttcaggtgtcttcctcatacgcagggcagttcagggtcatcggaccccgccacccaatcagggccctggtaggagatgaggtggaacttccctgtaggatatctccagggaagaatgcaaccggaatggaagtaggctggtacaggcctcccttctcacgcgtggtccacctgtacagaaatggcaaggatcaagatggcgaccaggcccccgagtatcgagggagaacagagcttctgaaggatgcgatcggggaggggaaggtaaccctgcgaataaggaacgtcaggttctccgatgagggcggcttcacctgtttttttcgcgatcactcgtatcaggaggaggcagcaatggagctgaaggttgaagatcctttctattgggttagcccaggcgtgctggtgctgctggcagtgctccccgtcctgctattgcagatcaccgtcgggctcgtttttttatgcttgcagtatcgtttgcgtgggaaactgcgcgctgaaatcgagaacctgcatcgtacgtttgaaagcttcggggtgcttggcccacaagtcaaagaaccgaagaaaaccgggcagtttcttgaagaacttctttttcacttggaggcgctgagcggctag

SEQ ID NO: 195919 - DNA, 888 bp, synthetic construct
  misc_feature 1..888: note = Description of Artificial Sequence: Synthetic coding sequence
  source 1..888: mol_type = other DNA
atggccagcctgagccggcccagcctgcccagctgcctgtgcagctttttgctgctgctgctgcttcaggtgtcatcttcttacgccggccagtttcgtgtgatcggtccgaggcatccgatacgggccctggtgggtgatgaggttgaactgccttgcagaatatctccaggcaaaaacgcgaccgggatggaagtgggatggtatcgtcctccttttagcagggtagtccatctttacaggaacggtaaagatcaagatggtgaccaggccccagagtaccgtgggcgtactgagctgctcaaagacgctatcggcgaaggcaaggtgaccctgcgcatcagaaacgtcaggtttagcgatgaaggaggttttacctgcttcttccgggaccacagctatcaggaagaggccgcaatggaattgaaggtggaagacccattttactgggtatccccgggagtacttgtgctgctggctgtgctcccagtactgttactgcagatcacggtcggactcgtgtttctctgcctgcagtacagacttcggggaaaactgcgtgccgagatcgaaaatctgcaccggacattcgatccccatttcctgcgggttccttgttggaaaattacactctttgtgattgtgccggtcctgggacccctggtagctttaattatctgttacaactggctgcataggaggttagctggtcagtttctggaggagctgcggaagttctcctcattgtgctataaacagaggattaagtctcaggaacgggagacagaagccacccgcggccgcggcggcttactgagggatcatatccctcgggggaaggaagaactggagtctctgggaggaggaaaaacccctccaggccgctag

SEQ ID NO: 195920 - DNA, 540 bp, synthetic construct
  misc_feature 1..540: note = Description of Artificial Sequence: Synthetic coding sequence
  source 1..540: mol_type = other DNA
tgacagttccgggtgatcggcccccggcaccccatccgggccctggtaggggacgaagttgaactcccttgccgcatcagcccaggcaagaatgctaccgggatggaggtgggctggtacaggcctcctttcagccgcgtggtgcacctttatagaaatggaaaagatcaggacggcgaccaagctcccgaataccgtggaagaacagaactgctgaaggatgcgataggcgaagggaaggtcactttaaggatccgtaacgtccgcttcagtgacgagggaggattcacttgtttcttccgcgatcattcttaccaggaagaagcagcgatggagcttaaagtggaggaccccttttactgggtgtctcctggagtgctcgtcctgcttgccgtgctgccagtcctgctgctgcagatcactgtgggattagtcttcctgtgtttacagtatcggctgcgtggaaagctccgggcggaaatcgaaaatttgcaccggacttttggacagttcctcgaggagctccgaaatcccttttag

SEQ ID NO: 195921 - DNA, 642 bp, synthetic construct
  misc_feature 1..642: note = Description of Artificial Sequence: Synthetic coding sequence
  source 1..642: mol_type = other DNA
atggccagcctgagccggcccagcctgcccagctgcctgtgcagctttttgctcttgctactgttgcaggttagttcttcatacgcgggacagttccgggtgatcgggcccagacatccaattcgagctcttgtaggagacgaggtggaacttccatgcaggatttcccctggaaaaaacgcaacagggatggaagtggggtggtataggcctccatttagtcgagtcgtgcacctctacagaaatggaaaagatcaggacggcgatcaggccccagagtatagaggcaggacagagctgttgaaagacgctatcggcgagggaaaagtcaccttacgcattcggaacgtgaggttcagcgatgaaggcggcttcacgtgtttttttcgagatcactcctaccaggaggaggccgcgatggagctcaaagtggaggatcccttttactgggtgtcccctggagtactcgtccttttggccgtacttcccgtgctccttctgcagattaccgtgggcctagtgtttctgtgtctgcagtaccggttgcggggaaagctgagagctgaaatcgaaaatctccacagaaccttcggccagttccttgaggagttgcttttccatcttgaagcgctttcaggctag

SEQ ID NO: 195922 - DNA, 759 bp, synthetic construct
  misc_feature 1..759: note = Description of Artificial Sequence: Synthetic coding sequence
  source 1..759: mol_type = other DNA
atggccagcctgagccggcccagcctgcccagctgcctgtgcagctttttattgttactgcttctgcaggtatcctcctcatatgcgggccaatttagagtgatcgggccgagacaccctattagagccctggttggagacgaggtggagctgccttgccggatatcaccaggcaaaaacgccactggcatggaggtaggctggtatagaccacctttctcacgtgtggtgcacctgtatagaaatgggaaagaccaggatggagaccaggcccccgagtaccgtggtcgaactgagctcctgaaggacgctataggtgaaggaaaagtgaccctacgtatcaggaacgtcagattcagcgatgaaggaggtttcacttgtttttttcgcgaccacagctaccaggaagaggctgcgatggaactcaaggtcgaggaccccttctattgggtgagcccgggcgttttggttctcctagctgtattgcctgtgctgctgctgcagatcacagtaggtctggtttttctgtgcctccagtataggctccgagggaaacttagggccgaaatcgaaaatctgcacagaacttttgatccccactttctgagagtcccatgttggaagatcaccttgtttgttatcgtgcctgtcctaggaccgctggtggccctgatcatctgctacaattggctgcatagacgcctggcaggccagtttctcgaagagttgctctttcatctggaagcactctcaggctag

SEQ ID NO: 195923 - DNA, 642 bp, synthetic construct
  misc_feature 1..642: note = Description of Artificial Sequence: Synthetic coding sequence
  source 1..642: mol_type = other DNA
atggccagcctgagccggcccagcctgcccagctgcctgtgcagcttcctgctgctgctactgctgcaggtctctagctcgtacgcgggacaatttcgtgtgattgggccacgacaccccattagagcccttgtgggggatgaggtggaactgccttgtaggatcagtcccggcaaaaacgcgaccggcatggaagttggatggtaccgacctcccttctcccgggtggtgcacctgtatcgaaacggtaaggaccaggacggtgaccaggcccctgaataccgtggcaggactgagcttctaaaggacgccattggcgaaggaaaggttaccctgcgaatcagaaatgtgagattctctgatgagggcggctttacatgtttttttagagaccactcttaccaggaagaggccgctatggagctcaaagtggaggaccctttttattgggtgtcccccggagtgctagtgctacttgccgtgctgccagtgctattgcttcagatcaccgttgggctagtgtttctctgcttgcaatataggctccggggcaagctcagagccgaaatcgaaaacctccaccgaacattcgggcagttcctggaagaactgctgtttcatcttgaagctctgagcggctag

SEQ ID NO: 195924 - DNA, 675 bp, synthetic construct
  misc_feature 1..675: note = Description of Artificial Sequence: Synthetic coding sequence
  source 1..675: mol_type = other DNA
atggccagcctgagccggcccagcctgcccagctgcctgtgcagcttcctgctgctgctgctgcttcaagtgagtagctcatatgctgggcagtttagggtgattgggccccggcatccgatccgagccctcgtgggcgacgaggtggaactaccatgccgaatatctccgggaaagaatgctaccggaatggaggtgggttggtataggcccccgttcagtagagtcgtgcatctgtatagaaacggaaaagaccaggatggagaccaagcacctgagtaccgaggccgcacagagttactgaaggatgcaatcggagaaggtaaagtcaccctccgtattagaaatgtaagattctctgatgagggaggatttacctgcttttttagagatcactcctaccaggaggaggccgccatggagctgaaagtcgaagaccctttttactgggtcagccccggcgtactggtcttgctggctgttttgccagtactcttattacagattaccgtaggtctggtttttttatgtctgcagtataggttgaggggtaagctgagggccgagatcgagaatctccaccgaaccttcgaatccttcggggtgttggggccccaggtgaaggagccgaagaagactggccagttcctggaggaacttcggaaccccttttag

SEQ ID NO: 195925 - DNA, 615 bp, synthetic construct
  misc_feature 1..615: note = Description of Artificial Sequence: Synthetic coding sequence
  source 1..615: mol_type = other DNA
agcctgagccggcccagcctgcccagctgcctgtgcagcttcctgctcttactcttgctccaagtcagcagctcttatgctggacaatttagggtcatcgggcccagacatcccatccgggcactggtcggagacgaggtagagctgccctgtaggatctctccaggtaagaatgccactggcatggaagttgggtggtatcggccaccgttcagtcgggtcgtgcacctatatcggaacggcaaggaccaggacggtgaccaagcacccgagtaccgaggacggactgagctcctcaaggacgctataggagaggggaaggttaccctgaggatcagaaatgtgcggttttccgatgaaggcgggttcacctgcttctttagggatcacagttaccaagaggaggctgcgatggagcttaaagtggaggatcctttctattgggtgtcgcctggcgtgctggtgctcctcgccgtattgccagtgctgctgctgcagatcaccgttgggttggtgttcctatgcttgcagtacagactccgggggaaattaagagctgaaatcgagaacctgcaccggacatttgtatttcatttggaggccttaagcggctag

SEQ ID NO: 195926 - DNA, 675 bp, synthetic construct
  misc_feature 1..675: note = Description of Artificial Sequence: Synthetic coding sequence
  source 1..675: mol_type = other DNA
atggccagcctgagccggcccagcctgcccagctgcctgtgcagctttttactgttactgctgctgcaggtatcatcttcatacgctgggcagtttcgcgtcatcggtccacggcatccaattcgggcccttgtcggcgatgaggtggagttaccatgccgaatctcgccgggtaagaatgcgacagggatggaagtaggatggtaccggccaccattctcacgcgtggtccacctgtatcgaaatggaaaagaccaggatggtgaccaggcacccgagtataggggccgcacggagctgttaaaggacgccattggcgagggaaaggttactctgaggatccgaaacgtcagattttccgacgaaggcggattcacttgttttttcagagaccactcttaccaggaggaagccgctatggagctgaaagtcgaggatccattttactgggtgagcccgggagtgctagttctgcttgccgttttgcccgtgctgctgctgcagattacggtcgggctggtgtttctatgcctccagtaccggttgcggggtaaactgcgcgccgaaatagaaaatctgcaccgcacattcgagtcattcggggtgctgggcccgcaagtaaaggaaccaaagaagactggccaattcctggaggaactgcgtaaccctttctag

SEQ ID NO: 195927 - DNA, 759 bp, synthetic construct
  misc_feature 1..759: note = Description of Artificial Sequence: Synthetic coding sequence
  source 1..759: mol_type = other DNA
atggccagcctgagccggcccagcctgcccagctgcctgtgcagcttcctgctcctgctgctgctgcaggtcagctcttcatatgcaggacagtttcgagtgatcggccctagacatcccatccgcgccctcgtgggggacgaagtggaactgccttgccgcatatcccccggaaaaaatgctaccggaatggaggtgggatggtatcggccaccattttcacgcgtggttcacttgtacaggaacggcaaagaccaggacggtgaccaggcccctgagtaccggggacggacggagctgctcaaagatgcgataggagaggggaaggtcacactgcgaatccggaatgtgagattcagtgatgagggagggtttacgtgctttttccgggatcacagctatcaggaagaggcggcaatggaactgaaagtggaggatcctttttactgggtgagcccaggtgtcttggtactcctagccgtgttgcctgtcctgctccttcagatcactgtagggttagtcttcctctgcttgcagtataggctcaggggcaaactaagagccgaaattgaaaacctacatagaaccttcgatccgcattttcttcgagtcccctgctggaagattacccttttcgttatcgtgcccgtgctgggccctctggttgcactgattatctgctataactggttgcacaggaggctggccgggcaattcctggaagaactcttgtttcacctagaggcactgtccggatag

SEQ ID NO: 195928 - DNA, 744 bp, synthetic construct
  misc_feature 1..744: note = Description of Artificial Sequence: Synthetic coding sequence
  source 1..744: mol_type = other DNA
atggccagcctgagccggcccagcctgcccagctgcctgtgcagcttcttgttgctcctgctcctgcaggtgtcttccagttacgctgggcagttccgagttattggcccgcggcaccccatccgcgcactcgtcggagacgaagtggaattgccatgtcgaattagccccggcaaaaacgctaccggcatggaggttggatggtaccgcccacctttttctagggtggtccacctgtatcgaaacgggaaagatcaggacggtgaccaggcccccgagtatcgcggtagaaccgagctcctgaaagatgccatcggggagggcaaggtgacactgcgcatccgcaacgtgcgcttttcagacgaagggggcttcacatgcttcttccgcgaccactcctatcaagaagaggctgccatggaactcaaggtagaagaccctttttattgggtctcacccggagtgttggtgctgctggccgtgcttccagtgctgttgttgcaaatcacggtaggcctagtatttctgtgcctccagtaccgcttacgagggaaactacgggcggaaattgaaaacttgcataggacattcgatcctcatttcctgagagtgccctgctggaagataaccctttttgtcatcgttccagtgctcggacccctcgtggcactgattatttgttacaactggttgcacaggcgcctggcagggcaatttctggaggaactcaggaatccattctag

SEQ ID NO: 195929 - DNA, 615 bp, synthetic construct
  misc_feature 1..615: note = Description of Artificial Sequence: Synthetic coding sequence
  source 1..615: mol_type = other DNA
agcctgagccggcccagcctgcccagctgcctgtgcagcttcctgcttttgctgctgctgcaggtgtcgagcagctacgcgggccagtttagggtgatagggccgaggcatcctattagggccttggtgggagacgaggtcgagctgccgtgtaggatttcacctggcaaaaatgcaacgggaatggaggtgggttggtaccgtccaccattcagccgagtagttcacctctatcgaaatggaaaggatcaggacggcgaccaggcccccgaatatagaggtcgtactgagctactgaaggacgctattggtgaggggaaagtcaccctcagaattaggaatgtgcgtttttctgacgagggcggatttacctgtttctttcgggaccacagctatcaggaagaggccgcaatggagctcaaagttgaagaccccttttattgggtgtcccccggggtcctagtgctacttgccgtgttgcctgtactgctcctgcagattactgtgggcttggtgttcctgtgcctgcagtaccgcctaaggggcaaattaagagcagagatcgaaaatttacaccgcaccttcgtattccatttagaggccctgagtggatag

SEQ ID NO: 195930 - DNA, 888 bp, synthetic construct
  misc_feature 1..888: note = Description of Artificial Sequence: Synthetic coding sequence
  source 1..888: mol_type = other DNA
atggccagcctgagccggcccagcctgcccagctgcctgtgcagctttttattattgctgcttctccaagtctcctctagctatgctggacagttcagggtcattggcccccggcatcccatacgtgccctagtaggcgatgaagtcgagctcccttgcaggatctcccctggaaagaacgccaccggcatggaggtcggctggtaccgtccaccctttagtagggttgtccacttatacagaaatggaaaagaccaggatggcgaccaggcccccgaatacaggggccgcacagagctgctaaaagacgcaatcggtgaagggaaagtgaccctgagaatcagaaacgtgagattttctgatgagggtggatttacctgcttctttagggatcactcctaccaagaagaagccgcgatggaactgaaagtggaagatcctttttactgggtgagccccggagttctggtgctgcttgctgtcctgccagtgctcttactgcaaattacggtgggattggtgtttctgtgcctgcaataccggcttcggggtaagctccgtgccgagatcgagaacctacaccgcaccttcgacccccatttcctgagggtgccatgctggaaaattactcttttcgttatcgtaccggtactgggcccattagttgcccttataatctgttacaactggctgcaccggcgtctggccggtcaatttttggaagaattacggaaattctctagcctttgctacaaacagcgcatcaagtctcaggaacgcgagacggaggctacacgtggaaggggcggcctccttagagaccatatcccacgcggcaaggaggagctggagtctttggggggcggaaagactcccccaggaaggtag

SEQ ID NO: 195931 - DNA, 759 bp, synthetic construct
  misc_feature 1..759: note = Description of Artificial Sequence: Synthetic coding sequence
  source 1..759: mol_type = other DNA
atggccagcctgagccggcccagcctgcccagctgcctgtgcagcttcctcttgctactacttctccaggtatcttcctcctatgccggccagtttcgagtgattgggccacggcatcccattcgcgccctggtgggggacgaagttgaactgccttgtagaattagcccaggaaaaaacgcgactgggatggaagtggggtggtaccggccacccttctccagagtcgtacatctgtaccggaatggtaaggaccaagacggagatcaggcacctgaatacagagggaggaccgaattactgaaggatgctattggagaaggcaaagtgactctgaggattaggaacgtccggttcagtgatgaggggggatttacttgcttcttccgagaccacagctaccaggaggaagcagccatggaactcaaagtagaagaccccttttattgggtgtctccaggcgtgctggtgttacttgcagtgttgccagtactcctcttgcaaatcacactgggcctcgtgtttctctgcctccaataccgactgcgtggtaagctccgagccgagattgaaaacttacacagaacttttgatccccacttcctgcgcgttccatgttggaaaatcaccctattcgttatcgtccctgtcctggggcctctggtagccctgattatttgttataattggctccataggcgtttggctggccagttcttagaggagctgttgtttcacctcgaggcactgtccgggtag

SEQ ID NO: 195932 - DNA, 540 bp, synthetic construct
  misc_feature 1..540: note = Description of Artificial Sequence: Synthetic coding sequence
  source 1..540: mol_type = other DNA
tgacagttccgggtgatcggcccccggcaccccatccgggccctggtaggcgacgaagtggagttgccttgtcgcatctcacccggaaagaatgccacaggaatggaagttgggtggtatcgaccccccttttctcgggtcgtgcatctgtacaggaatggtaaggatcaggacggcgaccaggcacctgagtacaggggccgcacagagctcctcaaagacgccattggagaaggaaaggtcacgttgagaatcaggaacgtacggttttcggacgagggcggattcacctgcttctttcgcgaccactcttaccaggaggaagccgcaatggaactgaaagttgaagatcccttttattgggtatctcctggagtgctagtgctgctcgcagtactgccagttctccttctgcaaatcaccgtcggactggtatttttgtgcctgcagtaccggttacggggaaaactcagagctgaaattgaaaatctccaccgtacatttggacaattcctcgaagagttgaggaatcccttctag

SEQ ID NO: 195933 - DNA, 396 bp, synthetic construct
  misc_feature 1..396: note = Description of Artificial Sequence: Synthetic coding sequence
  source 1..396: mol_type = other DNA
atggccagcctgagccggcccagcctgcccagctgcctgtgcagcttcctgctgctactgctgctccaggtgagctctagttatgccgatcctttctactgggtctctcccggtgtcctggtgttacttgccgtgctcccagttcttctactgcagattacagtaggtctggtgttcctatgtctgcagtataggctccgcggaaagcttcgcgccgaaatcgaaaacctgcatcgcaccttcgatcctcacttcttgcgagtaccctgctggaagattacccttttcgtgatcgtgcctgtgctcggccccttggtggcccttattatctgttacaactggctccaccgacggcttgccggacagttcctggaagaactgcgtaaccctttctag

SEQ ID NO: 195934 - DNA, 744 bp, synthetic construct
  misc_feature 1..744: note = Description of Artificial Sequence: Synthetic coding sequence
  source 1..744: mol_type = other DNA
atggccagcctgagccggcccagcctgcccagctgcctgtgcagcttcttgctgctgctcctgttgcaggtttcttccagctatgccgggcagttccgggtgatcggtccccgacatccaatccgggcactggttggtgacgaggtcgaattgccttgtcggatctcccctgggaaaaacgcaactggaatggaggtgggatggtatagacctccctttagcagagtggtacacctctacagaaatgggaaagaccaggacggcgaccaggcccctgagtataggggaaggaccgaacttctgaaagacgccatcggcgaaggaaaggtaactttgcgaatcagaaacgttcggtttagcgacgaaggaggctttacttgtttttttagggatcacagttaccaggaagaggccgctatggaactcaaggtggaagatccattttattgggtctctcccggcgtgctcgtgttattagctgtgctgccggtgctcctccttcagattaccctcggtttagtttttctatgcctacagtaccgtcttaggggaaagctccgcgccgagatagaaaacctccacaggaccttcgatcctcactttctcagagttccgtgctggaagatcactcttttcgtgatcgtccctgtgctcgggccccttgttgccctgatcatctgctacaattggctgcaccggcgcctggctggtcaattccttgaggagctgcgaaatccattttag

SEQ ID NO: 195935 - DNA, 642 bp, synthetic construct
  misc_feature 1..642: note = Description of Artificial Sequence: Synthetic coding sequence
  source 1..642: mol_type = other DNA
atggccagcctgagccggcccagcctgcccagctgcctgtgcagctttttattgctcctgctgctgcaagtgtcaagcagctatgccggacagttccgagtcatcggcccccggcatccgatcagagcactggtaggcgatgaggtcgaactgccatgtcggatttcccctggcaagaacgcaacagggatggaggtgggttggtatagacctcccttttccagggtggttcatctctaccgtaacggaaaggaccaggacggggatcaggcccccgaatatcgaggtaggactgaactgttgaaagatgccataggagaagggaaggttaccctgaggatccggaatgtgcgcttttccgatgaaggaggcttcacttgcttctttcgtgatcacagctaccaggaggaggctgcaatggagctcaaggtggaagacccattttattgggtgtcccccggcgtgctggtgctgctcgcggtgctgccagttttattgcttcagataacgctgggcttggtgttcctgtgcctccagtaccgactgcggggtaagctccgcgccgagatcgaaaatcttcaccgcactttcggtcaattcctggaagaactgctttttcacctcgaggcccttagtggctag

SEQ ID NO: 195936 - DNA, 615 bp, synthetic construct
  misc_feature 1..615: note = Description of Artificial Sequence: Synthetic coding sequence
  source 1..615: mol_type = other DNA
agcctgagccggcccagcctgcccagctgcctgtgcagcttcctgctgttgctactgttgcaagtatcgagtagttatgccgggcagttcagggttattggcccgcggcatcccatacgggcccttgtcggggatgaggtcgagttgccatgtagaatttcgccaggaaagaacgccacagggatggaagttggctggtatcgcccccccttcagccgagtggttcacctttaccgtaacggaaaagaccaagatggcgatcaagcccctgaatatcgcggaagaacagaactcctcaaggatgcaatcggcgagggtaaggtcacactgcgaatccgtaatgtgcgcttctctgacgaaggtggattcacctgcttcttccgagatcatagttatcaggaggaggcagccatggagctgaaagttgaagaccccttttactgggtgagccccggagtgctggtgttgctggccgtgctgccagtcctgcttctccagattacagtcggcctggtttttctctgcttgcaataccggctccggggcaagctgcgcgccgaaattgagaatctccatagaactttcgttttccatctagaggccctctctgggtag

SEQ ID NO: 195937 - DNA, 690 bp, synthetic construct
  misc_feature 1..690: note = Description of Artificial Sequence: Synthetic coding sequence
  source 1..690: mol_type = other DNA
atggccagcctgagccggcccagcctgcccagctgcctgtgcagcttcctgctgctcttattactgcaagtgtcgtcttcttacgccgggcagttcagagtgatcgggccccgtcaccccatcagggccctggtcggcgacgaggtggaattaccatgtcggatctctccaggcaaaaacgctaccggaatggaggtggggtggtatcggccgccatttagccgcgtagtacatctgtatagaaatggcaaagatcaggatggggaccaggctccggagtaccgcgggcgcaccgaactactgaaagacgccatcggcgaaggaaaggttactttgagaatcagaaacgtgaggttctcagacgaaggggggttcacctgcttttttcgcgaccactcctaccaggaagaagctgccatggagcttaaagtggaggaccccttctactgggtgtccccaggagttttagtcttgctggcggttctccctgtcttgcttctgcagatcacagtcggccttgtttttttgtgcctccagtaccgcctgagaggcaaactgcgggccgaaatcgagaatctgcacaggacgtttgagagttttggcgtcttaggtccacaggtaaaggaacctaagaagaccggccagttccttgaggagctgttgttccatttggaagccttaagcggctag

SEQ ID NO: 195938 - DNA, 615 bp, synthetic construct
  misc_feature 1..615: note = Description of Artificial Sequence: Synthetic coding sequence
  source 1..615: mol_type = other DNA
agcctgagccggcccagcctgcccagctgcctgtgcagcttcctgctgctgctcctgctccaggtctccagctcgtacgcaggccagtttagagttattggccccaggcaccctatcagagcactggtgggggacgaggtggagctgccgtgtcgcatcagtcctggaaaaaacgccacaggtatggaggtagggtggtacagacccccttttagccgggtagtgcatctttacaggaacgggaaagatcaggatggtgaccaggcacctgagtaccgagggaggaccgagctccttaaagatgccattggagaggggaaggtgactctgcggattcgcaacgtgcgattttccgatgaggggggtttcacatgtttttttagagaccatagctatcaagaggaggctgccatggagctgaaagtcgaagatccattttactgggtaagtcctggagtactggtgctcctggccgtactgccggtgttactgctgcagattacagtgggcctagtgttcctgtgcttgcaataccgactgcgggggaaactgcgcgctgagattgagaacttacacaggacttttgtgttccacctagaggctctgtcaggatag

SEQ ID NO: 195939 - DNA, 690 bp, synthetic construct
  misc_feature 1..690: note = Description of Artificial Sequence: Synthetic coding sequence
  source 1..690: mol_type = other DNA
atggccagcctgagccggcccagcctgcccagctgcctgtgcagctttctcttgctgctcctgctgcaggttagttccagttacgccggtcaattccgcgtgatcgggccccggcacccaatccgggctctagtcggggacgaggtggagctgccttgccgcatcagtccaggaaagaacgctactggaatggaagtgggttggtaccgaccgcctttcagtcgggtggttcatctttatagaaacggaaaggaccaggatggggaccaagcgccagaataccggggccggacagagctcctcaaggatgccatcggcgagggcaaagtgactctgcgcatcaggaacgtccggttttctgatgagggcggcttcacatgctttttccgcgaccactcgtaccaggaagaggccgcaatggaactgaaagtggaggaccccttttactgggttagtccaggagtgcttgtgctattggccgtgctgccagtcctcttactgcagataacactgggactcgttttcctgtgtttacaatatagacttagaggtaaactccgagccgaaattgaaaacttacataggacctttgaatcttttggagtactcggcccacaggtcaaggaacctaagaagacaggccaattcctggaggagctgctatttcaccttgaggctctgagtggctag

SEQ ID NO: 195940 - DNA, 690 bp, synthetic construct
  misc_feature 1..690: note = Description of Artificial Sequence: Synthetic coding sequence
  source 1..690: mol_type = other DNA
atggccagcctgagccggcccagcctgcccagctgcctgtgcagcttcttattattgttactacttcaagtgagctccagttatgctggccagttccgcgtcatcggtccaaggcatcctattagagccctcgtaggagatgaggttgagctgccctgtcgcatctctccagggaaaaacgccacggggatggaggttggctggtatcggccaccattctctagagtggtgcacctgtacagaaatgggaaggatcaggatggcgaccaggcccctgaatacagaggccggaccgagcttctgaaggacgccattggagagggtaaagtgactctccggataagaaacgtacgattctctgatgaaggaggtttcacctgcttttttcgcgatcattcctatcaagaagaggcagctatggagctcaaggtcgaagatcccttctattgggtcagcccgggagttctggtactcctcgctgtgctccccgttttactgttacagatcactgtggggctaatttttctctgcctacagtatcggcttaggggaaagctacgcgccgagatcgagaacctgcacagaacatttgaatctttcggcgtacttgggcctcaggtaaaagaaccaaagaagacaggtcaatttcttgaggagttgttgtttcaccttgaagctcttagtggatag

SEQ ID NO: 195941 - DNA, 516 bp, synthetic construct
  misc_feature 1..516: note = Description of Artificial Sequence: Synthetic coding sequence
  source 1..516: mol_type = other DNA
atggccagcctgagccggcccagcctgcccagctgcctgtgcagctttcttctccttctgcttctgcaagtgtctagtagctacgccggccagttcagggtaatcgggcctcggcaccctatccgagccctagtcggggacgaggtagaactcccatgccgcatttctcccgggaagaatgccactggtatggaggtggggtggtacaggcctcccttctctagagtagtgcacttgtacaggaacggaaaggatcaagacggagatcaggctcccgaatatcgtgggcgaacagagttgctgaaggatgccattggcgagggtaaggttacactgcgaataagaaacgtgcgtttctctgatgagggagggttcacctgctttttccgtgaccactcatatcaggaagaggccgctatggagctcaaggtcgaggtttcccattccgttacacaggattggttacaatggcacgatcacggttcccttcagcctccgcccccaagattgaagtag

SEQ ID NO: 195942 - DNA, 534 bp, synthetic construct
  misc_feature 1..534: note = Description of Artificial Sequence: Synthetic coding sequence
  source 1..534: mol_type = other DNA
atgagccacatcagctgggaggagcggtaccggaacggcaaggaccaagacggggaccaggctccggaatataggggtcgtacagaactgcttaaggacgccatcggagagggaaaggtgacactgcgcatcaggaacgttaggttctctgacgagggcggattcacctgctttttcagagaccattcctaccaggaagaggcagcaatggagctcaaggtggaggatcccttttattgggtcagcccaggagtgctcgtccttctcgctgtgctaccggtgctgctcctccagattactgtaggtctggtcttcctgtgccttcagtaccggctgcgtggaaagctccgggccgagatagaaaatctgcatcggacattcgacccccattttttgcgagtgccttgctggaaaatcaccctgtttgtgattgtgccagtcctcggtcctttagttgctttgattatttgctacaattggttgcacagaagactggcgggccaattcctcgaggagctgcggaaccctttttag

SEQ ID NO: 195943 - DNA, 174 bp, synthetic construct
  misc_feature 1..174: note = Description of Artificial Sequence: Synthetic coding sequence
  source 1..174: mol_type = other DNA
atggccagcctgagccggcccagcctgcccagctgcctgtgcagcttcctgctactgttgttactgcaagtatcgtcctcttatgccgggctggttgcagtggctcgtagctggctcatcgcggcttccactagccaggctcaagtaattctcctgacgcagcccctcgagtag

SEQ ID NO: 195944 - DNA, 627 bp, synthetic construct
  misc_feature 1..627: note = Description of Artificial Sequence: Synthetic coding sequence
  source 1..627: mol_type = other DNA
atggccagcctgagccggcccagcctgcccagctgcctgtgcagcttcctcctgctgttgctcctacaggtcagcagtagctacgcaggacaattccgtgtgataggacctcggcaccccatcagggctctagttggtgacgaggtggagctgccatgcaggatcagcccgggaaaaaacgccacaggaatggaagtagggtggtaccgaccccctttctcaagagtcgtccatttataccgaaatggaaaggaccaggacggcgatcaggctcctgaataccgggggcggactgagttgctcaaagacgctattggagaaggcaaggtgacactgcgtattaggaacgttcggttcagtgacgaagggggcttcacctgttttttcagagatcattcctatcaagaggaagctgcaatggagttgaaggtggaggacccattttattgggtctcgcctggggtgttggttctactggccgtactgcccgtcctgttgttacaaatcactgttggtttagtgttcctgtgtctgcaatatcgcctgcgcggtaaactgcgcgctgaaatagagaacctgcatagaacatttgggcagttcctggaggagctgcggaatcctttttag

SEQ ID NO: 195945 - DNA, 516 bp, synthetic construct
  misc_feature 1..516: note = Description of Artificial Sequence: Synthetic coding sequence
  source 1..516: mol_type = other DNA
atggccagcctgagccggcccagcctgcccagctgcctgtgcagcttcctccttctgctgctgttgcaagtcagcagttcctacgctggacagtttcgtgttataggtcccagacatccaataagagctctggtgggggatgaagtcgaactgccatgtaggatttcacctgggaagaacgctacgggcatggaagttggatggtaccggccacccttctcgcgggtggtgcacctgtatcgcaacggcaaagaccaagatggggatcaagccccagaatacaggggccggaccgaactgctgaaagacgcaatcggcgaaggtaaggtgaccttaaggatccgaaacgtgcggtttagcgacgaaggcggctttacatgctttttccgcgatcactcataccaagaagaggccgctatggagctcaaggtcgaggtcagtcattccgtcacccaggactggcttcagtggcacgatcatgggagtctacagccccctcccccaaggctcaagtag

SEQ ID NO: 195946 - DNA, 516 bp, synthetic construct
  misc_feature 1..516: note = Description of Artificial Sequence: Synthetic coding sequence
  source 1..516: mol_type = other DNA
atggccagcctgagccggcccagcctgcccagctgcctgtgcagctttctactcctcctgctgctgcaggtcagttcgtcatacgctggccagtttagggtgataggccctcgacaccccattcgcgcactggtgggcgacgaggtggaattaccatgcaggatctcccccgggaagaacgctacggggatggaagtggggtggtacagaccccctttttctagggtcgtgcatctgtatcgaaatggcaaagatcaggatggagatcaggcgcccgaatacagagggagaactgagctcctgaaagatgcaatcggcgaaggaaaggtgaccctccgtattaggaacgttcggttttccgatgagggggggtttacatgttttttcagagaccattcgtaccaagaagaggccgccatggaactaaaggtagaggtcagccattccgtcacacaggactggctgcagtggcatgatcatggttctctccagcctccccctcctcgcctcaagtag

SEQ ID NO: 195947 - DNA, 621 bp, synthetic construct
  misc_feature 1..621: note = Description of Artificial Sequence: Synthetic coding sequence
  source 1..621: mol_type = other DNA
atggccagcctgagccggcccagcctgcccagctgcctgtgcagctttctgttgctgttactgctgcaggttagctcttcctacgccggacagttccgagtgatcggccccagacatccaatccgggccctcgtgggggatgaagtggaactcccttgcagaatctcccctgggaagaacgctaccggcatggaggtgggttggtaccgcccccccttttcccgcgtggtgcacctgtaccggaacggcaaggaccaggatggggatcaggccccagagtaccgcggtaggactgaattgctgaaggacgccatcggagagggcaaggttacactgcgtattcgcaatgtacgcttttcagacgagggggggttcacttgcttttttcgcgatcacagctatcaggaggaggcagccatggaattaaaggttgaagaccccttctactgggtgagtcctggggttttggttctgctggcagttttaccagtgcttctcctgcagattacagtggggctggtatttctgtgtctgcagtaccgtctacgcggtaagttgagggccgagatcgagaacctgcataggacattcgtgtttcacctcgaagcactgagcggctag

SEQ ID NO: 195948 - DNA, 627 bp, synthetic construct
  misc_feature 1..627: note = Description of Artificial Sequence: Synthetic coding sequence
  source 1..627: mol_type = other DNA
atggccagcctgagccggcccagcctgcccagctgcctgtgcagcttcttgctcttactgctccttcaggtgtcctctagttacgctggtcagtttcgggtcattgggcctagacaccccatacgggcccttgtaggggacgaggtcgaactgccgtgtaggatttctcctggtaaaaacgcgaccggcatggaagtcggctggtatcggccaccatttagcagagttgttcatctgtatcgaaatggaaaagaccaggacggggaccaagccccagagtacaggggacgcacagagctgttaaaagacgcaattggcgaaggcaaggtcaccctccgcatccggaatgtgagattttcggacgaaggtggattcacctgcttctttcgagatcactcctatcaggaggaagcggccatggagctgaaagtcgaagatcccttttactgggtgagtccgggggtattggtcttacttgctgtgttaccagtgctccttcttcagattacggtgggcctggtgttcctttgcctgcagtacaggctccggggaaagctccgcgccgagattgaaaacctgcacagaaccttcggacagtttttggaagaactcaggaacccattctag

SEQ ID NO: 195949 - DNA, 621 bp, synthetic construct
  misc_feature 1..621: note = Description of Artificial Sequence: Synthetic coding sequence
  source 1..621: mol_type = other DNA
atggccagcctgagccggcccagcctgcccagctgcctgtgcagcttcctgctgttgctgctgctccaggtcagttcctcctacgccgggcagtttcgggttattggtcctaggcacccaatcagagctttggtgggtgatgaggtggaactgccttgtcggatctcccctggaaaaaatgccaccggaatggaggtgggctggtatagaccccctttctcacgggttgttcacctttacagaaacgggaaggaccaggacggagatcaggctcccgaataccgagggaggaccgagttgctcaaagacgctataggggaaggaaaggtgactctcagaatcagaaacgttaggttcagcgacgagggaggattcacctgttttttcagggaccacagctaccaggaagaggccgccatggagctcaaggtcgaggatcctttttattgggttagtcccggtgtcttggtcctcctggccgtcctccctgttctgctgttacaaataacagtgggactggtctttctgtgcctgcagtacaggctgcgcggtaaattgagagccgaaatagagaatctccacagaacctttgtgtttcatctggaagctctttccggctag

SEQ ID NO: 195950 - DNA, 534 bp, synthetic construct
  misc_feature 1..534: note = Description of Artificial Sequence: Synthetic coding sequence
  source 1..534: mol_type = other DNA
atgagccacatcagctgggaggagcggtaccggaacggcaaggaccaggatggagatcaagctcccgagtatagggggcggaccgagctgctgaaggacgctattggggagggaaaggtcaccctgaggattcgcaatgtgcggttctccgatgaagggggctttacctgcttcttcagggaccattcctaccaggaggaagctgccatggagctgaaagtggaagaccccttctattgggtgtcccctggtgtgttggtcctcctggcggtactccctgtgttactgctgcagatcaccgtagggctcgtgtttctttgcctccagtaccgccttcgagggaagctacgtgccgaaattgagaatttacaccgtacatttgatccgcacttcctgagagtgccatgttggaagattacactcttcgtgatcgtgcctgttctgggcccgttggtagcgcttataatctgttacaattggttgcatagacgtctggccgggcaatttctagaggagcttagaaatccattctag

SEQ ID NO: 195951 - DNA, 621 bp, synthetic construct
  misc_feature 1..621: note = Description of Artificial Sequence: Synthetic coding sequence
  source 1..621: mol_type = other DNA
atggccagcctgagccggcccagcctgcccagctgcctgtgcagcttcttgctgctgctgttactgcaggtcagttcttcttacgccgggcagtttagagtgatcggacccagacaccctatacgggctctggtgggagatgaggtcgagctgccctgtagaatttctccaggaaagaatgccaccgggatggaggttgggtggtatcggcctcctttttctagagtggtccacctataccggaatggcaaagaccaagacggagatcaagcgccggaatatcggggacgaacagagcttctgaaggatgctatcggcgagggcaaggttaccctgagaattcgaaatgttcggttctcagacgaggggggctttacttgtttcttccgcgaccacagctatcaggaggaggcggccatggagctaaaggtcgaggatcctttctattgggtatcccctggagtcctggtgctgcttgccgtgctacccgttctgctactgcaaattaccgttggtcttgtctttttgtgcctgcaataccggcttagaggaaaactgcgggctgaaatcgagaacctgcacagaacctttgtattccatctggaggctctcagcggatag

SEQ ID NO: 195952 - DNA, 621 bp, synthetic construct
  misc_feature 1..621: note = Description of Artificial Sequence: Synthetic coding sequence
  source 1..621: mol_type = other DNA
atggccagcctgagccggcccagcctgcccagctgcctgtgcagcttcctgttgctcctgctgttacaggttagctccagttatgctggtcaatttagggtgatcggtccccgccatccaatacgcgctctggttggtgacgaagttgagctgccttgccggatttcgccaggcaagaatgccaccggaatggaggtgggatggtaccgacccccttttagcagggtagtgcatctttatcggaatgggaaggaccaagacggcgaccaagcgcctgagtataggggaaggacggaactgctgaaagacgccatcggcgagggaaaagtcactctaagaatccggaacgtgcggtttagcgacgagggcgggtttacgtgctttttcagggatcatagctaccaggaggaggccgcaatggagctgaaggttgaggacccattctactgggtgtcccccggggtcctggtcttattggccgttcttcctgtgttgctactacagattacggtcggtttagtatttctgtgcctgcaatacaggctgcggggtaagttgagagccgagattgagaacctgcaccgaacctttgtcttccaccttgaggccctgagtggttag

SEQ ID NO: 195953 - DNA, 534 bp, synthetic construct
  misc_feature 1..534: note = Description of Artificial Sequence: Synthetic coding sequence
  source 1..534: mol_type = other DNA
atgagccacatcagctgggaggagcggtaccggaacggcaaggaccaagacggtgatcaggctcccgaatatcgtgggagaactgaactgctcaaagacgccattggggaaggaaaagtgaccttgcgaattcgcaacgtgcggttctccgacgagggagggttcacatgcttcttccgcgatcacagttaccaggaggaagctgcaatggagttaaaagtagaagatcctttttactgggtgagccctggggtgttggtgctgctcgctgtactgcccgttcttctcctccagattactgtggggctggtctttctgtgcttgcaatacagactgagagggaagctgcgcgcagagatcgaaaacttgcaccgtacgttcgatccccactttcttcgggtcccttgttggaagatcacgctcttcgtgattgtgccagtcctcggacccttggttgcgctgatcatctgttataattggctgcacagacgcctcgccggtcagttcctggaggagctgcgtaatccattttag

SEQ ID NO: 195954 - DNA, 621 bp, synthetic construct
  misc_feature 1..621: note = Description of Artificial Sequence: Synthetic coding sequence
  source 1..621: mol_type = other DNA
atggccagcctgagccggcccagcctgcccagctgcctgtgcagctttctactgttactcttgctacaggtgtcctcatcatacgctgggcagttccgtgttatcggaccccgacatccaattcgcgccctggtcggggatgaagtcgagctcccatgccggatttcgcccgggaagaatgcaactggaatggaggtgggttggtaccggccccccttttcaagagtggtccacctgtacagaaatggcaaagaccaggacggtgaccaggcccccgagtatagaggtagaacagagcttctgaaggatgccataggtgaaggcaaagttacattgcggataagaaacgttcgcttcagtgacgagggaggctttacctgcttctttagagatcacagttaccaagaggaggctgccatggaactgaaggtcgaggacccgttctactgggtgtcaccaggcgtgctggtgctcttggccgttctcccagtgttgttgctgcagataacagtgggccttgttttcctttgtcttcaataccggctccggggcaaactgcgcgcggaaatcgagaacttgcatagaacctttgtgtttcacctggaggccctgtctgggtag

SEQ ID NO: 195955 - DNA, 174 bp, synthetic construct
  misc_feature 1..174: note = Description of Artificial Sequence: Synthetic coding sequence
  source 1..174: mol_type = other DNA
atggccagcctgagccggcccagcctgcccagctgcctgtgcagctttctgttactcctgctgctacaggtttcatcttcttacgcggggctggtggccgtggctagaagctggttgattgcagcatctacgtcccaggcccaggtcattctcctcacccagccactggagtag

SEQ ID NO: 195956 - DNA, 621 bp, synthetic construct
  misc_feature 1..621: note = Description of Artificial Sequence: Synthetic coding sequence
  source 1..621: mol_type = other DNA
atggccagcctgagccggcccagcctgcccagctgcctgtgcagcttcctcctgttgctgttgctccaagtcagtagttcatatgcaggtcagtttagggtgattgggccgcgtcatccgatccgagctctggtgggtgacgaagtcgagttaccttgcagaatttcccccgggaagaacgctacagggatggaggtgggatggtaccgcccacctttctcccgggttgtccacctttaccggaatggtaaggatcaggacggcgatcaggccccagaatacagaggacgaaccgagctcttaaaagatgcgatcggcgagggaaaggtgaccttgcggatcaggaatgtgagattctccgatgaaggcggcttcacctgttttttcagggaccacagttatcaggaggaggctgccatggagctgaaggttgaagacccgttttattgggtatctccaggcgtgctggtgctgctggccgttttgcccgtgctgctgctgcagatcacagtcggactagttttcctgtgcctgcagtatcggctacggggtaaactcagagccgagatcgaaaacttacataggaccttcgtcttccacttggaagccctttcagggtag

SEQ ID NO: 195957 - DNA, 516 bp, synthetic construct
  misc_feature 1..516: note = Description of Artificial Sequence: Synthetic coding sequence
  source 1..516: mol_type = other DNA
atggccagcctgagccggcccagcctgcccagctgcctgtgcagcttcttgctgctgcttctgcttcaggtgtcttccagttacgccggccagtttagagttattggacctagacacccaatcagggcacttgtgggggatgaagttgaactaccgtgtcggatttctccaggaaaaaacgcaacaggcatggaggttgggtggtaccgacccccattctccagagtcgtgcatctgtaccggaacggaaaggatcaggatggggatcaggctccagagtatcgaggcaggaccgaactacttaaagatgcgatcggagagggaaaagttaccctcagaattagaaatgttcgctttagtgacgagggtggcttcacctgtttttttcgggaccattcctatcaagaagaggcggcaatggagctaaaggtggaagtgtcacattctgtgacccaagactggttgcaatggcacgaccacgggtctctccagcctccccctccccggctgaaatag

SEQ ID NO: 195958 - DNA, 621 bp, synthetic construct
  misc_feature 1..621: note = Description of Artificial Sequence: Synthetic coding sequence
  source 1..621: mol_type = other DNA
atggccagcctgagccggcccagcctgcccagctgcctgtgcagctttctgctgctcctgctgttgcaggtgagctccagttatgcggggcaatttcgagttataggacccagacacccaatcagggctctcgtgggagatgaggtagagcttccctgcagaataagccctggaaaaaacgccacaggtatggaggtgggatggtataggccccccttctcccgggttgtgcatctatatcgaaacggcaaggaccaggacggggatcaagcccctgagtaccggggccggaccgaacttctgaaggacgctataggtgaaggcaaggttactctgcgcattcgcaatgtccgctttagcgatgaaggcgggttcacttgcttcttccgagatcacagttatcaggaagaagcggccatggagctaaaagttgaagaccctttttattgggtctctcctggagtcctggttctgctggccgtccttcctgtgttgctgttgcagattaccctaggcttagtgttcctgtgtcttcaatacaggctgcggggtaaattaagggcagaaatcgagaacctgcacaggacgtttgtgttccatcttgaggccctgagcgggtag

SEQ ID NO: 195959 - DNA, 516 bp, synthetic construct
  misc_feature 1..516: note = Description of Artificial Sequence: Synthetic coding sequence
  source 1..516: mol_type = other DNA
atggccagcctgagccggcccagcctgcccagctgcctgtgcagctttctcctgctgctactccttcaggtgtcgagtagctacgcgggtcaattcagggtcatcggccctcggcatcctatccgtgccctagtcggagatgaagtcgagctgccctgtcgcatctctccaggcaaaaacgccaccgggatggaagttggatggtacagacctccgttctctcgggttgtacacctatatcgcaatggcaaggatcaggacggcgaccaagcaccggagtaccggggaagaactgagctgttaaaggatgctattggagagggaaaagtcactctgaggattcggaatgtgaggttttccgatgaggggggattcacttgttttttcagggaccactcataccaggaggaggcagccatggagctgaaggtggaggtatcccactccgtgacgcaggattggcttcagtggcatgatcatgggtcactccaacctccaccaccaagattgaaatag

SEQ ID NO: 195960 - DNA, 516 bp, synthetic construct
  misc_feature 1..516: note = Description of Artificial Sequence: Synthetic coding sequence
  source 1..516: mol_type = other DNA
atggccagcctgagccggcccagcctgcccagctgcctgtgcagctttctccttctgttattgctgcaagtctcatctagctatgcaggccagtttcgagtgatcgggccgcgccatcccatccgggccctcgttggtgacgaagtggagctgccgtgccgcattagccctggaaaaaatgctaccggcatggaggtcggttggtaccgtcctccgtttagcagagtagttcacctatatcggaatggcaaagatcaggacggggatcaggctccagaatataggggaagaaccgagttgcttaaggatgccatcggtgaaggcaaggtgacgcttaggatccgaaatgtacggttcagtgacgaaggagggtttacctgcttcttcagggaccactcataccaagaagaagccgcgatggaactgaaggtcgaagtctcccactctgtgacacaggactggctacagtggcatgatcatggcagcttacagcccccgcctccccggctgaagtag

SEQ ID NO: 195961 - DNA, 627 bp, synthetic construct
  misc_feature 1..627: note = Description of Artificial Sequence: Synthetic coding sequence
  source 1..627: mol_type = other DNA
atggccagcctgagccggcccagcctgcccagctgcctgtgcagctttctgcttctgttacttctgcaggtaagcagttcctacgcgggccaattccgcgtcatagggcctcgacaccctatccgggcactggtgggcgacgaagtcgagctaccttgtcgtatttctcctggcaagaatgccacaggcatggaagttggatggtaccgcccaccattctccagagtcgtgcacctgtacagaaatggtaaggaccaggatggagatcaggcgccagaatatagaggccgcacggagctgctgaaagatgcgatcggcgaggggaaagtgactttacgtatcagaaacgtgcggttttctgatgagggcgggtttacatgtttcttccgcgaccacagttatcaggaagaggcagcaatggagcttaaggttgaggaccccttctattgggtgtcacctggggttctggtgctcctggccgtgctgccggtgctgctgctgcagatcacagtcggtttggtgtttttgtgccttcagtatcgcctgcggggcaagctccgggccgaaattgagaatcttcaccggacatttggtcagtttctagaagagttacggaaccctttctag

SEQ ID NO: 195962 - DNA, 174 bp, synthetic construct
  misc_feature 1..174: note = Description of Artificial Sequence: Synthetic coding sequence
  source 1..174: mol_type = other DNA
atggccagcctgagccggcccagcctgcccagctgcctgtgcagctttctgctgcttctgctgttacaagtaagttccagttatgcagggcttgtggccgtggcaaggagctggctcatcgctgcatccacaagccaagcccaggttattctcttgacacagcctctggaatag

SEQ ID NO: 195963 - DNA, 627 bp, synthetic construct
  misc_feature 1..627: note = Description of Artificial Sequence: Synthetic coding sequence
  source 1..627: mol_type = other DNA
atggccagcctgagccggcccagcctgcccagctgcctgtgcagcttccttctgctgctccttctgcaggtgagttcatcctacgcaggacagtttcgggttatcggaccacgacacccaatacgggctttagtaggtgatgaagtggagcttccctgtaggatctcgccgggtaaaaacgcaaccggaatggaggtggggtggtatcgaccccccttttctagagttgtgcatctctatcggaatggtaaagatcaggacggtgatcaagcgcctgagtatcgaggtcgcacggagctcttaaaggatgcaataggtgaaggaaaggtgacgttgagaattagaaatgtccgattcagcgatgaggggggcttcacttgcttcttcagggatcacagctaccaggaggaggccgctatggaactcaaggtagaggatccgttttattgggtctcccccggcgtcctcgtgttactagccgtgcttcctgtgctgctgttgcaaatcactgtgggcctggtctttctgtgcctgcaataccgcctgcggggaaaactgagggctgaaattgaaaacttgcaccgtacctttgggcaattcctggaggagctgcgtaaccccttctag

SEQ ID NO: 195964 - DNA, 174 bp, synthetic construct
  misc_feature 1..174: note = Description of Artificial Sequence: Synthetic coding sequence
  source 1..174: mol_type = other DNA
atggccagcctgagccggcccagcctgcccagctgcctgtgcagcttcctgttgctgctgctccttcaggtgtcgagctcatacgcaggattagttgctgtcgcacggagctggttgattgccgcctcaacgtctcaggcccaggtaatccttttgacccaacctcttgaatag

SEQ ID NO: 195965 - DNA, 534 bp, synthetic construct
  misc_feature 1..534: note = Description of Artificial Sequence: Synthetic coding sequence
  source 1..534: mol_type = other DNA
atgagccacatcagctgggaggagcggtaccggaacggcaaggaccaggacggtgatcaggctcctgaatataggggccgcactgaactcctgaaggacgccataggagagggcaaggtgactctcagaatccggaacgtacggttttctgatgaaggcggatttacgtgtttcttcagggaccactcttaccaagaagaggcagccatggagttgaaagtcgaggatcctttttactgggtgagcccaggggtgctggtccttttagcagtgctacccgtgctcctgcttcaaatcactgttggactagtcttcttgtgtctccagtataggctgagaggcaagctccgggcggaaatcgaaaacctccacaggacgttcgacccccatttcctccgggtaccgtgttggaaaatcacgctctttgtcatcgtgcctgtccttggcccactcgttgcccttattatctgctacaattggcttcaccgcagattggcaggccagtttttggaggagctgaggaatccattttag

SEQ ID NO: 195966 - DNA, 516 bp, synthetic construct
  misc_feature 1..516: note = Description of Artificial Sequence: Synthetic coding sequence
  source 1..516: mol_type = other DNA
atggccagcctgagccggcccagcctgcccagctgcctgtgcagcttcctgctgctgctgttgctgcaagtctcttcgtcgtacgccggacaatttcgggttatcggaccccgccaccccattcgggccctggtgggagacgaggtcgagctcccctgcaggatttccccagggaagaacgctactggcatggaggtgggatggtatagaccaccatttagccgggtggtgcatttatatcgcaatggcaaagatcaggacggtgaccaagccccagagtacagaggtcgaacagaacttctgaaggatgccatcggcgagggcaaggttactctgcgtataagaaatgttcggttctctgatgaaggcggcttcacttgcttttttcgagaccattcctatcaagaagaagcagctatggaattgaaggtggaggtgtcccactctgtgacccaggactggctgcagtggcatgatcacgggagtctgcaaccacccccccctaggctcaagtag

SEQ ID NO: 195967 - DNA, 534 bp, synthetic construct
  misc_feature 1..534: note = Description of Artificial Sequence: Synthetic coding sequence
  source 1..534: mol_type = other DNA
atgagccacatcagctgggaggagcggtaccggaacggcaaggaccaagacggagaccaggcacccgaatatcgtggaagaacagagctgcttaaagatgcaatcggggagggaaaagtgactctgcgcatcagaaatgtacgattcagcgatgagggaggatttacttgttttttcagggaccacagctaccaggaggaggcggccatggagctcaaggtggaagaccctttctattgggtatctcccggtgtgctcgttctgctggccgtattgcctgttctcctgctgcagataacactgggattggttttcctttgtctacagtatcggctaagaggaaaattacgggcagaaattgaaaacctgcatcggacctttgacccccacttcttacgtgttccttgttggaagatcaccctctttgtgattgtccctgtcctggggcccctggttgcactgattatctgctacaattggctgcaccggaggttagctggccagttcctggaggaactccgtaatccattctag

SEQ ID NO: 195968 - DNA, 627 bp, synthetic construct
  misc_feature 1..627: note = Description of Artificial Sequence: Synthetic coding sequence
  source 1..627: mol_type = other DNA
atggccagcctgagccggcccagcctgcccagctgcctgtgcagcttcttgttactcctgcttctccaggtttcttcatcctacgccggccagttcagggttattggaccaagacaccccatccgggccttggtgggggatgaggtggaactgccttgccgcatctctccaggcaaaaacgcaaccggaatggaagtggggtggtacagaccccccttctctcgggtcgttcacctgtatcgtaacggaaaagatcaggatggcgaccaggcgcctgagtatcgcggaagaacagaattgctgaaagacgctatcggtgaagggaaggtgaccctgcggatcagaaatgtccggtttagtgacgagggaggctttacatgtttttttagagaccatagttatcaggaagaagcagccatggaactaaaggtggaggatcctttttactgggtgtcacccggtgttcttgtcctgctcgcggtgctgcctgtcctgctgttacagattaccgtaggcctggtcttcctctgtttgcagtatagacttcggggaaaattgcgggccgagattgaaaatcttcaccgaacttttgggcagtttcttgaagagctccgcaatccattctag

SEQ ID NO: 195969 - DNA, 174 bp, synthetic construct
  misc_feature 1..174: note = Description of Artificial Sequence: Synthetic coding sequence
  source 1..174: mol_type = other DNA
atggccagcctgagccggcccagcctgcccagctgcctgtgcagcttccttctgttgcttctgttgcaagtatcgtcatcctacgcgggccttgtcgccgttgccagatcttggctgatcgccgctagtaccagtcaggcacaggtgattctgctgacccagccgttagaatag

SEQ ID NO: 195970 - DNA, 174 bp, synthetic construct
  misc_feature 1..174: note = Description of Artificial Sequence: Synthetic coding sequence
  source 1..174: mol_type = other DNA
atggccagcctgagccggcccagcctgcccagctgcctgtgcagctttctgctcctgttgcttctgcaggtgtcaagttcttatgctggtctggtggctgtcgcccgctcgtggttaatcgctgcctcaacttcccaggctcaggttattctactcacacagcctctcgagtag

SEQ ID NO: 195971 - DNA, 534 bp, synthetic construct
  misc_feature 1..534: note = Description of Artificial Sequence: Synthetic coding sequence
  source 1..534: mol_type = other DNA
atgagccacatcagctgggaggagcggtaccggaacggcaaggaccaagacggggaccaggcaccagaatatcggggcaggacggaactgctgaaggacgctatcggtgaggggaaggtaaccctgcgcatcagaaacgtcagatttagcgacgaggggggatttacatgcttctttcgagatcactcatatcaagaggaagctgccatggaactgaaggtggaagatcccttctactgggtcagccccggagtgcttgtgctgttggcggtgctccccgtgttactccttcagatcaccgtcggactggtgtttttgtgcctgcagtacaggctgcgaggtaaattgagggccgaaattgaaaaccttcatcggacctttgacccccacttcctacgggtgccctgctggaagatcacactattcgtgatcgtgcctgtgcttggtcccctcgtggctctgataatctgctacaactggctgcatcggaggttggccggccagttcctggaggagctgagaaacccattctag

SEQ ID NO: 195972 - DNA, 516 bp, synthetic construct
  misc_feature 1..516: note = Description of Artificial Sequence: Synthetic coding sequence
  source 1..516: mol_type = other DNA
atggccagcctgagccggcccagcctgcccagctgcctgtgcagcttccttcttttgctccttttacaagtttcttcaagctacgctggacaattcagagttattgggccccggcacccaattcgggcactagtcggggacgaggtagagctcccttgccgtatttctcctggcaagaacgcaacaggcatggaagttggatggtatcggccaccgttctccagggtcgtacacttgtacagaaatggcaaggaccaggacggcgaccaggccccagaatatcggggccgaacggaactcctaaaagacgctattggcgaggggaaagtcactctacgtatcaggaacgttcgcttcagcgatgaaggagggttcacgtgctttttcagggatcactcataccaggaggaggcagccatggagctcaaggtggaagtgagccatagcgtgactcaggattggctgcagtggcatgaccatgggagcctacagccgccccccccaaggttgaagtag

SEQ ID NO: 195973 - DNA, 534 bp, synthetic construct
  misc_feature 1..534: note = Description of Artificial Sequence: Synthetic coding sequence
  source 1..534: mol_type = other DNA
atgagccacatcagctgggaggagcggtaccggaacggcaaggaccaggacggggatcaggcgcccgagtacagggggaggaccgagctgctcaaggacgcaatcggggaaggcaaggtcaccttgcggattcggaatgttcggttcagtgatgaggggggatttacatgtttcttccgcgaccactcatatcaggaagaagcagccatggaactgaaggtcgaagaccctttctactgggtgagtccaggtgtgttggttctcctcgccgtccttccagttttgcttttgcagattacagtgggtctggtttttctgtgtctgcaataccggctgaggggaaagctcagggccgaaattgagaatctccaccgcacatttgaccctcacttcctgcgtgtgccctgctggaaaattacactgttcgtgattgtccctgttctgggtccattagtcgccctaattatatgttacaactggctgcacaggcgcctcgccgggcaattcttagaggagctgcggaaccccttctag

SEQ ID NO: 195974 - DNA, 174 bp, synthetic construct
  misc_feature 1..174: note = Description of Artificial Sequence: Synthetic coding sequence
  source 1..174: mol_type = other DNA
atggccagcctgagccggcccagcctgcccagctgcctgtgcagcttcttactgctgctgctcctccaggtcagctcttcttatgcaggcctcgtcgcggttgcccggtcttggttgatcgccgcatctacatcacaggcgcaggtaatcctgttgactcagcctctggaatag

SEQ ID NO: 195975 - DNA, 627 bp, synthetic construct
  misc_feature 1..627: note = Description of Artificial Sequence: Synthetic coding sequence
  source 1..627: mol_type = other DNA
atggccagcctgagccggcccagcctgcccagctgcctgtgcagctttctgttactgctattgttgcaggtcagcagtagctatgccggccagtttagggtcataggccccagacaccccattcgagcactggtcggcgacgaggttgagcttccgtgccgcattagcccgggtaagaacgctacaggcatggaggttgggtggtatcgacccccgtttagtagggttgtccatctttaccgcaatggaaaggaccaggacggagaccaggcccctgagtatagagggagaaccgaactgctaaaggacgcaataggggaaggcaaagtgactctccgcataaggaatgtgaggttctccgacgaaggggggttcacttgcttcttcagggaccatagttaccaggaggaagccgccatggagctgaaagtggaggatccgttctattgggtatcacctggggtgctcgtcctacttgctgttctgccggtcttgctcctgcagatcacagtgggattggtcttcctctgtctacagtaccggctccgggggaagctgcgtgcagaaatagagaacctgcacagaacttttggacaatttctggaagaactgcggaacccattctag

SEQ ID NO: 195976 - DNA, 327 bp, synthetic construct
  misc_feature 1..327: note = Description of Artificial Sequence: Synthetic coding sequence
  source 1..327: mol_type = other DNA
atggccagcctgagccggcccagcctgcccagctgcctgtgcagctttctgctgcttctattactgcaggtgagcagcagctacgctgacccattctattgggtgtcacctggcgtgctcgtgctccttgcagtcttgccagttctcctgctacaaatcaccgttggtcttatttttctctgtctgcagtatcggctgcgtgggaaacttcgggccgagatcgaaaatctgcatcggacattcgaaagctttggtgtgctgggtccacaagtcaaggagccaaagaaaacaggccagttcctggaagagctccgtaaccctttctag

SEQ ID NO: 195977 - DNA, 753 bp, synthetic construct
  misc_feature 1..753: note = Description of Artificial Sequence: Synthetic coding sequence
  source 1..753: mol_type = other DNA
atggcccccggcgcccccagcagcagccccagccccatcctggccgtgttgctgtttagttcacttgtgctgtctccagcccaggccatagtagtatacacagatcgcgaggttcatggcgctgtgggctctagggtaacactgcactgctctttctggtctagtgaatgggtgtctgacgacatttcttttacatggaggtatcagccagaaggcggccgggatgccatttcaatttttcattatgcaaaggggcagccatacattgacgaagtcggcacattcaaggagaggattcaatgggtaggtgaccctagatggaaggacgggtccatcgttatccataatctggactatagtgacaatggaaccttcacctgcgacgtgaaaaatcctcctgatatcgtgggtaagacaagccaagtcacactgtacgtgtttgaaaaagttccaacccgatatggcgtcgtactgggcgctgttattggaggagtgctcggcgtcgtgctgctcctccttttgcttttctatgtggtgagatattgctggctcaggaggcaggcggcccttcaacgaagactgtccgcaatggagaaaggtaagctgcacaagcctggcaaggatgccagcaagcgcggacgccagacccctgtgttataccagtgctggactaccgccgaggcccccaaactgagcgtccggaggcgacctcgagggtggggaagcctggctcgcatacggaacagcggatag

SEQ ID NO: 195978 - DNA, 777 bp, synthetic construct
  misc_feature 1..777: note = Description of Artificial Sequence: Synthetic coding sequence
  source 1..777: mol_type = other DNA
atgctgcgggcccccgcccccgcccccgccatggcccccggcgccccttcttcctccccatctcccattctggctgtactcttgttctcatccctggtcttgtcgcccgcccaggccattgtagtatataccgaccgagaagtgcatggcgccgtagggtcccgagtcacgctgcactgcagcttttggagctccgagtgggttagtgacgacatcagtttcacttggaggtaccaacccgagggcggcagagacgctatcagtatctttcactatgctaaggggcaaccctacatcgatgaagtgggtactttcaaggaacgaatccaatgggttggggaccccaggtggaaggacggctcgatcgttattcataatctggactattcagacaacggcacttttacgtgtgacgtcaagaacccacctgacatcgtcggcaagacctctcaggtcaccctatacgtgtttgaaaaagtacctacacggtacggggtcgtcctgggcgcggtgattgggggggtgctcggggtggtgctcctgctcctgttactgttctacgtggtgcgatactgttggctacgcaggcaagccgctctccagaggagactttcagccatggagaaaggtaaactccataaacccggcaaagatgcctccaagagaggacgtcagacccccgttttgtatgccatgcttgaccatagtagatctaccaaggcagtgtctgagaaaaaggcaaagggactgggtgaatcccggaaagataaaaaatag

SEQ ID NO: 195979 - DNA, 747 bp, synthetic construct
  misc_feature 1..747: note = Description of Artificial Sequence: Synthetic coding sequence
  source 1..747: mol_type = other DNA
atggcccccggcgcccccagcagcagccccagccccatcctggccgttctactgttctcctctttggtgttgagccccgcccaagctatcgtggtatacaccgacagggaagtacatggcgcagtagggtcaagggttacactgcactgctccttctggtcatccgaatgggtatcggacgacatttccttcacctggaggtaccagcccgagggggggagagacgcgatctctatcttccattatgctaaaggccaaccttatatcgacgaagtgggcaccttcaaggaacggatccaatgggtgggggaccctcgctggaaggacggctctattgtgatacacaatctcgactacagcgacaacggtactttcacctgcgatgtgaagaaccctccggatatcgtggggaagacctctcaggtgactctatatgtgttcgaaaaggtgcccactcgctatggagtggttctgggggcagttatagggggggttctcggagtcgttcttctgctgctactgctgttttatgtggtacgctattgttggctgagacggcaggctgctttgcagaggcgcctatctgcaatggagaaaggaaagctgcacaaacctggcaaagacgcttctaagagaggtcggcaaactcctgtactgtacgcaatgctcgaccacagtcggagcacaaaagctgtcagtgaaaagaaggccaaaggattgggagagtcccgcaaggataagaagtag

SEQ ID NO: 195980 - DNA, 747 bp, synthetic construct
  misc_feature 1..747: note = Description of Artificial Sequence: Synthetic coding sequence
  source 1..747: mol_type = other DNA
atggcccccggcgcccccagcagcagccccagccccatcctggccgtcctgttgttcagttccctagtactctctcccgcacaggccatcgtggtttacacagacagagaagtgcacggcgcggtcggctctagagtgacactacattgctccttctggagttccgagtgggttagcgacgatatctccttcacctggcggtaccaaccagagggcgggcgtgacgcaatctctattttccactatgccaagggtcagccatacatagacgaggtgggaacttttaaggagcggatccagtgggtgggggaccccaggtggaaggatggttctatcgtgatccacaacctcgactattccgataacggcactttcacatgcgacgttaagaacccccccgacattgttggaaaaacatcacaggtgacactgtacgtattcgagaaggtgcccacccgttacggcgtagtgttgggagccgtaatcggaggcgttctgggagtcgtgctgctcctcctgctgcttttctacgtagtgcggtattgttggttgcgacgccaggccgcgctacaacgtcgcctgtccgcgatggaaaaggggaaactccataagcctggcaaggatgccagtaagagaggacggcagactcccgtgctgtacgcaatgctggatcactcccgctccactaaagctgtgtccgaaaaaaaagctaaaggtttaggagaaagcagaaaggataagaaatag

SEQ ID NO: 195981 - DNA, 648 bp, synthetic construct
  misc_feature 1..648: note = Description of Artificial Sequence: Synthetic coding sequence
  source 1..648: mol_type = other DNA
atgtacggcaagagcagcacccgggccgtgctgctgctgctgggcatccagctcactgcgctttggcctattgcagcggtcgaaatctacacatccagggtcctcgaggctgttaacggaactgacgccagactgaagtgtacattctcctctttcgcacctgtgggtgacgcccttacagtgacttggaatttcagacctcttgatggtggacctgaacagttcgtattctattaccacatagacccattccagccaatgagtggacggtttaaagacagagtcagctgggacggaaatcctgagcggtacgatgcctctattctactgtggaaactacagtttgacgataatggcacttatacgtgtcaggttaaaaatcctccggatgtggatggtgtgatcggcgaaatcaggctgtcagtggtccataccgtccgtttctccgagatccacttcctggccctggccattggatctgcttgcgccctcatgataattatcgttatagttgtggttctgtttcagcattacagaaagaaacggtgggcagaacgcgctcacaaagttgttgaaataaagtccaaggaagaggaacgcttgaaccaggaaaagaaagtttctgtctacctcgaggacaccgactag

SEQ ID NO: 195982 - DNA, 648 bp, synthetic construct
  misc_feature 1..648: note = Description of Artificial Sequence: Synthetic coding sequence
  source 1..648: mol_type = other DNA
atgtacggcaagagcagcacccgggccgtgctgctgctgctgggcattcagctaacagctctatggcccatagccgcagtggagatctatacaagcagagtcctcgaggccgttaacgggaccgacgcgcgcctcaaatgtacttttagttcatttgctccagtgggcgacgccctgactgtcacctggaatttcagacctcttgacgggggcccagaacagtttgtgttttattatcatattgatccattccagcctatgtccggaagattcaaggaccgagtgagttgggacggaaatccagagagatatgacgcctccatcttgctctggaaactgcagttcgatgataacggtacctatacctgccaggtcaaaaacccccccgatgtggacggggtgattggggagatccgactgagcgtggtacatactgtaaggtttagtgagatccactttctcgctcttgctatcggctctgcttgcgccctgatgatcattattgttatcgttgtggtgctctttcagcactatcgcaagaagaggtgggctgaacgcgcccataaagtagttgagatcaagagcaaggaggaggagcggctgaatcaagagaagaaagtgagcgtatatctggaagacaccgactag

SEQ ID NO: 195983 - DNA, 708 bp, synthetic construct
  misc_feature 1..708: note = Description of Artificial Sequence: Synthetic coding sequence
  source 1..708: mol_type = other DNA
atgcagcagcggggcgccgccggcagccggggctgcgccctgttccccttactcggtgtactgttttttcagggcgtctacattgttttctctctggaaatcagagccgatgcgcacgttcgtggttatgttggggaaaagataaaactcaaatgcacattcaagagcacctccgacgtgacagataagctgaccatagactggacctacagaccgccctcatcctcacataccgtctcaatcttccactaccagtccttccaatatcctacaacagcaggaacattcagggacaggatcagctgggtcgggaacgtctataagggggatgcctctatttctatctcaaatcccacaattaaggataatggaactttcagttgtgcggttaaaaatccgcccgacgttcaccataacattccaatgactgaacttacagtcacagaacgcgggtttggaacgatgctgagcagcgtggccctgctgtccatcctggtgttcgtgccatccgccgtcgttgtagctctgctcttagtgaggatgggacggaaggcggctggccttaagaagaggtctaggtcaggttataaaaagtcctcgattgaggtgtcggatgacaccgaccaagaggaggaggaagcctgtatggcaagattatgtgtccgctgtgccgaatgcctggattctgactatgaagagacctactag

SEQ ID NO: 195984 - DNA, 672 bp, synthetic construct
  misc_feature 1..672: note = Description of Artificial Sequence: Synthetic coding sequence
  source 1..672: mol_type = other DNA
atgcagcagcggggcgccgccggcagccggggctgcgccctgttccccttactgggcgtgttgtttttccaggacgctcatgtgagaggctacgtgggggaaaagataaagctgaaatgtacgttcaaaagcacctcagatgttaccgataagctgactattgattggacctacagacctccttcttcctcccatacggtcagcatttttcattatcaaagcttccagtaccctactacggcaggcaccttcagggaccgcattagttgggtgggaaacgtgtataagggtgacgcatcaattagtatctcaaatccgaccatcaaggacaatggcaccttctcatgtgcagtgaaaaaccctcctgatgtgcaccataatatccctatgacagagctcactgttaccgagagaggcttcggcaccatgctatctagtgtggcgctcctgtccattcttgtgttcgtgccttccgctgttgtggtggctttgctgctggtgcgcatggggcggaaggcggctggcctgaagaaacgttcccgatcaggctataaaaagtcctccatagaggtttcggatgataccgatcaggaggaggaggaggcctgtatggctcgtctgtgtgtgcggtgcgccgaatgcctggatagtgattatgaggagacctactag

SEQ ID NO: 195985 - DNA, 3366 bp, synthetic construct
  misc_feature 1..3366: note = Description of Artificial Sequence: Synthetic coding sequence
  source 1..3366: mol_type = other DNA
atgagcctggagaacgaggacaagcgggcccggacccggagcaaggctctgcgcggcccaccggagacaacagctgcggacctttcgtgccccactcctggatgcaccggctccggtcatgtgcgcggcaaatacagcaggcaccggtctttacagtcatgcccactggcaaagaaaaggaaactggagggagccgaggccgagcatctcgtcagtaaacggaagagccatcctctgaagctggctctggatgaagggtatggcgtcgactcagatggtagcgaggacacagaggtgaaagatgccagcgtcagtgacgaatcagaaggcactctagagggcgccgaggctgagacgtctgggcaagacgaaatccacagacctgagacagctgagggacgcagccccgttaaatcccatttcggttccaacccgatagggtcggctacagccagctccaagggttcttattctagttatcagggaattatcgcaacatcactcctgaacctggggcagattgctgaggagacgctggtggaagaggaccttggtcaggccgctaaaccaggacctggcatcgtacacctgctgcaggaagcagctgaaggggctgcctcagaagaaggcgagaaggggctctttatccagccagaggatgccgaggaggtcgttgaggtgactacagaaaggtcccaagacctctgtccccaatcactggaggacgctgcctcagaggaatcatcgaagcagaagggaatactttcacacgaggaggaggacgaagaagaggaggaagaggaggaggaagaagaagaagatgaggaagaggaagaagaggaagaagaggaagaggaagaggaggaggaggaagaagaggaagaggaggaagaggaggaggaggaagaggaagaagaggccgcccccgacgtaatctttcaggaggacacctcacacacatccgctcagaaggcgccagaattacgcggtccagagtcaccgtctcctaagcctgagtacagcgtgatcgttgaggtgagatctgacgacgataaagatgaagacacccacagtcgcaagagtaccgtgacagacgagtccgagatgcaagacatgatgactagggggaacctgggcctcctagagcaggctatcgcattaaaggccgagcaagttagaaccgtctgcgagcccggctgccctcccgccgaacagagccagctgggtctaggtgagccaggcaaggctgctaagcccctggacaccgtgcggaaatcctattattccaaggacccatcacgcgccgagaaaagagagataaagtgccctacacctggttgcgacggcacagggcacgttactggcctttatccacatcatcgctctcttagcggatgtccgcacaaggatcggatcccccctgagattctagcaatgcacgaaaacgtcttgaagtgccctacccctggttgcaccggacaagggcacgtaaactcaaatagaaatactcatcggtccctctccggctgccctatagcagctgcagagaaattagccaagagccacgagaagcagcaaccacaaactggcgatccatcaaaatcctcaagcaattccgacagaatcctacggcctatgtgtttcgtcaaacagttggaggttcccccttatggatcatacaggcctaacgtcgcgccggccactcccagagcaaatcttgccaaggagctcgaaaagttctctaaagtgaccttcgactacgctagttttgatgcgcaggtgttcggtaagcggatgctcgccccgaagattcaaacgtcagaaacttcgcccaaggcatttcagtgcttcgattatagtcaagatgccgaagccgctcacatggctgctactgccattctcaacctatcaacacgatgttgggaaatgcctgaaaacctcagcactaaacctcaggacctcccgtccaaaagtgttgatatcgaagttgacgagaacgggacactggatctcagtatgcacaaacaccgcaagcgagagaatgcttttccgtcgtccagctcctgttcctcatcaccgggcgtgaagtcacctgacgcatcacagcggcacagcagcacctcggcaccctcatcatccatgactagtccccagtcaagccaggcttcacgacaagacgaatgggacagaccactcgactataccaaaccttctaggctgcgcgaggaggagcccgaagaaagtgaacccgccgctcactcttttgccagtagcgaggcagatgaccaagaggtgtccgaggagaatttcgaagagagaaagtaccctggagaggtgacgctgactaatttcaaactcaagttcttgagcaaagacattaaaaaggaactcctcacctgtcccaccccagggtgtgatggttctgggcacatcacgggtaactatgcttcacataggagcctttctggctgtcctctggcggataagtctctgcggaatttaatggcagcgcactcagccgacctgaagtgccctacaccaggctgtgacgggagtgggcacatcactggcaattacgcctcacacaggtcactctccggctgtccgagggccaagaagagcggcgttaaggttgcaccgacgaaagatgacaaagaagaccccgagctgatgaaatgtcctgtaccagggtgtgtgggactgggacacataagtgggaagtatgcctcacataggtctgcctcgggatgtccactggctgcaagaagacagaaggaaggcagcctgaatggctcttccttttcttggaaatccctaaaaaacgagggccccacttgccctactcccggctgcgatggttcagggcacgctaacggatcctttttaacccaccgttccctgtccgggtgtccacgggctaccttcgccgggaagaagggtaaactgtcaggagacgaggttctgtcaccaaagttcaaaacatccgatgtgctggagaacgatgaagagattaagcaattaaatcaggagatccgggatctgaatgagtccaactccgaaatggaagccgccatggtgcaactacagtcccaaatatctagtatggagaagaacctgaagaatatcgaagaggagaacaagctgatcgaagaacaaaacgaagccctgttcctcgagttaagcgggctgagtcaggcactgatccagtccctcgccaacatccggctcccccacatggagcccatctgcgagcagaatttcgatgcctacgtgagtactttaaccgacatgtattccaatcaggaccctgagaataaggacctgctcgagtcaatcaaacaggctgttcggggaatccaagtctag

SEQ ID NO: 195986 - DNA, 1776 bp, synthetic construct
  misc_feature 1..1776: note = Description of Artificial Sequence: Synthetic coding sequence
  source 1..1776: mol_type = other DNA
atgagcctggagaacgaggacaagcgggcccggacccggagcaaggccctgagagggccccctgaaacaacagccgcggacctctcttgcccaacaccaggatgtactggaagcggtcacgtgaggggaaagtacagtcgccaccggagcttgcagtcatgtcccctggcgaagaaacgtaaactggagggtgccgaagctgagcatctggtttcaaaaaggaagtcccacccactgaaacttgcactcgatgagggttacggtgtggattctgacggtagcgaggatactgaggtgaaggacgcgagcgtgtccgacgagtccgaaggaactttagagggcgcagaagcagaaacaagcggccaggatgagatccaccgccctgaaacagccgaggacccatcacgagctgaaaagagagagattaagtgccctacccctggctgcgatggtaccggacatgtcaccggactgtatccgcatcatcgctcactttccgggtgtccccacaaggacaggatcccgcctgagatcctcgctatgcatgagaacgtgctcaagtgtcctacccctggctgtacgggacagggacatgttaatagcaaccgaaacacccaccgcagcttgagtgggtgtcctatagcagccgcggaaaaactggctaagtctcatgagaaacaacagccccagaccggtgatccctcaaaaagctcctccaactctgatcggatactgaggcccatgtgcttcgtgaagcagctggaagtcccaccctatggcagttaccgccctaatgtggctcccgccacaccacgagctaatcttgccaaagagctggaaaagtttagtaaagtcacttttgactatgcctcttttgatgctcaggtattcggcaagaggatgctggccccaaagattcagactagcgagacaagtcccaaggcattccaatgcttcgactattcacaggatgccgaggctgcgcacatggccgcaaccgcaatcttgaacctgagcactcgctgctgggagatgcctgagaacctgtcaaccaaaccacaggatctgccaagcaagagcgtggacatcgaggttgatgaaaacgggacattggatttgtcaatgcacaagcaccggaaacgggagaacgcctttccgtcgtccagttcctgtagctcaagtcctggagttaaatctccagacgccagccagcgtcactccagcacaagtgcgccttctagcagtatgacgtcaccacaatctagccaggcatcccgacaggatgagtgggatcgccctctagactacaccaagccttctagactgagagaggaggagccggaggaatccgagccagctgcccactctttcgccagcagcgaagcagatgaccaagaggtgtctgaggagaattttgaggagaggaagtaccccggcgaagtgacactgactaattttaagttgaaattcctctcaaaggacattaagaaggaattgctcacatgcccgacaccggggtgtgacggcagcggccacattacagggaactatgcaagtcacagaaggtgtcctactcccggctgtgacggctctggccatatcacagggaactacgcttctcacagatctctgtccggctgccctcgcgccaagaagtcaggggtaaaggtagccccaaccaaggacgataaagaggatccggaactgatgaaatatgtggggccatgctggctttttcactgcatcgccgagctgagatttagctgtgtgctctag

SEQ ID NO: 195987 - DNA, 3447 bp, synthetic construct
  misc_feature 1..3447: note = Description of Artificial Sequence: Synthetic coding sequence
  source 1..3447: mol_type = other DNA
atgagcctggagaacgaggacaagcgggcccggacccggagcaaggcgttgagaggacctccagaaaccacagcggcagatctatcctgcccgacacctggctgtaccggcagcgggcatgttcggggcaagtactcacgccacaggtcactgcaatcctgcccactggccaagaagcgcaagcttgaaggagcagaggccgaacatttggtgtctaagcggaagtctcatcctttgaaactcgccctcgatgagggatacggcgtggatagtgacgggtccgaagacaccgaggtcaaagacgcttctgtctcagacgaaagtgagggaacactcgaaggagctgaggcagaaacgtccggtcaagacgagatccataggcctgaaactgccgaaggccgctcgcctgtcaaatcacactttgggagtaatccaattggttcagctacggctagctctaagggcagttactcttcataccagggtattattgcgaccagtttgttgaacctgggtcagattgccgaagagacattagtcgaagaggatttaggccaggccgccaaaccaggtcctggcatcgttcacctcctgcaggaagcggctgaaggggctgcatccgaggaaggtgaaaagggactttttattcagccagaagatgccgaggaggtggtcgaagtgaccaccgaaaggtcccaagatctgtgcccgcagtccctcgaagacgcagcaagcgaagagtcgagtaaacagaaaggcatcctttcacacgaagaagaggacgaggaagaggaagaggaagaagaagaggaggaggaggatgaagaggaggaggaggaagaggaggaagaagaggaggaagaagaagaggaggaggaagaagaagaggaggaagaggaggaggaagaggaggaggaagcagcgcctgacgtgatatttcaggaagatacttcccacacctccgctcagaaggccccggaactgagggggccagagagtcctagccccaagccagaatattcagtgatcgtggaagtgaggtccgatgatgataaagacgaggatacgcacagcagaaagagtaccgtgaccgacgaaagcgaaatgcaggatatgatgactagggggaatctgggcctgttggagcaggcaattgcgttgaaagccgagcaagtgcggaccgtgtgcgagccgggatgtcccccggcagaacagagtcagctaggactgggcgaacctgggaaagcggccaagccacttgatactgtgaggaaatcttactactctaaggatccttcacgtgccgaaaaaagagaaataaaatgtccaactcccggttgcgatggcaccggacatgttactggtctctatccacatcatcgttccctgtcaggctgcccccacaaagatcggatccctcctgagatcctggcgatgcatgaaaatgtactgaagtgtcccacaccgggatgtacaggtcaaggccatgtaaattctaataggaacacacaccgatcactctctggttgtcccattgccgcggctgagaagctggcaaagtcacatgagaaacagcaacctcaaacaggagacccatcaaaatcttcatcaaacagtgatcgtattctgagaccaatgtgtttcgtcaagcagctggaagttcctccttacggctcatatagaccgaacgtggctcccgctacaccgcgggctaacctggcaaaggagttagagaagtttagcaaggtgactttcgactacgcaagttttgatgcccaggtctttggcaagagaatgctggctcccaagatccagacgagtgaaaccagtccaaaggcctttcaatccaagcccttcccaaaggcctccagcccccggcatagtcccagttcatcttatgtgaggagtacctcttcgtcgagtgcaggcttcgattactctcaggatgcagaagccgcacacatggctgcgactgccattcttaacctgtcaactcggtgctgggagatgccggagaatttgtcgacgaaaccacaagacctgccctctaagagtgtggatatcgaagtggatgaaaatgggacccttgatctctcgatgcataagcacagaaaacgcgagaacgcgtttccatcaagctccagctgttcctccagccctggggtgaagtccccagacgcctcgcagcgacatagttccacttccgccccctctagctcgatgaccagcccccagtcctcccaagcatccagacaggatgagtgggaccgccccctcgactacaccaagccaagccgccttagggaggaggaaccagaagagtcagaaccagccgcccacagtttcgcgtcctctgaagccgatgaccaggaagtgtccgaagagaatttcgaggaacggaagtaccccggcgaagttacattgacaaactttaagcttaagtttctgtcaaaggacatcaaaaaagagctccttacatgccctacgccaggctgcgacggttccggacacataactggcaattatgcctcacatcgttctctgagcgggtgtcctcttgccgataagtccctcaggaacctcatggcggcccactccgcagatcttaaatgccccacccctggatgcgatggatccggacatatcaccggtaattatgcatcccataggtcactgtcaggatgcccacgggctaagaagagcggcgtgaaagtagctcccacaaaggatgataaagaagatcccgagctgatgaagtgccccgtaccaggttgtgtggggctgggccacatttcagggaagtatgcctcgcaccgaagtgcctctggctgccctttggctgcccgaaggcagaaggagggctcactgaacggcagctcctttagctggaagagcctaaagaacgagggaccaacctgccctactcccggctgtgatggctcagggcatgcaaacggttcattcctgacccatagaagcctgtccggatgtcctagggcaacatttgccggcaagaaagggaagctgtctggggacgaggtactgagcccgaagtttaaaacctctgatgtgctcgagaatgacgaagagatcaagcagctcaaccaggagattcgagatctaaacgagagtaattctgagatggaagcggcaatggtccagctgcagtcccagatatcgtccatggagaaaaatctgaagaatatagaggaggaaaacaagctcattgaagagcagaacgaggccctgtttcttgaactttccggactcagccaggctcttattcagagccttgcaaacatcaggcttccacatatggagcccatctgtgaacagaacttcgatgcctacgtgtccaccctgactgatatgtatagtaaccaagatccggagaacaaggacttgctagaaagcattaagcaggctgttagaggcattcaggtttag

SEQ ID NO: 195988 - DNA, 3399 bp, synthetic construct
  misc_feature 1..3399: note = Description of Artificial Sequence: Synthetic coding sequence
  source 1..3399: mol_type = other DNA
atggaggtggacaccgaggagaagcggcaccggacccggagcaagggggtacgggtccctgtggagcccgcaatacaggagttgttctcttgccctacgcccggctgtgatggttcgggtcacgtaagtggcaagtacgccagacatagatccgtgtacggttgtcccttagctaagaagagaaagacccaggacaagcaaccccaggagccagctcctaaaaggaaaccattcgcagtcaaggcagacagctcgtccgtggacgagtgcgacgattcagacggcactgaggatatggatgagaaggaggaagacgaggaggaagaggaggaggaagaagaagaaaacgaggatcatcaaatgaactgccataacactcggattatgcaagacactgaaaaggacgataataataatgatgaatacgataactacgatgaactggtcgccaagtctctgctcaaccttggcaagatcgccgaagacgctgcttatcgagctcggacagagtcagaaatgaactcaaatacttcaaacagtctggaggatgactccgacaagaatgaaaatctgggccggaagtcagagcttagcctcgatttggatagcgacgtggttagggaaaccgtagattctttgaaacttttggcgcagggacacggcgttgtgctctccgaaaatatgaatgaccggaactacgccgattctatgtcccaacaggacagccgtaatatgaattatgtcatgctgggcaaaccaatgaacaacggactcatggaaaaaatggttgaagaatcggacgaagaggtgtgtctgtctagtctggagtgtctgagaaaccagtgtttcgacctcgcaaggaaactcagcgagaccaaccctcaggagagaaatccgcagcagaacatgaatatcagacagcatgtaagaccagaggaggacttccctggaaggacaccagatcgtaattatagcgacatgcttaatctgatgcggctggaggagcagctgtcgccccggtcccgcgtgttcgcaagctgtgccaaagaagacggctgtcacgagcgtgatgacgacactacctctgttaatagtgacagatctgaagaagtattcgatatgactaagggcaatctaacgctgttggaaaaggccattgccctggagacagaaagggcaaaagccatgcgagagaaaatggccatggaggcagggaggcgtgataatatgcgttcgtatgaggaccagagtcctagacagctgcccggcgaggatcgaaaacccaaaagcagcgactcccacgttaagaaaccctattatgatcccagtaggaccgaaaagaaagagagtaaatgtcctacccctgggtgtgacggtactggtcacgtgaccggcttgtatcctcaccacagaagcctcagcgggtgtccccataaagatagagtgcctcccgaaatattagctatgcatgagtctgtgctaaagtgtcctaccccaggctgcaccgggcgcgggcatgtgaactccaacagaaactcacaccggagccttagcggctgcccgatcgccgctgctgagaagctcgctaaagctcaggaaaagcaccagtcctgcgatgtctcgaaatcctcccaggcctctgatagggttctgcggccaatgtgtttcgttaaacagctggagatcccgcagtatggatacagaaataatgtgccaacaaccacgccacggagtaacctggcgaaagaacttgagaagtactctaagacctccttcgagtataattcttatgataaccacacttatgggaaacgggccatcgccccaaaagtgcagactcgcgacataagtcctaagggctacgacgacgcgaaacgttattgtaaggatccatcgccttcttcttccagcacctcgagctacgcgcccagtagcagctcaaatctgtcttgcggggggggctcatctgcttcttcaacttgcagtaagagctccttcgactacactcatgatatggaggcagcgcatatggccgcaaccgccattttgaatctctcaacccgatgcagagaaatgccccagaatttaagtactaagccgcaggatctgtgcgccacccgcaaccctgatatggaagtcgatgagaatggtactctggacctgagcatgaataagcagcggccccgagacagctgctgccccattcttacgcccctcgaaccgatgtccccccagcagcaggccgtcatgaataatcggtgttttcagctgggcgaaggcgattgttgggacctgccagtggattacaccaagatgaaaccccggcgtatagatgaggatgagagcaaggatatcactcccgaagacctggacccctttcaggaagcactggaggagcggcgatacccaggtgaggtgacaatccctagtcccaagcccaagtatccacagtgtaaagagagtaaaaaggatcttatcaccctatcaggctgcccgctggccgacaaaagtattcgtagtatgctcgccacctcttcacaagagctgaagtgtccaactccgggatgcgacggttccggacatatcaccggaaattacgctagccatcggtccctgtcaggatgtcctcgcgccaagaaaagcgggatccggatcgcccagagtaaggaggataaggaggaccaggaaccaatcagatgtcctgttccagggtgcgatggccaggggcacatcaccggaaagtacgccagccaccgaagcgctagtggctgtccactggctgccaagcgccagaaggatggatacctcaacggcagccagttctcctggaaaagtgtgaagactgagggtatgtcatgcccgacacccgggtgcgatgggtctgggcatgtctctggatcattcctgacacacaggtccctgtcgggatgtccgcgagccaccagtgccatgaagaaggccaaactgtctggtgagcagatgcttacaatcaaacagagagcaagcaatggaatagaaaacgatgaggagattaaacagctagatgaagagatcaaggagctgaatgagtctaactcccagatggaagctgatatgatcaagttgaggacccagataacgacaatggagagcaacctgaagactatagaagaggagaacaaggtcatagagcaacaaaacgagtccctgctgcacgagctggccaacctgagccagagcctcatccacagtctcgccaatattcagttgccgcatatggatcctatcaacgagcagaactttgacgcctacgtcaccacgttaaccgaaatgtatacaaatcaggacagataccagagccccgaaaataaagccctgctcgagaatatcaagcaggcagtaagggggatacaggtctag

SEQ ID NO: 195989 - DNA, 3561 bp, synthetic construct
  misc_feature 1..3561: note = Description of Artificial Sequence: Synthetic coding sequence
  source 1..3561: mol_type = other DNA
atggaggtggacaccgaggagaagcggcaccggacccggagcaagggagttagggtgcccgtcgagcctgcaattcaggagctattttcctgccctacccccggatgtgacggctctggccacgtgagcggaaaatacgctcgtcataggtctgtgtacggctgccccctggccaagaagcgcaaaacccaggataaacagccacaggagcctgcaccaaagcgcaagccctttgccgtgaaggctgatagtagctccgtcgacgaatgcgacgactccgatggtactgaagacatggacgagaaggaagaggatgagggagaggagtatagtgaagacaatgatgagccaggagatgaggacgaagaagacgaggagggcgatagagaagaggaggaggagatcgaagaggaagacgaagacgacgatgaggatggcgaagacgtggaggatgaggaggaggaggaggaagaggaagaagaagaggaggaggaagaggaaaatgaagaccaccagatgaactgccacaataccaggatcatgcaggacactgaaaaggatgataataataacgacgagtacgataactacgacgagcttgtcgcaaagtccctgttaaatttgggtaaaatcgccgaagacgccgcttatcgggcccggaccgagagcgagatgaactctaatacctcaaatagcctggaagatgacagcgacaagaatgagaatttggggagaaaaagcgagctgtccctggatcttgatagtgacgtcgtgcgagaaacagtggactccctgaagcttctggcacaaggccatggcgtggttctcagcgaaaatatgaatgaccgcaactatgccgatagcatgtcgcagcaggactctcggaacatgaattacgtgatgctggggaagcccatgaacaacggcctgatggagaaaatggttgaggaaagcgatgaggaagtgtgcctgtcgagcctcgagtgcctcaggaatcagtgtttcgatctggccaggaagctgagcgaaaccaacccccaggagcgaaacccacagcagaacatgaatattcggcagcacgtccggcccgaggaagatttccctgggaggacaccagaccgaaattattccgatatgctgaacctcatgcggctggaagagcagctgagccccagatcaagggtttttgcttcttgcgccaaggaggatggctgtcacgagagggatgacgacaccacctcagttaacagcgacaggtcagaagaagtgtttgacatgacgaaggggaacctcaccctgctcgagaaggccatcgccctcgagaccgaaagagcgaaagcgatgcgcgagaaaatggccatggaagctggccggcgcgataacatgcgatcctacgaagaccagagtccccgtcagctgccaggcgaggatcgtaaacccaaatcctccgacagccatgtcaaaaaaccatattacggaaaagacccgagtcgtaccgaaaagaaggagagcaagtgtccaaccccagggtgtgacggcaccgggcacgtcactggtctctatcctcatcatcgaagtctaagcggttgcccccacaaagaccgtgttcccccagagatacttgctatgcacgagagtgtgctcaagtgccctactcctgggtgtaccgggaggggtcatgtcaattctaaccgcaatagtcacagatccctgtctgggtgtcctatcgccgcggctgagaaactggcaaaggctcaggaaaagcaccaatcatgtgacgtgagtaagtcttcacaggcaagcgaccgggtactgagacccatgtgctttgtcaaacagctggagatacctcagtatgggtaccggaacaatgtgcctacaacgacacctcgcagtaatctcgccaaggagttagaaaagtatagtaagacctcctttgaatacaactcatatgataatcacacatatggcaagagagccattgcaccaaaggtacagacgagagacatatcccccaagggctatgatgacgcgaaacgatactgtaaggatccttctccttcctcaagttccacaagctcctatgcgccctcatcatcatcaaatctgagctgtgggggcgggtcaagcgcatcctctacctgtagcaaatcaagcttcgattacacacacgacatggaggcagcgcatatggccgcgaccgccattttgaatttgtccactcgctgtagagaaatgccccagaatttgagtacaaagccacaggacctttgcgcaactcgcaaccccgacatggaagtggatgagaacggaacactggacctgtccatgaacaagcaacggccccgcgactcgtgctgccccattttaactcctttggagccaatgtctccacagcagcaggccgtgatgaataacagatgcttccagctgggggagggggattgctgggacttacccgtggactacacaaaaatgaagccccgaagaattgatgaagacgagagtaaagatatcaccccagaagacttggatccctttcaggaagccctagaagagcggcgctaccccggcgaggtgacaatcccctccccgaaaccaaagtacccccaatgcaaggagagtaaaaaagaccttataacactctctgggtgtcccttagctgataagagcatacgcagtatgctcgctacatcttcccaggagctcaagtgtccaactccagggtgtgacggttccggacacattaccgggaactatgcatcacatcgcagcctcagcggctgcccccgcgctaagaagtccgggattaggatcgcccagagtaaggaggataaggaagaccaggagccaattcggtgtcctgtgccaggatgcgacggccaaggccacatcacagggaagtatgccagccataggtcagcctcaggctgccccctggccgctaaaaggcaaaaggatggctatctgaacggcagccagttttcctggaagtcagtcaaaacggaaggaatgtcatgtcccacacccgggtgtgacgggtccggccacgtgtctgggagttttctgacccaccgatccctcagtggatgtcctcgcgctacttcagccatgaagaaggccaagcttagcggagagcaaatgctgactataaaacagagggcctccaacggaattgaaaatgacgaggaaattaaacagctagacgaagagataaaggagctcaatgagtccaactcccaaatggaggccgacatgataaagttgagaacccaaataacaactatggaatctaacctcaagaccatcgaagaggaaaataaggtgattgaacagcagaacgagtctcttttacacgaactggctaatctctcgcagtctcttatccatagcctggctaatatccaactcccccacatggacccaataaacgagcagaactttgatgcctacgtcacgacattgaccgagatgtatacaaaccaagataggtaccagtcgcctgaaaataaggcactgctagaaaacatcaaacaggccgtaagaggcatccaagtgtag

SEQ ID NO: 195990 - DNA, 555 bp, synthetic construct
  misc_feature 1..555: note = Description of Artificial Sequence: Synthetic coding sequence
  source 1..555: mol_type = other DNA
atgagctgccccacccccggctgcgacggcagcggccacgtgagcgggagtttcctgacccataggagtctgtctggatgcccccgggctactagcgctatgaaaaaagctaagctctcaggcgaacagatgcttaccattaagcaaagggctagtaacggcatagagaacgacgaggagattaaacagcttgacgaggagattaaagagctcaacgagagcaattctcagatggaagccgatatgattaaactaagaacgcaggtgaccattaccaccatggagtcgaatctgaaaactattgaagaggaaaacaaggtcatcgagcagcagaatgaatcgctactgcatgagttggcaaatctgtcccagagcttgatacactcccttgctaatatccagttgcctcacatggaccccatcaatgagcaaaatttcgacgcatatgttactactctgaccgagatgtacacgaaccaggaccgataccagtcgccggaaaataaggcccttcttgaaaacattaaacaagctgtaaggggcatacaagtctag

SEQ ID NO: 195991 - DNA, 3555 bp, synthetic construct
  misc_feature 1..3555: note = Description of Artificial Sequence: Synthetic coding sequence
  source 1..3555: mol_type = other DNA
atggaggtggacaccgaggagaagcggcaccggacccggagcaagggcgtacgtgtaccggtggaacccgcgatccaggagttattcagctgccctacccctggttgcgatgggagtgggcacgtgtcaggaaaatatgcgaggcataggagcgtctatggatgtcctctggctaagaagagaaaaacccaagacaaacagccccaggagcctgcacccaagcggaaaccattcgctgtgaaggcggactctagctcagtggacgaatgtgacgacagcgacggaacagaggatatggacgagaaagaggaggatgagggtgaagaatatagcgaggataatgacgagcccggagacgaggatgaggaggacgaggagggcgatagggaagaagaagaagagatagaggaggaggatgaagatgacgacgaagatggcgaggacgtagaggatgaggaggaggaagaggaagaagaagaagaagaagaagaggaagaagagaacgaggaccatcagatgaactgccacaacacacgaattatgcaggataccgagaaagacgataacaacaacgacgaatacgataattacgacgagcttgtagctaagagtctgctcaatctgggaaagatagccgaggatgcggcctacagggcccgcactgaatcagaaatgaactctaatacttcaaatagtctcgaagacgatagcgacaaaaatgaaaatctgggcaggaagtctgaactgagtctggatctggacagtgatgtggtgagggagacagtcgattctttgaaactgctggcacaaggtcacggcgtggtgctgtcggaaaacatgaatgatcgcaattatgcggacagcatgagccagcaggatagcagaaacatgaattatgtcatgcttggcaagcctatgaataatggactgatggaaaaaatggtagaggagtccgatgaggaggtttgcctgtcttcgctcgagtgcctacggaatcagtgtttcgatctagccaggaaactttcagagactaatccacaagagagaaatccgcagcagaatatgaatatccgccaacacgtgcgaccagaggaggatttccctggccggacaccagaccgcaactacagtgatatgctgaacctcatgcgattggaggaacagctgagccccagatctagagtgttcgcctcctgcgccaaggaagatggatgccacgagagagatgacgacaccacatccgtgaacagcgatagatcagaagaggtcttcgatatgacaaagggtaatttgactctcttggagaaggctatcgctctggaaacagagcgtgccaaggctatgagggagaagatggctatggaagctggcaggcgggataatatgcggagttatgaagaccagtcccctagacaactccctggcgaagacaggaaaccgaagtccagtgattcccacgtaaaaaagccatattatgaccctagcagaactgagaagaaagagagcaagtgcccaacacccggctgcgatggaacaggccacgtcaccgggctttatccacaccatcgcagcctttccggatgcccccacaaagatcgggtgcctcccgagatactcgccatgcacgagagcgtgctcaagtgtcctaccccaggctgtacgggacgcggacatgtgaatagtaataggaatagccatcgaagcttaagcggctgccccatagccgcagcagaaaagttagctaaagcacaggaaaaacaccagtcttgcgacgtgtctaaatcatcacaggctagcgaccgagtgctgaggccgatgtgctttgtaaaacagctggagatccctcagtatggctatagaaataacgttcccacgacgacaccacggtcaaatctggccaaggaactggagaaatacagtaaaacgtctttcgagtataactcatatgataaccacacttatggaaagcgagctattgctcctaaagtgcaaaccagagacatctccccaaaaggatatgacgacgccaagaggtattgtaaagacccaagtccatcctccagctcgacctccagctacgcaccctcctctagttcaaacttgtcatgcggaggcggatcctcagctagctccacctgctcaaagtcttcattcgactatactcatgacatggaggccgctcacatggcagccaccgcaatcctcaatctgtccacacggtgcagagaaatgccacaaaatctgagcaccaaaccccaagatctgtgcgcaaccagaaacccagacatggaggtggatgaaaacgggacattggacctatccatgaacaagcagcgaccacgagattcatgttgtcctatcttaaccccacttgaacccatgtccccacagcagcaggctgttatgaacaatagatgctttcagctgggagaaggcgactgctgggatctacccgtggactacaccaagatgaaacctcggcgcattgacgaagatgagagcaaggatattactcccgaagacctggatccattccaagaggccttagaggagcgcagataccccggggaagttacaataccgtcccctaagcccaagtacccccagtgtaaggagtctaagaaggatctcataaccctttccggatgcccccttgctgacaaaagtattcggagcatgctcgccaccagctcccaggagttaaaatgtcctacgcccgggtgcgacggcagcggccatatcaccggcaactacgccagccataggtcgctgagtggttgcccccgtgccaaaaaatccggcattagaattgctcaatccaaggaggacaaagaggaccaagaaccaatccgatgccccgtgcccgggtgtgatggccagggtcatataaccggcaagtacgcatcccatcggagcgcttcaggctgtccattggccgctaaacggcaaaaggacggatatctcaacggcagccagtttagttggaaatccgtgaagaccgagggcatgtcctgtccaactcctggatgtgatgggagtggtcacgtgtcgggcagttttctgacgcaccggtccctctccggctgccctagagcaactagtgcaatgaagaaagcaaagcttagcggtgagcaaatgctgaccattaagcaacgcgcttcaaatggtatagaaaacgatgaagagatcaagcagctcgacgaggaaatcaaggaactgaatgagtccaacagccagatggaggcagatatgatcaagttgcgtacacagattacaaccatggagtctaatctgaagaccatcgaggaggaaaacaaggtcatcgaacaacagaatgaatccctgctgcatgagttggctaacttaagccagagcctgattcactccctggcgaacatccaattgccccatatggacccaattaacgagcagaacttcgacgcttacgtgacaactctgactgagatgtacacaaaccaggacagataccagagtcctgagaataaggcactgttggagaacatcaagcaggcagtgaggggaattcaggtctag

SEQ ID NO: 195992 - DNA, 552 bp, synthetic construct
  misc_feature 1..552: note = Description of Artificial Sequence: Synthetic coding sequence
  source 1..552: mol_type = other DNA
atgagccagaagcccgccaaggagggcccccggctgagcaagaaccagaagtattctgagcacttctctatccactgctgccctccattcacttttctaaattcaaagaaggagatagttgacaggaagtatagtatctgtaagagcggctgtttctatcagaaaaaagaggaagactggatctgctgcgcctgccagaagacacgcactagtcggcgcgcaaagagtccacagaggcctaagcaacaacccgccgcccccccggcggtcgtgagagcacctgcaaagccccgcagccccccacgctcagaaaggcaaccccggagccctccccggtccgagaggcagcctcgcagtccgcctaggagcgagcgacagccaagatcccccccgcgttctgagcggcagccacggcccagaccagaggtgcgacccccacctgcgaaacaacggcccccccagaagagcaaacagcagcctcggagcagcccattgcggggtccaggagcctctagaggtggttctccagtaaaggcatcccggttttggtag

SEQ ID NO: 195993 - DNA, 246 bp, synthetic construct
  misc_feature 1..246: note = Description of Artificial Sequence: Synthetic coding sequence
  source 1..246: mol_type = other DNA
atgagccagaagcccgccaaggagggcccccggctgagcaagaaccagaagtattctgaacatttttccatacactgctgtccccccttcacctttctaaattccaaaaaggagatcgtggataggaagtattccatttgtaaaagtggatgtttctatcagaagaaagaggaggactggatttgttgtgcctgtcagaaaactcgcctaaagcggaagattcggccgactccaaagaagaagtag

SEQ ID NO: 195994 - DNA, 246 bp, synthetic construct
  misc_feature 1..246: note = Description of Artificial Sequence: Synthetic coding sequence
  source 1..246: mol_type = other DNA
atgagccagaagcccgccaaggagggcccccggctgagcaagaaccagaaatacagcgagcacttctccatacactgttgtcctcccttcacgttcctcaattctaagaaggagatcgtcgatcggaaatactccatctgcaagagtgggtgtttctatcagaagaaggaggaggattggatatgttgcgcatgccaaaagacccgcctgaaacgaaagatcagacccacccctaaaaaaaagtag

SEQ ID NO: 195995 - DNA, 246 bp, synthetic construct
  misc_feature 1..246: note = Description of Artificial Sequence: Synthetic coding sequence
  source 1..246: mol_type = other DNA
atgagccagaagcccgccaaggagggcccccggctgagcaagaaccaaaagtactcggagcatttctctatacattgttgtcccccgttcaccttcctgaacagcaaaaaagaaatagtggaccgcaaatactctatctgtaagagtggatgcttttatcaaaagaaggaggaagactggatctgctgtgcctgccagaaaaccaggttgaaaagaaagatccgacctaccccgaagaagaagtag

SEQ ID NO: 195996 - DNA, 552 bp, synthetic construct
  misc_feature 1..552: note = Description of Artificial Sequence: Synthetic coding sequence
  source 1..552: mol_type = other DNA
atgagccagaagcccgccaaggagggcccccggctgagcaagaaccagaaatacagtgaacatttcagcatacactgttgcccgcctttcaccttcctaaacagcaaaaaagagattgttgatcggaaatacagcatctgtaagagtgggtgcttctatcagaagaaggaggaggactggatatgctgcgcttgtcagaagaccagaacgtccagacgggcaaagtcgccacagaggcctaaacaacaaccagccgccccacccgctgtcgtgcgtgcgcccgctaagcctcgaagtccaccccgatctgagagacagcctcgatctccacccagaagtgagagacagcccagatcaccccctaggagtgagcgccaaccgcggtcaccccccagatccgagaggcagcctaggccaagaccagaagtccggccccccccggcaaaacagcgaccacctcagaaatctaaacagcaacctaggagctcaccccttagagggccgggcgcctcccgtggcggctctccagtgaaagcatctcgtttctggtag

SEQ ID NO: 195997 - DNA, 552 bp, synthetic construct
  misc_feature 1..552: note = Description of Artificial Sequence: Synthetic coding sequence
  source 1..552: mol_type = other DNA
atgagccagaagcccgccaaggagggcccccggctgagcaagaaccagaaatatagcgaacatttctcaatacactgttgcccgcctttcacatttcttaactcgaagaaagagattgtggaccgaaaatacagcatctgtaaaagcggttgcttttaccagaagaaggaggaggattggatatgctgtgcgtgccagaagacccggaccagccggcgggcaaagtcaccacagcggcctaaacaacaacctgccgcaccaccagcagtcgttagggcccctgcaaagcccaggtctcccccaagatccgaacgacaaccaagatctcctccgagaagcgagcgtcaacctcgcagcccacctcggagtgaacgccagccaagatccccaccacggagcgagagacagccgagaccgcgacccgaggtgcgacctccgcctgctaaacagcggcctccgcagaagagcaagcaacaaccgcgatccagcccccttcggggcccgggcgcgagccggggagggagtccagttaaggctagtaggttttggtag

SEQ ID NO: 195998 - DNA, 246 bp, synthetic construct
  misc_feature 1..246: note = Description of Artificial Sequence: Synthetic coding sequence
  source 1..246: mol_type = other DNA
atgagccagaagcccgccaaggagggcccccggctgagcaagaaccagaaatatagtgaacacttctccattcattgctgtccgccctttacctttctgaattccaagaaggaaattgttgaccgaaagtacagcatctgcaagtcgggctgcttctaccaaaaaaaggaagaggactggatttgttgcgcgtgtcagaaaactaggctaaagcgaaagattcgaccgaccccaaagaagaagtag

SEQ ID NO: 195999 - DNA, 552 bp, synthetic construct
  misc_feature 1..552: note = Description of Artificial Sequence: Synthetic coding sequence
  source 1..552: mol_type = other DNA
atgagccagaagcccgccaaggagggcccccggctgagcaagaaccaaaagtattctgagcacttcagcatacactgctgcccaccttttacctttcttaactccaagaaggagatcgtggatcgtaagtattccatttgcaaaagtggatgtttttatcagaagaaggaggaagactggatctgctgcgcctgccaaaagacaaggactagtcgccgcgccaaatcaccccagcggccaaagcagcagccagctgctccacctgccgtggtgcgggcacctgccaagccacgcagcccccctaggagcgagaggcagcctaggtccccgccccgatctgagagacagccaagatctccccctagatctgagaggcagcctagatccccaccaaggtctgagcggcagccccgtcccaggccagaggttcgccctccacctgctaaacaacgtccgccccaaaagtccaaacagcagccacgttccagtcctttaagagggcccggagcctctcgggggggaagtccggtaaaggcctctaggttctggtag

SEQ ID NO: 196000 - DNA, 246 bp, synthetic construct
  misc_feature 1..246: note = Description of Artificial Sequence: Synthetic coding sequence
  source 1..246: mol_type = other DNA
atgagccagaagcccgccaaggagggcccccggctgagcaagaaccagaagtacagtgaacattttagtatccattgttgcccaccctttactttcctcaatagcaaaaaagagattgtggatcggaaatactccatctgcaaaagcggatgcttctaccagaaaaaggaggaggactggatctgttgcgcctgccaaaaaactcgacttaagcgaaagatccgcccaacacctaagaaaaagtag

SEQ ID NO: 196001 - DNA, 177 bp, synthetic construct
  misc_feature 1..177: note = Description of Artificial Sequence: Synthetic coding sequence
  source 1..177: mol_type = other DNA
atgagccagaagcccgccaaggagggcccccggctgagcaagaaccagaagtattcagagcatttctccatacactgctgccccccttttacttttctgaactccaaaaaagaaatagtggatagaaagtactcaatttgtaaatctggatgcttttatcagaaaaaggaagagtag

SEQ ID NO: 196002 - DNA, 423 bp, synthetic construct
  misc_feature 1..423: note = Description of Artificial Sequence: Synthetic coding sequence
  source 1..423: mol_type = other DNA
atgctgcaggccgccgacttcatcgagcggaccgagaccgccggcgaactgtctcgaggtctcataggtgtgttgagttctcagatctcttggtgcttgttaaatgtaaacctcagtaaactgcctacacggctgcaacgactctcttgctctgtgctgaattcaagtcccgctatgcgcggaggagcacgaggcagacctcaattaacacttgaacgcccccttcgcccaggatgccgactgcacagctgcagcgaagcagagaagggtggctttgtgcgcaggaaagaaattatcctcttcccaccatgcgaggaccccgccagggggtggctatcggctaatcctgggagagagccctctcctggcatctgttggcacctaaatctgggcttgccaagtctgcataactgtgaagaatag

SEQ ID NO: 196003 - DNA, 816 bp, synthetic construct
  misc_feature 1..816: note = Description of Artificial Sequence: Synthetic coding sequence
  source 1..816: mol_type = other DNA
atgttcggcctgaagcggaacgccgtgatcggcctgaacctgtactgcggcggagccggactgggcgccggatccggtggcgctacccgccctggggggagactattggcaactgagaaggaagcatccgcccggcgcgagatcggcgggggcgaagccggagccgtgatcggcgggagtgcgggtgcctcgccaccatccactctgacccctgactctaggcgggtggccagacctcctcctatcggagccgaggtcccggacgtcaccgccacacccgctagattactgtttttcgcccccacacggcgcgcagccccattggaagaaatggaggcgcctgcagcggacgccatcatgagccctgaagaagaactagacggctacgagcctgagcctttggggaaacgtcctgctgtcttaccactgctcgagctggtcggagagtcgggcaacaataccagcactgatgggtctctgccatctacaccgccccctgccgaggaagaggaagatgagctttaccgccagtccctggagattatatcccgctacctgcgggagcaagcaacaggagctaaagacactaagcccatgggcaggagtggagctacatcaaggaaagccctggaaaccttgcgccgggtgggcgacggtgtgcagcgcaaccacgaaaccgcctttcaaggctgggtgtgtggagtattaccttgtcggggaccccggcgctggcaccaggaatgtgccgccggcttctgcaggtgctgctggtcccggagttggttcggtatctctaataagatcgcactgctgtag

SEQ ID NO: 196004 - DNA, 1053 bp, synthetic construct
  misc_feature 1..1053: note = Description of Artificial Sequence: Synthetic coding sequence
  source 1..1053: mol_type = other DNA
atgttcggcctgaagcggaacgccgtgatcggcctgaacctgtactgtggaggagctgggctgggagctggctcaggaggcgcaactcgcccagggggtcgccttttggccacagagaaagaggcttctgcacgccgggagataggtggtggagaggctggcgcggtcatcgggggctctgccggagctagtccgccttctacacttacccccgacagtcggcgcgtggcacggccaccccctattggggccgaggttcctgacgtcaccgcaacccccgccagattgctgttcttcgcccctaccagacgcgccgctccacttgaggaaatggaggcacccgcagctgatgccattatgagccccgaggaggagctggatgggtacgagccagagccactgggtaaacgccctgccgtgcttccattattagaactggtaggcgagagcgggaataacacttcgacagacgggtccctgccgagcactcctcctcctgcagaagaagaggaagatgagctgtacagacaatcgctcgagattatttctcggtacctgagagaacaagccactggcgcgaaggacaccaaaccaatgggacgctctggtgccacatcccgaaaagcactcgagacactacggcgcgttggggatggagtgcagaggaaccatgagacagcattccagggcatgctgagaaagcttgacatcaaaaatgaggatgacgtgaaatcactgtcaagggttatgatccacgtcttcagtgatggagtcaccaattggggaaggattgtaaccctgatatcctttggagcattcgtcgcaaaacaccttaaaaccatcaaccaggaatcatgtattgaacctctggcagaatctattacggatgttctggttcgtacaaaaagagactggcttgttaagcaaagagggtgggacggatttgtggagttctttcacgtggaagacctggagggaggaattagaaatgtgctgcttgctttcgcaggggttgctggagtcggcgccggactggcatacctgattcgctag

SEQ ID NO: 196005 - DNA, 840 bp, synthetic construct
  misc_feature 1..840: note = Description of Artificial Sequence: Synthetic coding sequence
  source 1..840: mol_type = other DNA
atgttcggcctgaagcggaacgccgtgatcggcctgaacctgtactgcggaggagccgggcttggagctggctccggaggggctacacgccctggaggacgtctccttgctaccgagatggaggccccggcagctgacgccattatgtctccggaagaggagctggatggatacgaacctgagccattggggaagcggcctgccgtgctgcccctgctggagctggttggcgagtccggcaataatacctctacggatggatccctcccatccacgccaccacctgctgaggaggaagaggatgagttatatcgccaatcactcgaaatcatctcccggtacctgagggagcaagcaactggcgcgaaggatactaaaccgatgggcagatctggcgccacgtcaaggaaggccctggaaaccctgcggagagtgggggatggcgtgcagcgaaaccacgagacggccttccagggaatgctgagaaaactggatatcaaaaatgaagacgacgtcaaatcattgagtagagttatgattcacgtgttttctgacggggtcactaactggggccgtattgtgacgctcatctcgtttggagcgttcgtggccaaacatctcaagactatcaaccaagaaagttgcatagagcccctcgcagagagtattactgacgtgctcgtgcgtactaaaagggactggctggttaagcagaggggatgggacggatttgtcgaattctttcatgtggaagatttggagggggggatccgcaacgtcctcctggcctttgctggcgttgccggagtgggtgccggactggcatatctgattcgctag

SEQ ID NO: 196006 - DNA, 1224 bp, synthetic construct
  misc_feature 1..1224: note = Description of Artificial Sequence: Synthetic coding sequence
  source 1..1224: mol_type = other DNA
atggtgaacgagtacaagaagatcctgctgctgaagggcttcgagctgatggacgattatcatttcacgtcaatcaagagcctgctggcatatgatctagggttgacgacgaagatgcaggaggaatataacagaatcaaaatcaccgacctgatggagaaaaagttccaaggcgtggcgtgcctggataaactcattgaactggccaaggacatgccatcattaaagaacctcgttaataacctgagaaaggagaagagcaaggtggctaagaaaattaaaacccaggaaaaagcacccgttaaaaaaattaatcaagaggaggtgggcctggctgctcccgcccctacggcacgtaacaagctgacgtccgaggctcgtggaagaattccagtcgcccagaagcgtaagactcccaataaggagaaaaccgaggcaaaaaggaacaaagtgagccaggaacaatctaaaccacctgggccctcaggtgcctctacttctgctgccgttgaccatccgccactgccccaaacttcaagtagcaccccaagcaacacgagtttcacgcccaaccaggaaacccaggctcaacgtcaagttgatgcccgtcgcaacgtgccccagaatgaccctgttaccgtggtggttctaaaagcaacagctccctttaagtatgagagcccagaaaacggcaagagtaccatgttccacgccactgtggcatcaaagacacaatactttcatgtcaaagtgtttgacatcaacctgaaagaaaaattcgtacggaaaaaggtcataacaataagcgactattccgaatgcaagggcgtgatggagattaaagaggcaagttctgtaagtgattttaaccagaacttcgaggtgcccaacagaatcattgagattgctaacaagaccccaaagataagccagctctataaacaggcctctgggacgatggtgtacggcttattcatgctgcagaaaaagtccgttcataagaaaaacaccatctacgagatccaggacaatactggctcaatggacgtagtgggatctgggaaatggcacaacatcaagtgcgagaaaggggacaagttgagacttttttgccttcagcttcgcacagtcgatcggaagctcaagctcgtctgcggctcccattcattcataaaggtgataaaagccaaaaaaaacaaggaaggtccaatgaatgtcaactag

SEQ ID NO: 196007 - DNA, 315 bp, synthetic construct
  misc_feature 1..315: note = Description of Artificial Sequence: Synthetic coding sequence
  source 1..315: mol_type = other DNA
tgacccaaccggatcatcgagatcgccaacaagacccccaagatctctcaactctataagcaggcctccggcacaatggtttatgggctcttcatgctacagaagaaatcagtgcacaagaagaacaccatctatgaaatccaagacaacacggggtctatggacgtggtgggctcaggcaagtggcataacattaaatgtgagaaaggcgacaagctcagactcttttgcttacagttgaggactgtcgacaggaaactcaagctggtgattaaggccaagaagaataaagaagggcccatgaacgtcaattag

SEQ ID NO: 196008 - DNA, 795 bp, synthetic construct
  misc_feature 1..795: note = Description of Artificial Sequence: Synthetic coding sequence
  source 1..795: mol_type = other DNA
atgcggcccgaccgggccgaggcccccggcccccccgccatggccgctggaggcccaggcgctgggagcgctgcgcccgtgtcttccacctcatcgctgcccttggccgctttgaacatgcgcgtccggaggcggttgtccctgtttctaaatgtccgcactcaggtagctgccgactggacggcactggcagaggagatggactttgagtatctggagattcgtcagctggagacccaggcagaccctaccggccgtctgctggacgcctggcaaggcagacccggagcaagtgtgggacgtctgcttgaactccttacgaaattaggcagggatgatgtgctgttggagttgggcccttccatcggacatatgcccgaacgcttcgacgcgtttatctgttattgtcccagtgacatccagttcgtgcaggagatgatacggcagctggagcagacaaattaccggttaaagttatgtgtgtccgaccgggatgttctccccgggacttgcgtgtggtctatcgcctcggagttgattgagaaaaggtgccgccgcatggtcgtggttgtgagtgacgactatctgcagagcaaggagtgtgacttccaaactaaatttgccctgagcctgagtcctggcgcacaccaaaaaaggcttattccaataaagtacaaggcaatgaagaaggagtttccatctatattgaggtttatcaccgtgtgcgattatacaaatccgtgcacaaagagctggttttggactcgcttagccaaagccctttccctcccttag

SEQ ID NO: 196009 - DNA, 615 bp, synthetic construct
  misc_feature 1..615: note = Description of Artificial Sequence: Synthetic coding sequence
  source 1..615: mol_type = other DNA
atgcggcccgaccgggccgaggcccccggcccccccgccatggccgcgggcgggcccggggcgggtagcgccgctcctgtcagctcaacgtctagccttcctctggccgcgttgaatatgagagtgcggaggcgcctgtctcttttcttgaatgtgcgaacccaggtcgccgccgattggacagctcttgccgaagagatggactttgaatatctggagatcagacaattagagacgcaggcagatcctacaggccggttgctcgatgcttggcagggccggcctggagcatcagtgggccgcctcctggagctgcttacaaaactgggaagagatgatgtcttactcgaactaggtccatctattgaggaggattgccagaagtacattttaaagcagcaacaggaagaagccgagaagcccttacaggtagcagctgtggattcgtcagtgcctaggacagcggagttggctggcatcaccactctagacgacccccttggagcagcgggatggtggtggctttctctcatgattacctgtcgggcacgcaacgtgacctcccgccccaacctacactctgcatctctccaggtacccatacggtcagactag

SEQ ID NO: 196010 - DNA, 480 bp, synthetic construct
  misc_feature 1..480: note = Description of Artificial Sequence: Synthetic coding sequence
  source 1..480: mol_type = other DNA
atgcggcccgaccgggccgaggcccccggcccccccgccatggccgcagggggccccggagcaggcagcgctgcccctgtgtcctcaacaagcagcctccctcttgccgcccttaatatgagagtaagacggcgcctgagcctattcctcaacgtgcggacacaggtcgccgctgactggacagcactggctgaggaaatggatttcgagtatttggaaatccgtcagctcgaaactcaggctgacccgactggtcgcctgctagacgcttggcaagggcggcctggcgcgtccgttggccggcttctcgagctgctcaccaagctaggccgcgacgatgtgctgctggaattgggtccatctatcggtgcggctggttggtggtggcttagtttgatgatcacatgtcgcgcgcggaacgtgacatcaagaccaaatttacattcggcttcattgcaggtacctattcgctcagactag

SEQ ID NO: 196011 - DNA, 807 bp, synthetic construct
  misc_feature 1..807: note = Description of Artificial Sequence: Synthetic coding sequence
  source 1..807: mol_type = other DNA
atgttccggatgctgaacagcagcttcgaggacgaccccttcttctccgagtctatactggcccatagagagaatatgcgtcagatgatacgctcctttagtgagccattcggccgtgatctattgtcaatttcagatggacgagggcgtgcccacaacaggagggggcataatgatggtgaggattctctcacacatactgacgtctcatcatttcagacgatggatcaaatggtcagtaatatgcgaaactacatgcagaaattggagcgtaacttcggtcagcttagtgtggaccctaacggacactctttctgttccagttctgtgatgacatatagtaaaattggggacgagccaccgaaagtatttcaagcctccactcagaccagaagagccccgggaggaatcaaagagaccagaaaagccatgagagacagcgactctggactcgaaaaaatggccataggccatcacatccatgatagagctcatgtcatcaaaaagagcaagaataagaagaccggagacgaggaggttaaccaagaatttatcaacatgaatgaaagtgatgcacacgcatttgacgaggaatggcaatcagaggttttgaaatacaagccgggcagacacaatctggggaacacgcggatgcggtccgtcgggcacgagaacccagggtctcgcgagctgaaaaggcgtgagaagcctcagcaatccccggcaattgaacatggtaggaggagcaacgtactcggtgacaagctccatatcaaggggtctagcgtgaagagtaacaagaagtag

SEQ ID NO: 196012 - DNA, 732 bp, synthetic construct
  misc_feature 1..732: note = Description of Artificial Sequence: Synthetic coding sequence
  source 1..732: mol_type = other DNA
atgcggcagatgatccggagcttcagcgagcccttcggccgggacctgttaagtatcagcgatggacggggacgcgcccacaatagaagaggtcacaatgatggggaagatagccttacccacacagacgtatcgagctttcaaacgatggatcagatggtgtcaaacatgaggaattacatgcagaagctggagaggaacttcggtcagctctcagttgaccccaatggccatagcttctgttcctcaagcgtcatgacatactccaagatcggggatgaaccgccaaaggtattccaggccagcacgcagacccgcagggctccagggggtataaaggagactaggaaggccatgagagactcggacagcggcttagagaaaatggccattgggcatcacatccatgaccgtgctcatgtcattaaaaaatcaaagaacaaaaagactggtgacgaggaggtaaaccaggagtttattaatatgaatgagagtgatgcgcatgcttttgacgaggagtggcaatctgaggtgttgaagtacaaacctggtcggcataacttagggaatacgaggatgagatctgtgggtcacgagaatcctggaagccgggagctcaaacggagggaaaagccacagcagtctcccgctatagaacacggccgaagaagtaacgtcctcggcgacaagctccacattaaggggagttcagtcaaaagcaacaagaagtag

SEQ ID NO: 196013 - DNA, 900 bp, synthetic construct
  misc_feature 1..900: note = Description of Artificial Sequence: Synthetic coding sequence
  source 1..900: mol_type = other DNA
atgctgaaggaggtgctgcagcgggagggcaagagctacaagagcgagaccctcatgtatatcaagaaagctcgagctagcgaaaataaactatcagagtccatcctggcacaccgcgagaatatgcgtcaaatgatacggtccttcagcgagccgttcggccgtgacctgctctccatctcagacggtagagggcgggcacacaacaggagaggacacaacgatggggaggatagtctgactgcaactagttgcagcttggtccctttcggagatttcggaggcatgcacacggacgtttcctcctttcaaactatggatcaaatggtgtccaacatgcgcaattacatgcagaaattggaaagaaatttcgggcagctgtctgtcgatcccaatggacattcattctgttcttcatccgtgatgacgtattcaaaaataggagatgaaccacctaaagtttttcaggcgtctacacagactaggagagcaccaggcgggataaaagaaactcgtaaagccatgcgggattctgacagcggcctggaaaaaatggcgataggtcatcacattcatgacagggctcatgtcattaaaaagtcaaagaacaagaagactggggacgaagaagtgaaccaggagtttataaacatgaatgagtctgacgctcacgcatttgatgaagaatggcagagcgaggtgctcaaatacaaacccggcagacataatctgggaaatacgcgtatgcgcagcgttggccatgagaatcccggaagccgtgagctcaagcggcgggaaaaaccccagcaatccccagcaatcgaacatggacgacggtcaaacgtattaggagataaactacacataaagggttcctcggtgaagtctaacaaaaaatag

SEQ ID NO: 196014 - DNA, 777 bp, synthetic construct
  misc_feature 1..777: note = Description of Artificial Sequence: Synthetic coding sequence
  source 1..777: mol_type = other DNA
atgcggcagatgatccggagcttcagcgagcccttcggccgggacctactgtccattagcgacgggcgaggcagagcgcacaataggcgtggacacaatgatggggaagactccctgaccgccacctcctgttctttagttccctttggagacttcggcggcatgcatactgatgtgagttctttccaaacaatggatcaaatggtcagtaatatgcgcaattacatgcagaagctcgagaggaatttcggacagctgagcgtcgatccaaatggacattccttctgctcaagctccgtgatgacctacagcaaaatcggagacgagccaccaaaagttttccaggcctctacccaaactaggagagctcctggggggataaaggagactaggaaagctatgagggactctgattccgggctagaaaagatggcaatcggccaccacattcatgatcgcgctcacgtgatcaagaagagtaaaaataagaaaaccggcgacgaggaggttaaccaagaattcatcaacatgaacgagtctgatgctcacgcgtttgacgaagaatggcaaagcgaagttctcaagtataagccaggacggcataatctaggcaacacacgaatgagatcagtcgggcacgagaatcccgggtctcgcgagctcaaacgccgtgaaaagcctcagcagtcaccggcgatcgaacacgggcggcgctccaacgtgctaggggacaagctgcacattaaggggtccagtgtcaagagcaacaagaagtag

SEQ ID NO: 196015 - DNA, 777 bp, synthetic construct
  misc_feature 1..777: note = Description of Artificial Sequence: Synthetic coding sequence
  source 1..777: mol_type = other DNA
atgcggcagatgatccggagcttcagcgagcccttcggccgggacctactaagtatttcagacggcaggggtagggcacacaacagaaggggccacaacgatggggaggattcgcttaccgccacatcctgcagtctggtgccatttggcgactttggcggtatgcatactgatgtttccagtttccagacaatggaccagatggtgagcaatatgcgcaactatatgcagaagttggaaagaaacttcggccaactgagcgtcgatccaaatggccacagtttttgcagcagcagcgttatgacgtactctaagataggagacgagccacccaaggtcttccaggcttctacacagacccggagggccccgggtggtattaaggagacaagaaaggccatgcgggattcagacagcggtttagaaaagatggccatcgggcaccacattcacgaccgagcacacgtaattaagaaatccaaaaataagaagacaggagatgaagaagtgaatcaagaattcatcaatatgaatgagtctgacgcccacgccttcgatgaagaatggcaatccgaggtgctgaaatacaagcccggtagacacaacctgggcaatacccggatgcgctccgttggccatgagaatccgggcagcagggaactcaaaagaagagagaagcctcagcagagccccgccatcgaacacggccgaaggtccaatgtcttgggcgataagttgcatattaagggcagttcagtaaaatcgaataagaagtag

SEQ ID NO: 196016 - DNA, 732 bp, synthetic construct
  misc_feature 1..732: note = Description of Artificial Sequence: Synthetic coding sequence
  source 1..732: mol_type = other DNA
atgcggcagatgatccggagcttcagcgagcccttcggccgggacttgctcagcataagtgatggacgcgggcgtgcccataaccggagggggcacaatgacggcgaggacagcctcacacacactgacgttagttcatttcaaactatggaccagatggtcagcaacatgaggaactacatgcagaagctagagcgcaactttggccagctcagcgtcgaccccaatggccatagcttctgtagtagctcagtgatgacctatagcaaaatcggggatgagcctcccaaggttttccaggcctcaacccaaactcgtagggctcctgggggcattaaagaaactcgaaaggcaatgcgtgacagcgacagcggccttgaaaagatggcaatcggccaccatatacatgaccgggcacacgtgataaagaaatccaagaacaagaaaaccggggatgaggaggtgaatcaggaatttatcaacatgaatgagtctgacgcacacgcctttgacgaagagtggcagtcggaagtgctcaagtacaaacccggccggcataatctgggaaacaccagaatgaggtccgtggggcatgagaatccaggcagccgggagctgaagaggagagaaaaacctcagcagtcccccgccatcgagcatggcagacgcagcaatgtactgggggataagctgcacattaaaggaagttccgtcaaatctaacaaaaagtag

SEQ ID NO: 196017 - DNA, 732 bp, synthetic construct
  misc_feature 1..732: note = Description of Artificial Sequence: Synthetic coding sequence
  source 1..732: mol_type = other DNA
atgcggcagatgatccggagcttcagcgagcccttcggccgggacttactgagtatcagtgacggaagaggcagggctcataataggcgagggcataatgacggcgaggattccttgacccacaccgacgtatcctcatttcagaccatggaccagatggtgtccaatatgaggaactatatgcagaaactcgagagaaatttcggccagctgtctgtggatcccaatgggcactcattctgctcatcttctgtgatgacatactcgaagattggggacgaacccccaaaggtgttccaggctagcactcaaactcggcgggcccccggcggcatcaaagagacgcgcaaggccatgagggactcggactccgggctagaaaaaatggccatcggacaccacattcacgatcgggctcatgtgattaaaaaaagtaagaataagaaaacaggggacgaggaggtgaatcaggaattcatcaacatgaacgaatctgacgcccatgctttcgatgaagagtggcaaagcgaagttctgaaatacaagcctggaagacataacctgggaaatacaaggatgcggtccgtcgggcacgaaaatccaggttcccgagaattaaagcgccgcgagaagcctcaacaatctcccgctattgagcacgggaggcgcagtaacgtattgggcgataaactgcacattaaaggatcctcggtgaagagcaacaaaaaatag

SEQ ID NO: 196018 - DNA, 603 bp, synthetic construct
  misc_feature 1..603: note = Description of Artificial Sequence: Synthetic coding sequence
  source 1..603: mol_type = other DNA
atgcggcagatgatccggagcttcagcgagcccttcggccgggacctgctgtctatatctgatggccgcggccgtgctcataatagaagagggcataatgatggggaggactctctgacccatacagatgtgagcagttttcaaaccatggaccagatggtgtctaatatgaggaactatatgcaaaaattggagcggaatttcattaaggaaacgcgcaaagctatgcgggattcggatagcggactggaaaaaatggctattggccaccatatacatgatcgggctcatgtgataaaaaagtccaaaaacaagaagacgggcgacgaggaggttaatcaggagttcatcaacatgaacgagtctgacgcgcatgcgttcgacgaagagtggcaatccgaggtcctgaagtataaaccgggaaggcacaacctgggaaatacccgcatgcggagcgtgggacacgaaaatcctggatcacgggaactcaaacgccgcgagaagccccaacagtccccggccatcgaacacggcaggaggagcaacgtcttgggggacaaactgcacatcaagggttcttccgtgaagagcaacaagaagtag

SEQ ID NO: 196019 - DNA, 747 bp, synthetic construct
  misc_feature 1..747: note = Description of Artificial Sequence: Synthetic coding sequence
  source 1..747: mol_type = other DNA
atgttccggttcatgcgggacgtggagcccgaggaccccatgttcctaatggatccattcgctatccatcgccagcatatgtcaagaatgttatccggcggtttcggatactcccctttcctttctatcactgatgggaatatgccgggcactcgcccagcaagcagacgcatgcagcaggccggcgccgtgtccccgtttggtatgctgggtatgtcaggaggattcatggacatgttcggaatgatgaacgatatgatcggcaacatggagcatatgacagccggtggaaattgccagacattctcctcttcgaccgtgatttcgtatagcaacaccggggacggcgcccctaaagtgtatcaggagactagcgaaatgaggtctgcccccggtggtatccgtgaaacacgacggacagtgcgagactctgactcgggcttggagcagatgtcgatcggtcaccatatcagagatcgcgcccatatcctgcagcgctctaggaatcacagaaccggtgaccaagaggagcggcaggactatattaatctggacgagtccgaggcggctgcctttgatgacgagtggcggcgagaaaccagtaggtttaggcagcagcgcccattggagtttcgtaggcttgagtcgtccggtgccggcggccgaagagccgagggtcctcctagacttgccattcagggcccagaggattctccatccagacagtcacgtcggtatgactggtag

SEQ ID NO: 196020 - DNA, 747 bp, synthetic construct
  misc_feature 1..747: note = Description of Artificial Sequence: Synthetic coding sequence
  source 1..747: mol_type = other DNA
atgttccggttcatgcgggacgtggagcccgaggaccccatgttcctgatggacccattcgctatccaccgtcagcatatgagccgcatgctgagcggaggcttcggctactccccctttctgtcaatcaccgatggtaacatgccgggaactcggccggcctcaagacggatgcaacaggccggagctgtgtcacctttcgggatgctggggatgtcaggagggttcatggacatgtttggcatgatgaacgatatgattggtaacatggagcatatgaccgccggtggtaactgccagacattctcctcatccactgtgattagctatagcaacactggagacggtgcgcccaaagtgtaccaggagacctctgaaatgcgctcggccccaggtgggatccgtgaaaccaggcgaactgtgagggactctgacagtggccttgaacagatgtctataggtcaccacatccgggatagagcccacatcctccaaagatctcggaatcacaggaccggggaccaggaagaacgtcaggattacatcaatctggatgaaagtgaggcggcagcctttgacgacgaatggagacgcgagaccagtcgcttcaggcaacagcggccgctggaatttcgtaggcttgagagcagcggagccgggggcagacgggctgaggggcccccacggctagcaatccaggggcctgaggactccccgtctcgacagagcaggagatatgattggtag

SEQ ID NO: 196021 - DNA, 747 bp, synthetic construct
  misc_feature 1..747: note = Description of Artificial Sequence: Synthetic coding sequence
  source 1..747: mol_type = other DNA
atgttccggttcatgcgggacgtggagcccgaggaccccatgttccttatggacccctttgccattcatcgacagcatatgtcacgcatgctgtccggcggattcggctattctcctttcttgtctatcacagacggaaacatgcctggcacacggccggcctctagacgaatgcagcaagccggggctgtttctccatttgggatgctggggatgagtggaggcttcatggacatgtttgggatgatgaacgacatgattgggaatatggagcacatgaccgccggcggtaattgccagacatttagctccagcacagtgatctcatacagtaacaccggcgacggggcgcccaaagtttaccaagagacatcagagatgaggagtgcccccggtggcattcgggaaactcggcgaacggttagagacagcgatagtgggctggagcagatgtcaatcggacaccacattagagaccgggcacacatccttcagcgaagcagaaatcaccgcaccggggatcaggaggagagacaggattatattaatctggacgagagcgaggccgccgcgttcgatgatgagtggcggagagagacgtccaggttccggcagcagagacccctggagttcaggagacttgaaagtagcggggctgggggccgacgcgcagagggaccccctagattggccatccaggggccggaagattctccttcacggcagagcagacgctacgactggtag

SEQ ID NO: 196022 - DNA, 747 bp, synthetic construct
  misc_feature 1..747: note = Description of Artificial Sequence: Synthetic coding sequence
  source 1..747: mol_type = other DNA
atgttccggttcatgcgggacgtggagcccgaggaccccatgttccttatggaccccttcgcaatccaccggcagcacatgtccaggatgcttagtggcggttttggttactctcctttcctttccattactgacgggaacatgccaggcacccgtccagccagccgacggatgcaacaggctggtgcagtctcaccgtttggtatgctgggcatgagcggaggcttcatggacatgtttggtatgatgaatgatatgattggcaacatggagcatatgacagctggcggaaactgccaaacctttagtagcagtaccgtgattagctacagtaatacaggggatggcgcccctaaggtctaccaggaaacttcggagatgcgaagtgctccaggcggcatccgggagacacgccggacagtacgggacagcgactctggcctggagcagatgtcgatcggtcaccacatcagagacagggcccacattctccaacgttctcgcaatcaccgaacgggcgaccaggaggagcggcaggactacattaacctggatgaatccgaggccgccgcgtttgacgacgagtggaggcgtgaaacctcccgtttcagacagcaacgaccattggaatttcgaaggctcgaaagctcaggagctggaggccgacgggcggagggaccccctagactggctattcagggacctgaagactcccccagccgtcagtcccgtaggtatgactggtag

SEQ ID NO: 196023 - DNA, 684 bp, synthetic construct
  misc_feature 1..684: note = Description of Artificial Sequence: Synthetic coding sequence
  source 1..684: mol_type = other DNA
atgatggccgccggcgccgccctggccctggccctgtggctgctgatgcctcctgtggaagtggggggggcgggcccgccacctatccaagatggggaatttacattcctcctgcccgccgggcgtaaacagtgcttctatcaaagcgcgcctgccaatgcctcgctcgaaacggagtaccaggtcatcggtggagcaggacttgacgtggacttcaccctcgagtcgcctcaaggagtcttgctggtcagcgagtctagaaaggccgacggagttcatactgttgagccaaccgaggcaggtgattacaagctatgttttgataattcctttagcactatcagcgagaaattggttttctttgaactcattttcgactcactgcaagatgatgaagaagtggaagggtgggccgaagctgtggagcctgaggaaatgctggacgttaagatggaggatatcaaagagagcatcgagactatgcgaactaggctggagagaagcatccagatgttaacccttcttagagcttttgaagcccgtgacagaaaccttcaggagggtaatctggaaagggttaacttctggtctgccgtaaacgtcgcagtgctgctgctcgtcgctgtccttcaggtgtgcacacttaaacggttctttcaggataagcgccctgtccccacctag

SEQ ID NO: 196024 - DNA, 873 bp, synthetic construct
  misc_feature 1..873: note = Description of Artificial Sequence: Synthetic coding sequence
  source 1..873: mol_type = other DNA
atgcggcccgccgtgctgggcagccccgaccgggccccccccgaggatgaaggccccgtcatggtaaaactcgaggacagcgaggaagaaggcgaggcggccctttgggaccccgggccggaagccgcaagactaaggttcaggtgctttcgctacgaagaggctactggcccccaggaggcgctggctcagctaagagagctctgtagacaatggctccggcctgaagtgcgatctaaggaacagatgctggaactgttggtattggagcaattcctgggagcactgcctccagaaattcaagctagagtacaaggtcagaggcccggcagcccagaagaggctgctgccctggttgacgggctcaggagagaacctggcgggcccagacgctgggtaaccgtccaggttcaggggcaggaagtactgagcgaaaagatggagccttcttcatttcagcctctacccgagactgaaccacctaccccagagccaggtcccaagacgccaccacgtactatgcaggagagccccctcggtctgcaggtgaaggaggagtcagaagtgaccgaagacagtgattttcttgaatccggccccctagcggctacgcaagaaagtgtgcccactcttttaccagaggaggctcagaggtgcggtacggtcctggaccagattttcccacatagcaagactggaccagagggtccatcctggagggagcatccgcgcgcactttggcatgaggaggccggcggaattttctctcctggcgccggcgcgggagccgcaccagctctgggcgcaggatggttgggcgctgccgtggccatgtatgtggcgcgatgctctgccaatgcagcaacctgctag

SEQ ID NO: 196025 - DNA, 2205 bp, synthetic construct
  misc_feature 1..2205: note = Description of Artificial Sequence: Synthetic coding sequence
  source 1..2205: mol_type = other DNA
atgcggcccgccgtgctgggcagccccgaccgggccccccccgaggacgaagggccagtgatggtaaagctcgaagattcagaggaagagggtgaagctgctctgtgggatcccgggccagaagctgcacggcttcgattccggtgttttaggtatgaagaggctactggccctcaagaggccctggcgcagcttcgcgaactatgccgccagtggctgcggcccgaagtccggtcaaaagagcagatgctcgagctcctcgtgctggagcagtttctgggagctttacctccagagattcaggcacgcgtacagggacaacgtcctggatcaccagaagaggccgcagccttggtggacggccttagacgtgaaccaggtggaccgagaagatgggtaaccgtgcaggtccaaggccaagaagtactctcagaaaagatggagccgtcatctttccagcctctaccagaaaccgaacctcctacccctgaaccaggtccaaaaaccccaccacgcacaatgcaggaatcccccctgggcctgcaagtgaaagaggagtctgaggttacagaagactcagattttttagagagcgggcctctggctgccacgcaggagagtgttccaaccctactccccgaagaagcccagcgctgtggtacagttctagaccaaatctttccacatagtaaaactgggcctgaggggccctcctggagagaacacccacgtgccctctggcatgaggaagctggaggtatcttctcgcccggatttgcccttcagctgggaagcatcagcgctgggcccggcagcgtctctccgcacctgcatgttccatgggacctcggaatggcgggattatctggtcagattcagtcacctagtagagagggggggttcgctcacgcacttcttctgccgtccgacctgaggagcgagcaggaccctactgacgaagacccctgcagaggggtcggccccgccctgattactacgcgctggcggtctcccaggggtcgatcaaggggcagacccagtacaggcgggggcgtagtgagaggtggccgctgcgacgtgtgtgggaaggtgttttcccagaggtccaatctcctgaggcaccaaaagatccacaccggggagaggccttttgtttgcagtgaatgtgggcgctctttctcacggagcagtcatttgttacgccatcaactgacgcacaccgaagagcgaccttttgtgtgtggagattgtggccagggcttcgttcgatccgcccggttggaggagcaccgaagagtccacacaggggagcagccgtttagatgcgctgaatgtggtcagtcctttagacagcgcagtaacctgttgcaacaccaacgcatccacggtgaccctcctggacccggagccaagccacctgctcccccgggagctcctgagccacctggcccatttccttgctcagaatgccgggagagttttgctagacgggccgtcctgcttgagcaccaggctgtccacaccggggacaaaagttttggttgtgtggagtgcggcgaaagatttggcagacgcagcgtgctgctgcagcatagacgggtgcactcaggggaaaggccgttcgcctgcgcagagtgcggccagtcatttcggcaacgatctaatcttacacagcatcgacggatacacaccggggaacgcccatttgcctgcgccgaatgcggtaaagcttttcggcaaagacccactctaacacagcacctccgagtccatacaggagaaaagccatttgcatgtcccgagtgtggccagagattctctcaaaggcttaagttgactcgacaccagcggacccacactggggaaaaaccatatcactgcggagagtgcggactcgggtttacccaggtctctaggctgacagaacaccagaggattcacacaggagagcgtccttttgcttgccccgagtgcggacaatcatttcggcagcatgctaatctcacgcaacatcggaggatacacaccggggagcgtccttacgcatgtcctgagtgcggtaaagccttcaggcagcgcccaacccttacccagcacctgcgcacacacagacgcgaaaaaccctttgcatgtcaagactgtggaaggcgctttcaccagtccactaaattaatccagcaccagagagttcactcagccgaatag

SEQ ID NO: 196026 - DNA, 1539 bp, synthetic construct
  misc_feature 1..1539: note = Description of Artificial Sequence: Synthetic coding sequence
  source 1..1539: mol_type = other DNA
atggcccacagctgccggtggcggttccccgcccggcccggcaccacaggcgggggcggaggcgggggccggagagggctgggtggcgctccccggcaacgagtgcccgcattactgctgccgcctggtccaccagtcggaggtggcggcccgggcgctccaccatcgcctcccgctgttgctgcagcagccgcggcagcggggagcagcggggcgggcgtgcccggtggcgcagccgcagctagcgccgctagtagtagcagcgccagctctagtagcagcagttcatcatccgcgtctagcggccccgcactgctgagagtgggcccaggattcgacgcagctcttcaggtgtcagctgccatcggaactaacttgcgcagattccgtgccgtgttcggtgagtccggagggggaggaggaagcggcgagctgacaacacagattccatgctcgtggagaactaagggacacatacacgacaagaagaccgaaccattcaggttgctcgcatggtcgtggtgcctaaacgacgagcagtttttggggttcggctcggatgaagaagtgagagtacggtcacccacacggagtccctcggtgaaaactagtcctaggaaaccaaggggtcggcctcgcagtgggtcagacagaaattcagccatcttgtcagacccatctgtgtttagcccccttaataaatcagagacgaagagtggggacaaaataaagaaaaaggattctaaatccattgagaagaaacggggccgccctcctacgtttccaggagtcaaaatcaaaatcactcacgggaaggatatttcggaactgccaaaaggtaacaaggaggattcattaaagaagatcaaaaggacacccagcgccactttccagcaagcgacaaaaatcaaaaaactgagagcaggaaaactctcccctttaaaatcgaaattcaagaccggaaaattacaaatcggcagaaaaggtgtccagatcgtgaggcgacgaggcagaccgccctccacagagcggatcaaaacccccagtggcctgctcataaacagcgagttagaaaaacctcagaaagtgagaaaggataaggagggcaccccccccctgacaaaagaagataaaactgtcgtacgtcagtcacccagacggatcaagcctgttcgaatcatcccttcttctaagagaacagatgccacaatagcaaaacagctactccagagggccaagaaaggggcgcagaagaagatagaaaaggaagcagctcagctacagggaagaaaagtcaagactcaagtcaagaacatccgacaattcattatgcctgttgtctccgccatcagctcacggatcatcaaaacccctagaagattcatagaagacgaagactatgatccccccatcaaaatcgcccggttagaatcaaccccaaactcccggttcagtgccccaagctgcgggtctagcgagaaatctagtgcagctagtcagcacagttcgcaaatgtctagcgatagttctaggagctag

SEQ ID NO: 196027 - DNA, 11796 bp, synthetic construct
  misc_feature 1..11796: note = Description of Artificial Sequence: Synthetic coding sequence
  source 1..11796: mol_type = other DNA
atggcccacagctgccggtggcggttccccgcccggcccggcaccacaggcggtggcgggggtggcggtcgcagaggcctaggcggcgcaccaagacagcgcgttcccgcgctgctgctgcctcctggcccacctgtgggcgggggtgggcccggagcgccaccctcaccgcccgctgtcgccgctgccgccgccgctgcagggagctccggagctggcgttccaggcggtgctgcagccgcctccgctgcctcttcaagctccgcatcttcctcttcatcatcgtcttcttccgctagctcaggacctgccctcctccgcgtaggccccggtttcgatgccgccctccaagtgtctgctgctataggtactaatctgaggcggtttagggcagtcttcggggagagtggcggagggggggggagtggtgaagacgagcaattcctgggatttggaagtgacgaggaagtgcgtgtgcggtcacccacccggagtccaagcgttaagacttctccacgtaaacctagagggcgtcctcgctctggctccgacagaaactccgccatcctgagcgatccctctgtgttcagtcccttaaacaaatccgaaaccaagtctggcgacaaaattaagaaaaaagattcaaaaagcattgagaagaagaggggccggcctcctacattccccggcgtcaagataaaaataacccatggcaaagatattagcgaacttcccaagggaaacaaggaggactctctcaagaaaatcaagcggactccctcggccacgttccagcaggctacaaagattaaaaagttgcgggcaggcaagctgtccccactgaaatcaaagttcaagaccggcaaactgcagatcgggaggaagggagtccagattgtgagaaggcgcgggaggccccccagtactgaacgtatcaagaccccaagtggccttctcattaactcagaactggagaagccccaaaaggtccgcaaggacaaagaggggacccctccactgactaaagaagacaagacagtggtccgccagtctccccggcgcattaagccggtgcggataatcccatcaagcaagaggaccgacgctaccattgccaaacagctgctgcagagggcgaagaagggagcccagaagaagattgagaaggaagcagcccagctgcaaggtcgcaaggttaaaacgcaggttaaaaatattcgtcaatttatcatgccagtcgtgtcagctatcagtagtaggattatcaagaccccaagacgcttcattgaggatgaggactatgaccctcccatcaagatagctcgtcttgagtctactcccaatagtcggttctccgctccatcttgcggatcgtctgagaagtcatctgccgccagccaacacagctctcagatgagttcggattcatctaggagcagttcccctagcgtggacacaagtactgacagccaagcttccgaagagatccaggtgcttcccgaagagcgatccgatacgccagaggtgcaccccccactccccatctcacagtcccctgagaatgagagcaacgacagacggtcccggcgctacagtgtcagtgagcgaagctttgggtcaaggaccacgaagaaattgagcacccttcagtctgcaccgcagcaacagacgtcgtcctcaccaccgccccctcttctgacgccacccccccctctacagccggcttcctctatcagtgatcacaccccgtggctcatgccacctacgatccctctcgcctcccctttcctgccagctagcaccgcccctatgcaaggcaaacgcaagtctattctaagagagcccactttccgttggacgagcctgaagcactccaggtcggaaccccaatacttctcctctgcgaagtacgccaaagaaggcctcatcaggaagccgatctttgataacttccggccacctccattgacaccggaggacgtgggattcgctagtggattcagtgcttcaggcacagcagcatccgccaggctgtttagccccctgcattcaggcactcgctttgatatgcacaaaagatctcccctcctgcgagccccacgtttcactccctccgaagcgcactccagaatttttgagtctgtcacgcttccaagcaaccgtacgagtgctggcacatcctcatccggagtgtccaatcgtaagcggaagcgcaaagtgttctccccgattcgctccgagcccaggtccccgagtcacagtatgcggactagatcaggtcggctttcctcttccgaactcagccctttgacccctcctagttccgttagttcttccttaagtatatccgttagtccactggctacctctgcccttaaccctacttttacattcccttctcattccctgacccagtcaggggagagcgcggaaaagaatcagagacctagaaaacaaacctctgccccagcagaaccattctcaagtagttctccgacaccactgttcccatggtttacccccggctcccagacggagcgcgggaggaataaagacaaggcacccgaagaactttcaaaagatcgggacgctgataagtctgtggagaaggataagtccagagagagggatcgtgagcgcgaaaaggagaacaagcgggagtccagaaaagagaagcgtaaaaagggctccgagatccaaagctccagcgccctctaccccgttggtagggtctcaaaagagaaggtggtgggtgaagatgtggcaacatcttcctccgccaagaaggctacaggacggaagaagagcagctcccatgatagcggaaccgatataacatctgtaacccttggcgacaccacagctgtgaagacaaaaatcctgatcaaaaaagggagggggaacctggagaagacaaatctggacctgggacccaccgcccctagccttgagaaggagaaaacactgtgtctctcaacaccctcaagtagcactgtgaaacattctacttcctcgatcgggtccatgctggcgcaagctgacaagctaccaatgacagacaaacgcgtggcatctctgcttaaaaaagcaaaagcacaactgtgtaaaatcgagaagagcaagagcctcaaacaaaccgaccagcccaaagcgcagggtcaggaatctgatagctccgagacctcagtgagaggacctcgcatcaaacacgtgtgtcgacgtgccgccgtggcactgggaagaaaacgcgccgtgtttcctgacgatatgccaaccctttcggccctaccctgggaagagagggagaaaatcctcagttctatgggtaacgacgataaatcatccatcgcggggtccgaggacgctgaacctctcgcacctccaatcaagccgattaaacctgtgaccagaaataaggcccctcaggagccaccggtcaaaaaaggccggaggtcacgaaggtgtggccagtgccctgggtgccaagttcctgaggactgcggcgtgtgcacaaattgtctggacaaaccaaaatttgggggacggaacataaaaaaacaatgctgcaaaatgcggaaatgtcaaaaccttcagtggatgccatccaaggcctatctgcaaaaacaggcgaaggctgtgaagaaaaaggaaaagaaaagtaaaactagcgaaaagaaggactcaaaagagtcgtcagtagttaaaaacgtggtcgattcttcccagaaaccgactccgtccgcccgcgaggaccccgcccccaagaagagctcctcagaacccccaccgagaaaacccgtagaagaaaaaagcgaggaaggcaatgtgtcagcccctggcccagagtcaaaacaggctaccacccctgcctcccggaaatcctccaaacaggttagtcaacccgcactcgtcatccccccacaaccccccacaaccggacctcccagaaaagaagtgcctaaaaccacacctagcgaaccaaagaaaaagcagcctcctccgcccgaatccggcccagaacagagcaagcaaaagaaagtagccccacgcccttccatacccgttaaacaaaagcctaaggaaaaggagaaacctcccccagttaataagcaagaaaatgcaggaaccctgaacatcctgtccactctgtccaatggcaattcctctaagcagaagatccccgcggatggcgtgcaccgtattagagtcgattttaagttcgtatactgccaggtgtgttgtgagcctttccacaagttctgcctggaggaaaacgagcggcccctggaggatcagctggaaaactggtgttgccgaaggtgcaaattttgtcatgtgtgtggccgtcagcatcaggcgaccaagcaactgctggagtgtaataaatgccgcaactcgtaccatcctgagtgtcttggacctaactaccctaccaaaccaactaaaaagaaaaaggtgtggatctgtacaaaatgtgttaggtgcaaaagctgcggctcaacaactccagggaaaggctgggacgcccagtggagtcacgatttttctctttgccatgattgtgccaagctgtttgccaaggggaatttttgtcctctgtgcgacaaatgctatgatgatgacgactatgaaagtaaaatgatgcaatgcggcaaatgcgacagatgggtgcacagtaagtgtgagaatctttcagatgaaatgtatgaaattctgagtaatctcccagaaagcgttgcctacacctgtgtgaactgtacagagagacatcctgcagaatggagactcgctctggagaaggagttgcaaatcagcctaaagcaagtgcttactgccctgttaaatagtcgaacgactagccatctgctgaggtaccgccaggccgcaaagccccctgatctaaatccggagacagaggaatctattccctctcggtcctcacccgaaggtcctgatccacccgtcctgactgaagtcagcaaacaggacgaccagcagcctctagacttagaaggtgtgaagcgtaagatggatcagggcaactatacatccgtgttggagttttcagacgacattgtcaaaataatacaggctgctatcaatagcgacggtggccaaccagaaataaagaaggccaatagcatggtgaagtcttttttcatcagacagatggagcgcgtgtttccctggttttccgtgaaaaagtcccgattctgggagccaaataaagtcagcagcaatagcggcatgctgccaaacgccgtactccctcctagcctcgatcacaattacgcccagtggcaggaacgcgaagagaattcccacactgaacaaccacccctcatgaagaagataataccagccccaaagccgaaaggaccaggagaacccgacagtcccaccccactgcacccacccacccctccaatactctctactgaccgctcacgcgaggatagcccagagctgaatccaccccccggcattgaggacaaccgccaatgcgccttatgccttacttacggcgacgattcagcgaacgatgctggccgcctcctatacattggccagaatgagtggacccatgtcaattgcgcactttggtctgctgaggtgtttgaagacgacgacgggagcctgaaaaacgtgcacatggccgtgatcaggggcaaacagctgagatgtgaattttgtcagaagcctggagccactgttggatgttgtttaacctcgtgtacgtcaaactaccattttatgtgcagccgcgccaaaaactgcgttttcctcgacgacaaaaaggtctactgtcagaggcacagggacctaattaaaggcgaggtcgttcccgaaaacggattcgaggtgtttcgacgggtgttcgtggacttcgaagggatctccctgcggaggaagtttctgaatggattggagcccgagaatatccatatgatgatcggctccatgacaattgactgtttggggattctcaatgatcttagcgactgtgaagacaaactattccccattgggtaccagtgtagtcgagtttactggtcgactaccgatgcaagaaagcggtgtgtctatacatgcaaaattgtagagtgtagaccaccggtggtggaacccgacatcaacagcactgtggaacacgatgagaacaggacgattgctcactctccaactagcttcacagagtcctcttccaaggaaagtcagaacaccgcagagatcatttcgcccccctccccagaccgtccacctcactctcagacctcaggtagctgttactatcatgtgatttctaaagttccccgtatccgaactccgagctacagccctacacagcgatcacctgggtgcaggccactcccctcagctggaagtcctacacccaccacacatgaaattgtcaccgttggcgatccccttctgagctcggggctccggtctatcggaagccggcggcactccacctcatctctttccccacaacgctccaaactaagaattatgtcccctatgcggactggcaatacttactcaaggaataacgtgagcagcgtttccacaaccggaactgctaccgacctggagagttccgcaaaagtggtggatcacgtcctaggcccacttaatagcagcacaagtctgggacaaaatactagcacctcttctaacctgcagcgcactgttgtcacggtcggcaacaaaaacagtcatcttgacgggagttcgtcctctgaaatgaagcagtcctccgcctccgacctggtgagcaaaagctcttctctcaaaggcgagaagactaaggtactgtcatcgaaatcatctgaagggagcgcccataacgtggcatacccaggcattcctaaactcgctcctcaggtacacaacaccacctctagagaacttaatgtaagcaagatcggtagctttgctgaaccaagctccgtgtcgttttcttcaaaagaggctctgtctttccctcacctgcacctccgcggccagcgaaatgatagggatcaacataccgactccacacaaagcgccaacagcagtccagatgaggacacagaggtgaagactctgaaactgtccggaatgtcaaataggtctagcattatcaatgagcatatggggtcaagcagccgcgatcgcagacagaagggtaaaaagagctgtaaggagacgttcaaggagaaacactctagcaagtcttttctggaacccgggcaagtcactaccggggaggaaggtaacctcaagcccgaattcatggacgaggtgctgacacctgaatacatgggacagcgaccatgtaataacgtgagcagtgataagatcggggacaaggggctgagtatgccaggagtgcccaaagcaccccctatgcaggtggaagggagcgctaaagaactgcaggctcctagaaagcgcactgtcaaagttaccctcacgcctctcaaaatggagaacgaatcccaatcaaagaacgcgttaaaagaatccagtcccgcttctccgctccaaattgagtcaacttccccaaccgagccgatatctgcctcagagaaccctggcgacgggcctgttgcacaaccaagtcccaataacacttcttgtcaagactcccagtcaaataactatcagaatttacctgtacaggatcgtaatctgatgcttccagacggccctaaacctcaggaggacggcagctttaagcgcagataccctaggcggtccgcgcgggctaggtctaacatgttcttcggtttgaccccactatacggagtcaggtcctacggtgaagaggacatccccttttattcgtcctccacagggaagaagcgcgggaagaggagcgcggaggggcaggtggacggagccgatgacctgagtacatctgatgaagatgatctctactactacaattttactagaaccgtcattagctccgggggagaggagcgcctggctagccacaacctctttcgggaagaagaacagtgtgacttgcccaaaataagccagctggatggggtggatgacgggacggagagcgacacctctgttaccgcgactaccagaaagagttcccagattccaaagagaaatggtaaggagaatggcacagagaacctgaaaatagataggcctgaagatgcgggggagaaagagcatgttaccaaatctagtgtaggtcataaaaatgaacccaagatggacaactgccacagtgtgtcgcgcgtaaagactcagggtcaggacagcctcgaggcacagctatcatccttggagagcagtcgacgcgtccacactagcaccccatctgacaagaatctgttagatacatataatactgagcttctcaaatctgacagcgataataacaattccgatgattgcgggaatatcctgccatccgacatcatggacttcgtactgaaaaacacgccttccatgcaggctcttggggagagccctgaaagtagctcttccgagctgctcaatctgggagaaggtctggggctggatagcaaccgggaaaaggatatgggactctttgaagtgttcagccaacagctccctaccaccgagccagtggacagttccgtcagctctagtatttccgcagaggagcagtttgaactgccgctggagctgccttcagacctgagtgtcctaaccacccgctctcctaccgtccccagtcagaacccaagccgactcgcggttattagtgattccggtgaaaagagagttaccatcaccgagaagagtgtggcctcttcagaaagcgaccctgctctgctctctcccggagtggacccaacccctgagggtcacatgaccccagatcacttcattcagggccatatggatgccgatcacatttccagtccgccatgtggcagcgttgaacaagggcatggaaataatcaagacctgacaagaaattcgtccacacccggcctgcaggtgccagtaagcccaacggtgccaattcaaaatcagaaatacgttcctaacagcaccgacagtcctgggcccagccagatcagcaacgctgctgtccagaccacaccaccacacctgaagcccgctactgaaaagctcatagtggtgaatcaaaatatgcagccgctctacgtgctgcaaactctcccgaacggagtgactcagaaaattcaactgacatcttcagtcagctcaacaccctccgtgatggaaactaacaccagtgtcttgggcccgatgggtggagggcttactctgaccacagggctcaatcccagtctcccgacatctcaatcccttttccccagcgcatcgaagggcttgctgccaatgtctcatcaccagcaccttcatagctttcccgccgcgacccagtcctcatttcctcctaacatttccaaccccccaagcggactgctaataggggtgcagccaccacccgacccacagttgctagtgagtgaatcctcacagagaacagacctcagcactacagttgcaacaccttcctctggcttgaaaaaacgccctattagccgcctacagacgagaaaaaacaagaagctcgcgcctagtagcactccctcaaatatcgcaccctctgacgtggtgtctaatatgacactcataaattttactccctctcagctccccaaccaccccagtttgctcgacctgggcagcctgaacacatctagccataggactgtacccaatattatcaagcgaagtaaatcttctattatgtattttgaaccagcccctctactaccccaatccgtgggcggcacggccgccacagctgcgggcacttccacaatttcccaggatacatcccaccttacaagcggctcggtgagcgggttagcctcctcaagttctgtgctcaatgtagtttctatgcagaccacaacgacaccaacctcaagcgcttcggtccccggacatgtgactctcacaaaccctcgcctgctgggaaccccagatattgggagcattagtaacctgcttatcaaggctagccagcagagcctgggtattcaggaccaaccggtggccctaccacccagcagcggcatgttcccccagcttggcacaagccaaaccccgagcaccgcagcaattacggcggccagctccatatgtgtacttccctccacacaaaccactggcataactgcagcatctccttcaggggaggcagacgagcattaccagctgcagcacgtgaatcagctcttggcttccaagaccggcatccacagttcgcagcgagatctcgattcagcttccggaccccaggtgtctaacttcacacagaccgtggatgctccaaactctatggggctggaacagaacaaagctctctctagcgccgtccaagccagtccaactagcccaggcggatccccgtcatcacctagtagcgggcagaggtctgcctccccatcggttccaggaccaaccaagccaaaacccaagactaagaggtttcaactgccactggataaggggaatgggaagaagcataaggtctctcacctccgtactagttctagtgaggcacacattcccgatcaagagaccacatccctgacttccggtactggcacccccggagcggaggccgaacagcaagatactgcttctgtggaacagtcatcacaaaaagagtgcggccaacccgctggacaagtggccgtgctgcctgaagtccaggtgacccagaatcccgccaatgaacaggagtccgccgaaccaaaaaccgtcgaggaagaggagagtaacttttcctctccgctgatgctctggttgcagcaagagcagaagagaaaggaatctatcacagaaaaaaagcctaagaagggtctggtttttgagattagtagtgatgatggctttcagatttgcgctgagagcatcgaggatgcctggaaaagcctgaccgacaaagttcaggaagcgcggagcaacgctcggttgaaacagcttagtttcgccggggttaatggtttgagaatgctgggcattctgcacgacgctgttgtgttcctaatcgagcaactgtccggggcaaagcattgtaggaattacaagtttcgattccataaacctgaagaggctaacgaaccacccctcaatccccatggttctgctcgtgctgaggttcaccttcgtaagtccgcatttgatatgttcaatttcctcgcatctaagcaccgccagccacccgaatacaatcctaacgacgaagaagaggaggaggtgcagttgaagagtgcacgcagggcgacaagtatggacctgcccatgcctatgaggtttagacacttgaagaaaacatctaaagaggccgtgggggtgtaccgatcccctatccacggtcggggcctcttctgtaaacggaacatcgacgctggcgagatggtgattgagtatgcggggaatgtaattagatcaatccagacagataaacgggagaaatattacgatagcaaagggattggatgctatatgtttcggatcgacgattccgaggtggtggacgccacaatgcacggaaatgcagcgcggttcataaaccactcatgcgagcccaactgttactctcgcgtcattaacattgacggacagaaacatatcgtgatatttgctatgcgcaagatttacagaggggaggagctgacttacgactataaatttcccattgaagacgcttccaacaagcttccttgtaactgcggcgcaaaaaaatgcaggaaatttcttaactag

SEQ ID NO: 196028 - DNA, 8640 bp, synthetic construct
  misc_feature 1..8640: note = Description of Artificial Sequence: Synthetic coding sequence
  source 1..8640: mol_type = other DNA
cacgcccaccccgagtgcctgaccatggagcgggagaagatcctgagtagcatgggaaacgatgacaagtccagtatcgctgggtccgaggacgccgaaccacttgccccacccataaagccaatcaaacctgtcaccaggaacaaagccccccaggagccccctgttaaaaaaggccgccgaagtaggcgttgtggccagtgtcctgggtgtcaggtgccagaagactgcggcgtctgtaccaactgtctggacaaaccgaaatttggtggccggaacatcaaaaaacaatgctgcaagatgcggaaatgtcagaacctccagtggatgccttctaaagcctacctgcagaagcaagccaaggccgttaagaaaaaggagaaaaagtccaagactagtgaaaaaaaggactcaaaggagtcgtcggtcgtgaagaatgtggtggactcatcacaaaaacctactcctagcgctagggaggaccctgcccccaaaaagtcaagttcggagcctcccccccgtaaaccagtggaggagaaatcagaagaaggaaatgtatctgcaccagggccagagagcaaacaggccacgaccccagcctcacggaagtcgagcaagcaggtctcccagcctgccctcgtgatcccaccccagccaccaacaaccgggccaccaagaaaggaggttcccaagaccacacccagcgagcctaagaaaaagcaaccacctcctcccgagtcgggccccgaacaaagtaaacagaagaaggtggcccctcgcccttcaattcctgtcaaacaaaagcccaaggagaaggagaagccaccgcctgttaacaagcaagagaacgccggtacccttaatatcctcagcaccctgtctaacggtaatagctccaagcaaaaaattccggctgatggcgtgcaccgcatacgagtggatttcaaagaggactgtgaggccgagaatgtctgggagatgggcgggctgggaattttgacttctgtccccataacaccccgggtcgtatgtttcctgtgtgcgtcgagcggacacgttgaattcgtatactgccaagtctgctgcgagcccttccataagttttgtctagaggagaacgaaagacccctcgaggaccagttagaaaattggtgctgtcggcggtgcaagttttgccacgtatgcggtagacagcaccaggcgaccaaacagttgttggagtgcaacaagtgccgcaattcctatcacccagagtgtttgggacctaattatcccaccaagcctactaaaaaaaagaaggtgtggatctgtacaaagtgcgtcagatgtaaaagttgcggcagtaccaccccaggcaaggggtgggatgcccagtggtcccacgatttcagtctgtgccacgattgcgcgaagcttttcgccaagggcaatttttgcccgctctgtgataagtgctacgatgacgacgattatgagtccaaaatgatgcaatgcggcaaatgcgatcgctgggttcattctaaatgcgaaaatctctcagacgaaatgtatgaaatcctgagcaatctgcccgagtccgtggcatacacatgcgtgaactgcaccgagcgccacccagcagagtggcggctcgccctggagaaggagctgcaaatctcactcaagcaggtattgacagctcttctcaacagtcggacgacgtcgcacctgctgaggtacaggcaggctgcaaaacccccggacctaaaccccgaaaccgaagagtcaattccatctcgaagctcccccgagggaccagatccaccagtgctaaccgaagtgagcaaacaggacgatcagcagcctttagatttggaaggagtgaagagaaagatggaccaaggaaactatactagcgtgctggaattcagcgacgacatcgtgaaaattatccaggccgccattaactctgatggcgggcaaccagagattaaaaaagctaacagcatggtaaaatcatttttcattaggcagatggagagagtgttcccgtggtttagtgtgaaaaagagtaggttctgggaacccaacaaggtctcctccaactctggaatgcttcctaacgccgttttgccccctagcctggaccacaactatgcccagtggcaagagagagaggaaaatagtcacaccgaacagcccccccttatgaagaagataataccagctcctaagccaaagggccctggggaaccagactctccaacacccctgcacccgcctacaccaccaattctgagtacagacagatcacgcgaagattctccagaacttaatcccccgcctggtatagaagataatcggcagtgtgcgctctgcctaacgtatggtgatgatagcgccaatgatgctggacggctgctttatattggacagaacgagtggacacatgttaactgtgccctctggtccgccgaagtcttcgaagacgatgatggtagcctgaaaaatgttcatatggccgttatacgcggaaagcagcttcggtgcgagttctgtcagaaacccggagccacagtcgggtgctgtcttacctcatgcacatctaactaccattttatgtgctcccgcgccaagaattgtgtgtttctggacgacaagaaagtgtattgccagcgacacagggatctcattaagggagaagtagtgcccgagaatggttttgaggtctttaggagggttttcgtcgacttcgaggggatctctctgcggcgcaaattcctgaatggtctggaacccgaaaacattcatatgatgattggctccatgacaattgattgtcttggaatcctgaacgatctgtctgattgcgaggacaagctgtttcccatcggatatcagtgctcccgggtctactggagtaccacagacgcaaggaaaagatgcgtttatacttgcaagatcgtggagtgtcgtcctccagtggtggaacccgatattaattccacagttgaacacgacgaaaaccggaccatcgctcactccccaacgtcgtttaccgagtccagcagtaaagagtcacagaatactgccgaaattataagtcccccttctcctgatcgcccaccccatagtcaaacatctggatcctgttattatcacgtgatttccaaggttcccagaattcgcacaccctcctatagccctactcagaggagcccaggttgccgcccactgcccagcgctgggtcccctactcctacgacacatgagatcgtgacggtgggtgatcccctcctgtcctcaggtctgcgctcaattggctcaaggcgacactctacttccagcctcagtccccaacgcagtaagcttcgcataatgtcccctatgcgtacggggaacacgtactctaggaataacgtctcgtctgtctcaactactggcacagctaccgatctcgaaagcagcgcaaaggtggtcgatcacgtgctgggccctctgaattcttcaacttcacttggccagaacacaagtacctctagcaacctgcagcgcacggtagtgactgtgggcaacaagaatagccatctcgacgggagttcaagctccgagatgaaacagtccagtgccagtgacctggtgtctaagtcttcctctctgaagggagagaaaaccaaggtgttatctagcaaaagctctgaggggtccgctcacaatgtcgcttaccccggcatacccaagttggcccctcaggttcacaataccacatcccgggagttgaacgtgtctaaaatcggatcattcgcggagccgtcatctgtgagtttttcttcaaaggaagcactatcatttcctcacctacaccttagagggcaacgaaatgatagagatcagcacactgatagtacccagtccgcgaattcatcaccagacgaggatacagaagtaaaaacgcttaaactgtctggaatgagtaatagatcctcgatcatcaacgaacacatgggctcatccagcagggaccgcaggcaaaaggggaaaaagagctgtaaagagactttcaaggagaagcattccagcaaatctttcttggagcccggtcaggtcacgaccggggaggaaggtaatttaaaacccgagtttatggacgaggtgttaacaccagagtatatgggccagaggccttgcaacaatgtcagctcagacaagattggagataaggggctgagcatgcccggtgttccgaaggcaccccctatgcaagtagaaggtagcgcaaaggaattgcaagcaccgcggaagaggacagtcaaagtgactcttacaccacttaaaatggagaacgaatctcagtccaaaaacgccctcaaggagtcttcgcccgctagccccctgcaaattgagtcaaccagccccacagaaccgatctcagctagtgaaaatccaggcgacgggccagtcgcccagcctagtcctaataacactagctgccaggattcacaatcaaataattatcagaaccttccggtccaggacagaaacctgatgctgcccgacggacctaagccccaagaggatggaagttttaaacggcgttaccctagacggtcggccagggctcgtagcaatatgttctttggcttaacaccactctatggcgtgcgcagttatggggaagaggacataccattctacagcagttcaactggaaaaaagcgagggaaacgctcagccgaaggccaggtcgatggcgctgacgacttgtccactagcgacgaggatgacttgtactactataactttacaagaacagtgatctcaagcggcggcgaggagagactggctagccacaatctcttcagagaggaagagcagtgtgatttgcccaaaatcagtcaactggacggcgttgatgacgggacagaatcggatacctcagttaccgctacaacacgcaaatcttcccaaatccctaagaggaatggcaaggagaacggtacagagaacctaaaaatcgaccggcccgaggatgccggagagaaggagcacgttacaaaaagtagtgtgggccacaaaaatgagcccaagatggataattgtcatagcgtctcccgcgtgaagacacaaggccaggactctttggaggctcagctctcctccctcgagtcctcccggcgtgttcacactagtactccctcagacaagaatctgcttgatacgtataacaccgaactattaaaatccgactctgacaataacaactctgacgattgcggaaacatcctgccaagtgacatcatggattttgtgctcaagaatacaccttccatgcaggccctcggtgagtcccctgaaagtagctcctccgaattactgaatctgggggagggactgggtctggacagtaaccgagagaaggacatgggcctatttgaagtattcagtcaacaactgcccaccaccgaacccgttgactccagcgtctcgagcagtatctcagcagaagagcagttcgagttgcccttggaactgcccagcgacctgagtgtgttgaccactagatctccaaccgtaccttcccaaaaccctagtcggctggccgttatatccgatagcggcgagaagcgagtgactatcactgaaaagtcggtggcatcctcagaatccgaccctgcactcctctcccctggagtggatccaacaccagagggacacatgactccagaccacttcattcagggacacatggatgcagatcatatttctagtccgccatgtggatctgtggagcaagggcacggcaacaaccaggatctgacgagaaattctagtacgcccgggctgcaagtccctgtttcacctactgtcccaattcagaaccagaaatatgtgcccaacagcacagatagcccaggacccagccagatttccaatgctgctgtgcagactacgcctcctcatctgaaacccgctacagaaaagcttatcgtcgtgaaccagaacatgcagccactttacgtgctgcagacacttcctaatggcgtcacccagaagatccagctcacaagcagtgtttcttccaccccttctgtgatggagaccaacacatccgtgctgggcccgatgggaggcgggctgaccttaactacgggactgaatcctagcctcccaacgagtcagtctctctttccgtcggcttccaagggcctgctgccaatgagccatcaccagcacctacactcatttcccgccgctactcagtcgtcgttccccccaaatataagcaatcctccgtccggactgctgatcggggtgcagccaccccccgacccgcagctgctggttagcgagagtagtcagagaactgatttgagtaccactgtggcgacacctagttccgggttgaagaagagaccgatctcaagactgcagacacgcaagaataaaaaactcgcgcccagtagcaccccatccaacatcgccccctcagacgttgtgagcaacatgacactcatcaatttcactccgtcacagctccccaaccacccaagtctgctggatctggggagtctcaacacatcttcccacagaactgtgcccaatattattaaacggtcaaagtcctccattatgtacttcgagcccgcccccctactgccacagtctgtgggcggcacagctgcaaccgctgcaggcacctcgactatctcccaagacacctcccatcttacctctgggagcgtcagtgggttagctagtagcagctccgttctcaatgttgtgtcaatgcaaaccaccacgacgccaacctcctccgcttcggtacctgggcacgtcactctcaccaaccctcggcttttagggaccccagatatagggtctataagcaacctgctgatcaaagctagccagcagtccttggggattcaggaccagcccgtggctctgccgccctccagtggcatgttcccacaactgggcacaagccagacaccatcaaccgccgctataaccgccgcttctagtatctgcgtgttacccagtacccaaactactggcatcacagcagcgtctcctagtggtgaggccgatgaacactatcagctacagcatgtgaaccagctgttggcctccaaaacaggcattcactcctcacagcgcgacctggacagcgcctccggaccacaggtctccaactttacccagaccgtggatgcacctaatagcatgggcctggagcagaataaggccctaagctccgccgtgcaagcctctcccacgtcaccaggtggatctccgtcgtccccaagctctggacagaggtccgcctctccttctgtccccggcccaactaagccgaagcctaagaccaagaggtttcagttgcccttggacaagggaaatggaaaaaaacataaggtttcccatctgaggacctcaagtagcgaggctcatattccagaccaggagaccacaagtctcacatctggaaccggaacgccaggagccgaagccgagcaacaagacacagccagtgtggaacagagctcccaaaaagaatgtggccaacctgccggccaggtggccgtgttgcccgaagttcaggttacccaaaaccccgctaatgagcaggagtctgccgagcctaagacggtggaggaggaggagtctaatttcagttctcccctgatgttgtggctacaacaagagcagaagaggaaagagtccattacagagaaaaagcctaagaagggtctggtgtttgaaatcagttctgatgatggtttccaaatatgtgccgaatccatcgaggatgcctggaagtccttgactgacaaggtgcaggaagcgcgctccaatgcccgcctgaagcagctgtctttcgccggagtgaacggccttcgtatgttaggcatcctccatgacgccgtagtcttccttattgaacagttgtcaggagctaagcactgcaggaattataaatttaggttccataagccagaagaagcgaatgaaccaccgctcaatccccatgggtccgcccgggcagaagtgcacctccggaagagtgcattcgatatgttcaatttcctggctagcaagcacagacagccacctgaatataaccctaatgacgaggaagaggaagaggttcagctcaaatcagctcgacgggccacttctatggaccttcccatgccgatgaggttccggcacttgaaaaaaacaagcaaagaggctgtgggggtctaccgctcccccatccacggtcgtgggctcttttgtaaacgcaacattgacgccggcgagatggtcatagagtacgctgggaacgtcatcagatctatccagacagacaagagggagaaatactatgattctaagggtattggctgttacatgttccgcatagatgactccgaagtcgtggatgctactatgcacggtaacgctgcaaggttcataaaccattcatgcgagccgaattgctattctagggtcatcaacatcgacgggcagaaacacatcgtgattttcgccatgcgcaagatataccgaggagaggaactgacctatgactacaagttccctatagaagacgcctccaataaactgccctgtaactgcggggctaaaaaatgccgaaaattcttgaattag

SEQ ID NO: 196029 - DNA, 11910 bp, synthetic construct
  misc_feature 1..11910: note = Description of Artificial Sequence: Synthetic coding sequence
  source 1..11910: mol_type = other DNA
atggcccacagctgccggtggcggttccccgcccggcccggcaccaccggcggcggcggaggaggggggcgccggggcctgggcggggcccctaggcagcgtgtgccagccttactgttacctcccgggcctcccgtcggcggcgggggcccgggtgcacccccttcacctcccgctgtggccgccgcggcagcagccgctggctcctctggcgctggagtaccaggcggcgccgccgctgcgtcggcagcaagcagttcttctgcctcatcctctagttcctcgagcagctctgcttccagcgggcccgcactgctgcgggtgggacccgggttcgacgccgctctgcaggtttcagcagccatcggaacgaacctgagacgcttccgggctgtatttggcgagagcggcgggggcggtggttcaggcgaagatgagcagttcttagggtttggaagtgatgaggaagttagggtcaggagtccgaccagaagccctagcgtgaaaactagtcctaggaagccccgggggaggcccaggagtggttccgatcgcaactcagcgatcctttctgacccaagcgtgttttcccctttaaacaagtcggaaacgaaatccggagacaaaatcaaaaaaaaagatagcaagtctattgagaagaaacgaggcagacctcctacctttccaggtgtcaagattaaaataacacatggaaaggacatcagtgaactgcctaaaggcaacaaagaggattctctgaagaaaatcaagcggactcccagtgccacgttccagcaggctacgaagatcaaaaaactgcgcgcagggaaactgagccctcttaaaagcaagttcaagaccggtaagctgcagattgggaggaagggggtccagatcgtgcgccggcggggcagacctccatccacggagaggataaagaccccttctggcctcctcattaatagcgagctcgaaaagccacagaaagtgcgcaaggataaggaaggaacacccccactgacgaaggaggacaagaccgtggtcagacagagccctcgcaggatcaagcctgtgaggatcattccgagcagtaagaggaccgacgcgacaattgcaaagcagctgttgcagcgtgcaaaaaagggggcacaaaaaaaaattgaaaaggaagccgcccagctgcaaggccggaaagtcaaaacccaagtgaagaacatcagacagtttattatgcccgtcgtgagcgccatatcctccaggatcattaagactcctcgccgcttcatagaagatgaggactatgacccccctatcaagatcgcccggctggagtcgacaccaaattcgcgattctcagctcccagctgcggaagttctgagaaaagcagcgctgcctcacaacatagctcccagatgtcctcagacagcagtcgatcctcaagccctagtgtggataccagcacagattcccaggcgtcagaggaaatccaggtattgcctgaagagcggtcagacactccggaagtccacccgccactcccaatttcacaatctcccgaaaatgaatcaaatgatcgaaggtcacgccgctattctgtgtcggaacggtcctttggaagcaggacaacaaaaaaactgtctactctgcagagcgccccgcagcagcagacgtctagctctccacctccccccctgctcacacctcctccacccctgcagccggcttcatccatctctgaccacacaccatggctaatgccacctactatacctcttgcctcgcccttccttcctgcatccacagctccaatgcagggcaaacgaaaaagtatcctcagggagccaacctttcgctggacatcactaaagcattctcggagcgagcctcagtatttttccagcgctaagtacgccaaagaaggactcatcaggaagccaatttttgacaatttccggccacctcccctcacgcctgaagacgtcgggtttgcttcgggtttcagcgcctccggaactgcggcatccgccagattgttctctccccttcacagcgggacccgcttcgacatgcacaagaggtcaccactgctgcgcgcaccgcggttcactccatcagaagcccattccaggatattcgagagtgtaactctgccctcaaatcgaacgagtgctggcaccagttcctctggtgtgtcgaaccgcaaacgcaagcgcaaggtcttttctcctatccgctcagagcccagaagtcctagccatagcatgcgtacccgttcaggtcgcctcagttcatccgaattgtcacctcttacccccccgtcatcggttagctctagcctcagtatttctgtgtcccccttggcaacctccgcacttaaccccacatttacttttccttctcattcgctaacccagagtggtgaatccgccgagaaaaaccagcggcctcgcaagcaaaccagcgccccagcagagcctttttcctccagcagcccaacacccctcttcccttggttcactcctgggagccagacagagagaggccggaacaaagacaaagcccccgaggagctgtcgaaagacagagacgcggacaagagcgtagagaaggacaagagccgcgagcgcgatagggaacgcgagaaagagaacaaaagagagagcagaaaggaaaaacgcaagaaggggagtgaaatccaatcctcatccgccctgtatcccgttggtagagtgtcgaaggagaaggtggtgggggaagacgtggctaccagctcttctgcaaaaaaagcaacaggccggaagaaatcctcctcccatgacagcgggaccgatataacaagcgtaacactgggagacaccactgctgtcaaaaccaaaatcctcattaaaaagggccgcggcaatctggagaagaccaacctcgacttgggtccaacagccccctccctcgaaaaggagaagaccctgtgcctcagtaccccttcctcatctacagtaaagcactctacatcttcaatcggctctatgctcgctcaggcagacaaattgcctatgacagataagcgcgtagcctcacttctgaaaaaggccaaagcccaactgtgtaaaattgaaaaatcgaagagccttaagcagacagatcagccaaaggcgcaaggccaggagtccgatagctccgagacttcagtgagaggacctcgaatcaaacatgtttgtcgcagagctgccgtcgctctcgggcgaaaacgggccgtctttccagacgatatgccgactctctcggcgctcccctgggaagaacgcgagaaaattctttcatcaatggggaatgacgacaaatcatctatcgccggaagcgaggatgctgagccactcgcgccaccaattaagccaattaagcctgtgacgcggaacaaagccccccaggaaccaccagtcaaaaaaggtcgccgtagccgccggtgtggacagtgtcccggatgccaggtgccagaggactgtggagtatgcacaaattgcctggacaagccaaagtttggcggccgaaacataaagaagcagtgctgcaaaatgagaaagtgtcaaaacctgcaatggatgccttctaaggcgtatctgcagaaacaggccaaagcagtgaaaaagaaggaaaagaagtcgaagacatcagaaaagaaggattcgaaggagagcagcgtagtaaagaacgtcgtggatagctcccagaagccaaccccctctgccagggaggaccctgcaccaaaaaagagcagcagcgagcctccccctcgcaagccggtggaagagaagtcggaagagggtaacgtgagcgccccaggacccgagtccaagcaagcgactacacccgccagccgcaagagcagtaagcaggttagccagcctgctctggtcatacccccccaaccgccgacaactggacctcctaggaaggaggtgccaaagaccactccttcagagcctaaaaagaagcagcctcccccacctgaatcagggcccgagcagagtaagcaaaaaaaggtagctccccggccaagcatacctgtgaaacaaaagccgaaggagaaagagaaaccccctcctgtgaataagcaggaaaatgccgggaccctcaacatcctctcgactcttagtaatggcaactccagtaagcagaaaatcccagccgatggagtgcatagaatccgggtggactttaaggaagattgtgaggccgagaacgtctgggaaatgggtggcctggggatcctgacaagcgtgccgattaccccccgggtggtttgctttctgtgcgccagcagcgggcatgtggaattcgtgtattgtcaggtctgctgcgaaccttttcataagttctgcctggaggagaacgagagacctttagaggatcagcttgagaattggtgctgtaggagatgcaagttttgccacgtatgcggtcggcaacaccaggcgaccaaacaactgctggaatgcaataagtgcaggaactcttaccacccagaatgcctgggacccaattaccctaccaagcccaccaagaagaaaaaggtttggatatgtacaaaatgtgtacgctgcaagagctgcggaagcaccacccccgggaaagggtgggatgctcagtggtcccacgatttttctctgtgccatgactgtgctaagctctttgcaaagggtaacttttgtcctctgtgtgacaagtgttacgacgatgacgactatgagtctaagatgatgcagtgcggaaaatgcgatcggtgggtacactctaaatgtgagaatctctctgatgaaatgtatgaaattctttccaatttacctgagagcgtggcatatacatgcgtcaactgcaccgaacgacatcccgccgagtggcggctggctctggagaaagaattgcagatttctctcaagcaggtgctgactgcgttactcaactctaggaccaccagtcacctgctacggtatcgccaggctgcaaaacccccagacctgaaccctgagacggaggagtccataccatccaggagctcccccgagggaccagacccaccagtactgaccgaagtctctaagcaggatgatcagcagccacttgacctggaaggcgtgaagagaaaaatggaccagggaaattacacaagcgtcctcgaattctccgatgatattgtgaaaataattcaggcagccatcaacagcgacgggggtcaacccgaaataaaaaaggccaactccatggtcaagtctttctttattaggcaaatggagagggtctttccatggttctcagttaagaagtccagattctgggagccaaacaaagtgtcatccaattctggcatgcttcccaatgcagtcctgccaccctctttagaccacaactacgcccagtggcaggagcgggaggagaatagtcatacagagcagccgcccctgatgaagaaaattatccctgcacctaaaccgaagggtcctggagagccagactcgcccacccccctccaccccccaacaccaccaatcctctccactgatcgttcaagggaagactcacctgaactgaaccccccgcccggcatagaggacaacaggcaatgtgccctgtgtttgacctacggcgatgacagcgctaacgatgccggacggttactctacattggccagaacgagtggacacatgtcaactgcgccctctggagcgctgaagtttttgaggatgacgacggctccctcaagaacgtccatatggccgtcattcgcgggaagcagctgaggtgtgagttttgccagaaacctggggccacagtgggctgctgcttgacgtcatgtacatctaactatcactttatgtgtagtcgggccaaaaattgcgtattcctggacgacaaaaaagtatattgccagagacatagagacctcatcaagggggaagttgtgcctgagaacggcttcgaggtgttcaggcgggtctttgtagacttcgaagggataagtctgcggcgcaagttcctcaatggtctcgaacctgaaaacatccatatgatgatcgggtccatgactattgattgcctcgggatactgaatgatctgtctgactgcgaggataaattgttccccattgggtaccagtgcagcagagtgtactggagtaccaccgacgctcgcaagcggtgcgtgtatacttgtaagattgtggagtgtaggcccccagtcgtagagccagacatcaattccacagtggaacatgatgagaatcgcacgatcgcacactctcctacaagctttaccgagagctcatctaaggagagccagaacacggccgagattatcagccccccctcccctgataggccaccccattctcagacatcagggtcatgttattatcacgtgataagcaaagtgcccaggatccggacaccaagctattcccctacgcagagaagcccaggctgtagacccctaccctccgcaggctcaccaacgccgaccacacacgagatcgtgaccgtgggcgatccactcctgtccagcgggcttagatcgatcgggagccgacgccacagcacatcaagcctgtcaccacagcgaagtaaactacgcatcatgtcccccatgcgaaccggtaacacttattctcggaacaatgtaagtagtgtgtctacaaccggcaccgccacagatctagaatccagtgctaaagtcgtcgatcacgtgcttggacccctaaactcctccactagcctgggtcaaaatactagtacgtcctcaaatctgcaaaggacggttgtgactgtaggcaacaagaactctcatcttgatgggagctcttcatcggagatgaagcagtcctccgcttccgatcttgtctctaagagttcatccctaaagggggagaaaactaaggtcttgtctagcaagagtagcgaagggtctgcgcacaacgtagcctaccctggaattcccaagctggccccgcaggtacacaatactactagccgcgaattaaatgtatccaagataggcagcttcgccgagcccagtagcgtttccttcagctcaaaagaagccctgagtttccctcaccttcatctgcgcggtcagagaaacgaccgggatcaacataccgattccacacagtctgccaactcttcaccggacgaggataccgaggtgaagacacttaagctctctggaatgtctaacaggagctccattatcaatgaacacatggggagcagtagtcgggaccggagacagaaaggcaagaaatcgtgtaaggaaactttcaaggagaaacacagtagcaaatcctttctcgagcccggtcaggtgacaaccggtgaagagggcaatctgaagcctgaattcatggacgaagttctaacccccgagtatatgggacagagaccttgcaacaatgtgtcctcagataagatcggagataagggtctgtccatgcccggcgtaccaaaagctcctcccatgcaagtcgaagggtccgctaaggagttacaggctccccgcaagaggactgtcaaggtgacactgacacctctaaaaatggagaacgaaagtcagagtaaaaatgcgctaaaggagagctcacccgcatcccccttgcagattgaatccactagccccaccgaaccgataagtgctagtgagaacccaggagatggccccgtcgctcagccgagtccgaataataccagttgtcaggatagccagtccaataactatcagaacctgccagtgcaggacaggaacttgatgctgccggatgggccaaaacctcaggaagatggcagctttaaacgccgctatccacgccgcagcgctcgcgctaggagcaatatgttcttcggcttgacgcctctttatggcgtcagaagctatggtgaagaggacattcctttctacagttccagtaccggaaaaaaacgcggcaaacggagcgccgagggccaagtggacggcgccgacgatctgagcacctccgatgaagacgacctctactattacaatttcaccagaacagtgatctctagcggcggtgaagagcgacttgctagtcataaccttttcagagaggaggaacagtgcgacctcccaaaaatcagccaattggacggcgtcgacgatggaacagagtccgacacgagcgtgaccgctaccactcgcaaatcctcccagatcccaaagcgaaatggtaaggaaaatggaactgagaatctgaagattgatagacctgaggatgcgggagagaaggaacacgtgaccaagagtagcgtagggcacaaaaacgagccaaagatggacaattgtcattccgtgtctcgagtgaagacccaaggacaggattctctggaggcgcagctgtcttcactggagtcctcaagacgagtgcacaccagtacacccagcgacaagaaccttttggatacttataatacggaactgttgaagtctgacagcgataataataatagcgatgattgcgggaacatcctgccttctgacatcatggacttcgtccttaaaaataccccctccatgcaggccttgggagagtctccagaaagttcatcatcagagctcctgaacctgggggaaggccttggtcttgactccaatagggaaaaagacatgggcctgttcgaagttttctcacagcagctgccgacgacagagccagtagactcatcggtgagctctagcatctcggcagaggagcagtttgagctgccactagaactaccaagtgacctaagtgtactcactacccgctcaccgacggtaccaagccaaaatccttcccgactggccgttatctcagactccggagaaaaaagagtcacaattaccgaaaaatctgtggcatcttccgagagcgaccctgctcttctttctcctggtgtggatccgactccggaaggacacatgacgccagatcactttatccaaggccacatggacgccgatcacatcagcagtcccccatgcggctccgtcgaacaggggcacgggaataatcaggatctgaccaggaattcctccacccccggactccaggttcctgtgtcccccactgtgcccatccaaaaccagaaatacgttccgaacagcactgattccccgggaccatcgcagatctctaacgctgctgtacagaccacaccgcctcaccttaagcctgctaccgaaaagcttattgtggtgaatcagaacatgcaacccttgtatgtcctgcaaacactgccaaacggagttactcagaaaatccaattaacttcatccgtgtcctctactccaagcgttatggagacgaacacctcagtgctgggtcctatggggggtggccttacccttacaacaggtctgaatcctagtctgcccacttctcagtcactatttccaagcgcctccaagggactactgccgatgtcccaccaccagcatctgcattccttccccgccgccacgcagtctagtttccccccaaacatctctaacccacccagtggactcctaatcggcgttcagccacctcctgatccacaattgctcgtgagcgagagttctcagcgaacagatcttagcacaacagtggccacccccagctctgggctgaagaaacgacccattagccgcctacagacacgcaagaacaaaaagcttgccccatcgtcaactccctcaaacattgccccaagtgacgtggtatcaaacatgaccctcattaacttcacaccttcacagctgcctaatcatccatccctcttggatttggggtctctcaacacctcctctcatcgtactgtgccaaacattattaaacggtcaaagtcctctattatgtacttcgagcctgcaccgctgttaccccagagcgtggggggtactgccgccactgcagcaggaacatcaacaatttctcaggatacgagtcacctaacatctgggagcgtgtcaggcctggcctcaagctcatcagtgcttaacgtagtgtctatgcaaacaaccaccacacccacaagctccgctagcgtgcccggccacgtaactctgacaaatcccagactgctcggaactcccgacatcgggagcatctccaacttactgatcaaggcttcccagcagtcgctgggcatccaagaccagccagtcgccctgccaccctcatccggtatgtttccgcagttaggaacgagtcagaccccctccactgccgctatcacagcagcatccagtatctgtgtactcccatctacccagacgacaggaatcacagcggcctctccatcaggagaagccgatgaacattaccaactgcagcacgtcaatcagctgctggcatcaaaaacaggcatccatagcagccagcgcgaccttgacagcgcttctggtcctcaggtgtcaaactttacacagaccgttgacgctccaaacagcatgggcctggagcaaaataaggcgctgtcaagcgccgtccaggcttcccccacgtctccaggtggctcaccctcctctccttccagcggccaaaggtccgccagtcccagtgtacccggccctaccaaacccaaacccaaaaccaaacgtttccaactgcctctcgataaaggcaacggcaaaaaacacaaagttagccatttgagaacttcctcatctgaagcccatatcccggaccaagagaccacaagcctaacaagcggaaccgggaccccgggggccgaggcggagcagcaggatacagcgagtgttgagcagtcttcgcaaaaggagtgcggccagccagcaggccaggtggccgtgttacctgaagtgcaggtaacacagaatcccgcaaatgagcaagagtcagcggaaccgaaaacagtggaggaggaggaatccaacttcagcagtcccctcatgctgtggctgcagcaagaacagaaaagaaaagaaagcattaccgagaagaaacctaaaaaggggctcgttttcgaaatctcttccgacgacgggttccagatctgcgccgagtcaatcgaggatgcttggaagtccctcaccgataaggtgcaagaagcccggagtaacgcaagattaaagcagctctcgttcgcaggagtcaatggcctgcgcatgctgggaattcttcatgatgcagtggtctttctcatcgagcagctttccggcgcaaaacactgccgaaactataaatttaggtttcacaaacccgaggaagctaacgaaccgccccttaacccacatggctccgccagggccgaagtgcacctgagaaagtctgctttcgatatgttcaattttctggcctctaagcatagacagcccccagagtacaatccaaatgacgaagaggaggaagaggtccagttaaagagcgcaaggcgggcgacgtcaatggatctaccaatgcctatgaggtttaggcacctcaaaaagacaagcaaggaggcagtaggggtgtatcgatcacctatccatgggaggggcttgttttgtaaacgcaatatcgacgctggggagatggttattgagtacgccgggaatgtcatccgcagcatccagaccgacaaaagagagaaatattacgatagcaaggggataggatgttacatgtttaggattgatgactctgaagtagtcgatgccacaatgcatggtaatgccgcaaggttcattaaccactcttgcgaacccaattgctatagccgtgtgattaatatcgatgggcagaagcacattgtgatttttgccatgaggaagatttaccggggcgaggaactgacttacgactacaagttccctattgaggacgcatccaacaaactcccatgtaattgtggagccaaaaagtgtcgcaagtttttgaattag

SEQ ID NO: 196030 - DNA, 336 bp, synthetic construct
  misc_feature 1..336: note = Description of Artificial Sequence: Synthetic coding sequence
  source 1..336: mol_type = other DNA
gacttcaaggacgagcagttcctgggcttcggcagcgacgaggaggtaagagtaaggagccctaccagaagtccgtctgggtccatgctggctcaagcagacaagttaccaatgacagacaagcgggtcgcatccttgttgaagaaggcaaaggcccagctgtgcaaaattgagaagagcaagtctttaaaacagacggaccagccgaaggctcagggccaggaaagcgatagttcagagacctccgttcgaggcccccgcatcaaacacgtgtgccggagggcggcagtagcactcgggaggaaacgggccgtattccccgatgatatgccctag

SEQ ID NO: 196031 - DNA, 4320 bp, synthetic construct
  misc_feature 1..4320: note = Description of Artificial Sequence: Synthetic coding sequence
  source 1..4320: mol_type = other DNA
atggcccacagctgccggtggcggttccccgcccggcccggcaccacaggcggcggtggcggtggaggacggcgagggctcggtggggctccccgccagcgagttcccgcccttctgttgccccctgggcctcctgtgggagggggaggcccgggggctcccccttcaccacctgccgttgccgcggctgccgcagctgctgggtcctcaggggctggcgtccccggcggagctgccgctgccagcgccgcttcgagctcttccgcctcctcaagctccagtagcagttcctccgccagctccggacccgcactgcttcgggtcggccctgggttcgacgcggccctgcaggtttctgccgcgattgggaccaatttgcgccgttttagggcagtttttggcgagagtggggggggcggcggctcgggggaattgactacccagattccttgtagctggagaactaaagggcatatccatgataagaagaccgagcccttccgcctccttgcatggtcatggtgcctgaacgatgaacagtttctaggatttggctcagacgaagaagtgcgggttcgatcccccacgcgcagcccatctgtgaagacctctccaagaaaacctcgggggaggccacgatccggcagcgacaggaacagcgcgatcctgtcggacccatccgtgtttagccctcttaacaaaagtgagactaagtccggtgacaagataaaaaaaaaagattccaagtcgattgaaaaaaagaggggacgcccaccaaccttccccggagtaaagatcaaaattactcacggaaaggacatcagtgagttgcccaaaggcaataaggaggactctctgaagaagattaaacgcacaccatcagccaccttccagcaggccaccaaaatcaaaaaactgcgggcagggaagctttctcccttaaaaagtaagtttaagactggaaaattacagattggacggaaaggggtccagattgtcagaagacgcggcaggcctcccagtaccgagcgcattaaaactcccagcggcctactgattaattccgaattagagaaaccgcaaaaggtcaggaaagataaagaaggaaccccacctctgacaaaggaggataagaccgtagtgcggcagtcaccaaggagaatcaaacccgtgagaataatcccatcttctaagcgcacagatgcaactattgcaaagcagttactgcaacgcgccaagaagggcgctcaaaagaagatcgaaaaggaggccgcccagttgcagggccgcaaagtgaagactcaggttaagaacattcggcagtttataatgcctgtcgtctccgcgatctcaagcagaataatcaagacgccacgccggtttatcgaagacgaagactatgaccctccaatcaaaattgcccggctggaaagcacgccaaattcgagattttcagcgccatcttgcggcagttcagaaaaatcttccgccgcctcccagcacagttcacaaatgagtagcgactccagcaggtcttctagccccagcgtggacaccagtaccgattctcaggcctccgaggaaatccaggtgctgcctgaagagagaagtgatacgccagaagttcacccaccgcttcccataagtcagagtcccgagaacgaaagcaatgaccggagatctcgcaggtatagcgtgtctgagcgttctttcggttctcgcaccacaaagaaactgtctacattacagagcgcacctcagcaacaaacgagttctagcccccctccacccctgctcactcccccgcctcctctgcagcccgcatcctcaatttcagatcacacaccttggctgatgccacccaccatccctcttgcctctccattcctgcctgcgtctaccgcgcccatgcaggggaaacgcaagtccatcttaagagaacctacatttcgttggacgagcctcaagcatagccgcagtgagccacagtacttttcctccgcgaaatatgcaaaagagggccttattaggaaacccatcttcgataacttcagacccccccctctgacacctgaggacgtggggtttgcctccggattttccgcctctggtacggcggcgtccgcccgtctgttttctccattgcactccggcacaagattcgatatgcataagcggagtccccttctgagagctccgaggtttacaccatctgaggctcacagccgcatttttgagtctgtaaccctgccttctaaccggactagcgcaggtacttctagctccggtgtgtcaaaccgaaaacggaagagaaaagtgttttcgcctatacggagcgaaccaaggagcccaagtcactccatgagaaccaggagtgggaggctgagctcttccgagttatcccccctgacaccccctagttccgtatcctcgtctcttagcattagcgtgtcacccctggccacatcagccctcaatcccacatttaccttcccaagccacagtttaacccagtcaggcgagagtgccgaaaaaaaccagaggcccagaaaacaaacatcagcgccggcagaaccattctcaagctcgtcgccaacacccctctttccttggtttacccctggctcccagacggaaagaggacggaataaggataaggccccagaggagctgtcaaaagaccgtgacgctgacaagagtgtggaaaaagataaatcccgcgagcgcgaccgggagcgggagaaagaaaataagcgcgagtcacggaaggagaaaaggaaaaagggaagcgagatacagagctcgtccgctctctatccagttggacgcgtgagcaaagagaaagtggtcggcgaggatgtcgctacttcctcaagtgcaaaaaaggccactgggcgcaaaaaaagttcaagtcatgactccggcaccgacatcacttctgtgactctaggtgacactactgccgtcaagactaagatcctgataaagaaagggcggggcaacctggagaagaccaacctggatctaggtcccacagccccaagcctggaaaaggaaaagaccctgtgcttgtctactccttcttcctcaacagtgaaacacagcacatcaagcatcggctccatgctggcccaggccgataagcttccaatgactgacaagcgcgtagcatcattgttaaaaaaagccaaggcccagctttgtaaaatcgaaaaatcaaagagcctaaagcagaccgatcagcctaaagcgcaggggcaagaaagtgactcgtccgagaccagcgtgcgtgggccccggatcaagcatgtctgtaggcgggcggcagtagctctggggagaaaaagagccgttttcccggacgacatgccaactctgtctgccctgccttgggaggagagagagaaaatactcagctcaatgggcaacgacgataagtcatctatcgctggctctgaggatgctgaacctctggccccgccgattaaacccatcaagcccgtcacaaggaataaggcccctcaagaacctcccgtgaagaaagggaggagaagtaggcggtgcggccagtgccctggctgtcaggtccccgaggattgcggagtgtgcacgaattgcctggataagcctaagtttggcggcagaaacatcaagaaacagtgctgtaagatgcggaaatgccaaaatctccagtggatgccatctaaagcctatctccagaagcaggcgaaggccgttaagaagaaagagaagaaatcaaagaccagtgagaagaaagacagcaaagaaagctcggttgtgaagaacgtagttgattcgtcccagaagcctacaccttctgcccgtgaggatccagcgcctaagaagtcatcaagcgagcccccccctagaaaacccgtggaagaaaagtctgaggagggcaatgtttctgcaccgggtccggagtcgaaacaggcaacaacccccgctagccggaaatcgtctaaacaggtgagccagcctgccttagtaatacctcctcaacccccgactacaggtcccccacgaaaggaagtcccaaaaacaacccccagcgagcccaagaagaagcaacctcccccccccgaaagcggcccagaacagtcaaagcagaaaaaggtcgcaccgcggccgtctatccctgttaagcagaagcccaaggaaaaagagaaacccccccctgtcaacaagcaggaaaacgcaggcacactaaacattctgtcaacgttaagtaatgggaacagtagtaaacagaagatccctgctgatggagtgcataggattcgggtcgacttcaagtag

SEQ ID NO: 196032 - DNA, 11919 bp, synthetic construct
  misc_feature 1..11919: note = Description of Artificial Sequence: Synthetic coding sequence
  source 1..11919: mol_type = other DNA
atggcccacagctgccggtggcggttccccgcccggcccggcaccactggaggtggaggaggcgggggtaggaggggcctgggcggagcccctcgacagagggtgccagctctgcttctccctcccggccctccggtcggaggcggcgggcccggggcacccccctctccgcccgccgtggccgccgccgcggctgccgcgggttcatcgggagcgggtgtgcctggcggagccgctgccgcaagcgccgccagcagctcaagcgcatcttcttcatccagctcaagctcctccgcatcctcaggccccgccttgctgagagttggcccgggcttcgacgccgcgttgcaggtgtctgcagcgatcggaactaaccttaggaggttccgcgctgtgttcggcgaaagtggcggtggaggaggctctggtgaggacgaacagtttcttggtttcggctccgacgaagaagttcgcgtacgatcacccactaggagcccgtccgtgaagacctcacccagaaagccgaggggccggcccagaagcggatccgacagaaatagtgcaatcctgagcgacccatccgtgtttagccctctcaacaagagtgagaccaagagtggcgacaaaattaaaaagaaggatagtaagtctattgaaaagaaacgaggccggccacctacatttcccggagtcaagatcaagattacgcacggcaaggatatctctgaattacccaagggaaacaaggaggatagccttaagaaaattaagcggacaccaagtgccactttccagcaggccaccaagattaagaaactacgcgctggaaaactctctcccctgaaaagcaaattcaaaaccggaaaacttcagattggcagaaagggagtgcagatcgtgcgcagacgtggccgacctccgtcaacagagagaatcaagacaccttccgggctcttaatcaattccgaactcgagaaaccacagaaggtgcgtaaggataaggaggggaccccacccctcactaaggaggacaaaaccgtggtgaggcagtctccaaggcggattaagccggtccggattataccatcttctaagcgcactgatgctaccattgccaaacagctgctacagagggccaagaagggagcccagaagaaaattgagaaagaggcagctcaactgcagggccggaaagtgaagactcaagtgaagaatattcgccagttcataatgcccgtggtctccgctatcagttcccgcatcattaagaccccccgccggtttatcgaggacgaggattacgacccccccattaagatcgcccgattggagtctactcctaactcaagattttcagcgcccagttgtggctcaagcgagaaatcgagcgcagccagccagcactccagccagatgagtagtgatagcagtcggtccagttctccatctgtcgatacatctaccgacagtcaggcttctgaggaaatacaggtactgccggaagaaaggagcgataccccggaagtgcatccccctttacctatttcccagtctcctgagaacgagtcaaatgacaggaggagcagacggtactccgttagcgaacggtcgtttggcagccggaccactaaaaaactgagcacactgcaatccgctccacagcagcagactagttcatcaccccctcctcccttactgacgcctccgccacctcttcagccagcatctagtatctccgatcacacgccctggctgatgcctccaactattcccctggcctcaccttttctgcctgcaagcactgctcccatgcaagggaaaagaaagagcatcctgcgtgaaccaacttttaggtggactagtctcaaacactcgcgttcagagccccagtatttcagtagtgcaaaatatgcgaaggagggattaattagaaagcctatatttgacaattttcggcctcctccgttgactcctgaggacgtgggtttcgcaagtgggtttagcgcttccggcacagcagcttccgcccgtctattctcacctctccattcaggcacccgcttcgacatgcacaaaagaagtcctcttctgcgtgcgcccagattcactccaagtgaggcacacagtcgtatctttgagtccgtaacgctgccctctaaccgaaccagcgctgggacttcaagtagcggcgtgagtaatcgcaaaaggaaacgaaaggtgttttccccaatccgtagtgaacctcggtcccctagtcactctatgagaactcgctctggacggctctctagctcggaattgtctcccctgaccccaccctcctctgtctcctcctcgctgtcaatttccgtctcacctctggccacttctgcccttaatccaacattcacattcccatcacatagcctgacgcagtccggtgagagcgcggagaaaaatcagcggcccagaaaacagacttcagctccagcagagccattctccagtagttccccaacacccctcttcccctggttcacccccggctctcaaaccgagagaggccgaaataaggacaaagcacccgaggaactttccaaagatcgggatgccgataaatctgtagagaaggacaagtcaagggagcgagaccgggagcgtgaaaaagagaacaagcgtgagtcccggaaagaaaagaggaagaaggggagcgagattcaatcttctagtgctctgtatcctgtcggtcgggtctcaaaagaaaaagtagtaggggaggatgtggccactagcagttcggccaaaaaggctacaggaaggaagaaatccagctcacacgacagcggaacggatataacctccgtcactctgggcgataccaccgcggtgaagaccaaaattctgatcaaaaaaggccgtgggaacttggagaagacgaatctcgatctcgggcctaccgcccctagtctggaaaaggaaaaaactctgtgtctttccacccctagctcttccacagtgaagcacagtaccagtagcataggctcaatgctcgcacaggcagacaaactccccatgactgacaaacgggttgcatcccttctcaaaaaggccaaggctcagctatgcaagatcgagaagtcaaagtcgcttaaacaaacagaccagcctaaagcccagggccaagagagcgacagtagtgaaacgtccgtgagaggtccgcggatcaaacacgtttgtcgtagagcggccgtagcactcggtaggaaaagggcagtttttcccgacgatatgccaaccctgagcgcactcccgtgggaagaaagagagaagattttatcttctatggggaatgacgataaaagttctatcgccggatctgaggacgctgaaccactggccccacctatcaagccaatcaaacccgtgacccggaacaaggctccccaggaacccccagtcaagaaagggcgtcggtccagacggtgcgggcagtgtcccgggtgccaggtcccagaggactgtggggtctgcactaactgcctggataaaccaaagttcggaggcagaaacatcaaaaagcagtgttgtaagatgagaaagtgccagaatttacagtggatgccctccaaggcatatcttcaaaagcaggccaaggctgtaaagaagaaggagaaaaaatcaaaaacaagtgaaaaaaaagacagtaaagagtcaagcgtggtaaagaatgtcgtcgatagttcacaaaagcccaccccgtctgcaagggaagacccggcgcccaagaagtcaagttccgagccccctcctaggaaaccagtcgaagagaagtctgaggaaggcaacgtcagtgcccctgggcccgaaagtaagcaagccactaccccagcaagtcgcaagagtagcaagcaggtttcccaacctgcgctcgtcatccctccccaacctccaaccaccggacctccccgaaaagaggtacctaagacaaccccatcggagccgaaaaaaaagcaacctccgccccctgaaagtgggcccgaacagtctaagcagaagaaggtcgcgcccagacctagcattccagtgaagcagaagcccaaggaaaaggagaaacctccccctgttaacaagcaagagaacgcgggtaccctgaacatcctgtccacgctgtctaacggcaattctagcaagcaaaagatccccgccgatggcgtgcaccgcatcagagttgattttaaagaggactgcgaggccgaaaacgtatgggagatgggaggactaggaatcttaacttcagttcccatcactcccagagtggtgtgtttcctgtgcgccagctcgggtcatgtggagttcgtgtattgtcaggtgtgctgtgagcctttccataaattttgtttagaggagaatgagagaccactggaggatcagcttgagaactggtgttgcagaagatgcaaattctgccatgtatgcgggcgacagcaccaggccacaaagcagctgctagaatgtaataagtgtcgtaacagctaccaccctgagtgtctgggccctaattaccccacaaaaccaactaagaagaagaaagtctggatctgtaccaagtgtgtccggtgcaagagctgcggttccacaacacccgggaagggctgggatgcgcagtggtcacacgacttttctctctgccacgattgcgccaaactatttgccaaggggaatttttgtccactgtgtgataagtgctatgatgacgatgactacgaatcaaaaatgatgcagtgtggtaagtgtgacagatgggtccacagtaagtgtgaaaaccttagcggaaccgaggacgagatgtacgagatcctgtctaacctacctgagtctgtcgcgtacacatgcgtaaattgtacagaacgccatcctgccgaatggaggcttgccctggaaaaggaacttcagatttccctgaaacaggtgttgaccgcattgctgaattcacgaaccacgtcccaccttttgaggtatcggcaggctgcaaagcctccagatctgaaccctgagaccgaagagtctatccccagtagatcctccccggagggccccgaccccccagttctcacggaagtgtccaaacaggatgatcagcagccgctggatctggagggcgtgaagaggaaaatggaccaaggaaattacacatccgtgctggaattctccgacgatattgtcaaaatcatacaggccgccatcaactccgacggtggtcagcccgaaataaagaaagcgaacagcatggtgaagagcttttttatccgtcagatggagcgggtttttccctggttttctgtaaaaaagtcccgcttctgggaacccaacaaggtcagctctaattctggaatgctcccaaatgccgtactgcctccaagcctggaccacaattacgcccagtggcaagagcgggaggaaaacagccatactgaacaaccgccactgatgaagaaaataatccccgccccaaaacccaagggccctggtgaacctgactcgccaaccccgctgcatccaccaacaccacccattctgagcacggatcgctctagagaagatagtcccgagcttaacccacctcctggtattgaagataacagacagtgtgccctatgtcttacatacggggacgacagcgcaaacgacgctggacggttgttgtacattgggcagaacgagtggacgcatgttaactgcgcgttgtggtcagccgaggtattcgaagatgacgacggaagtttgaagaacgtgcatatggctgtcatacgggggaagcagctgagatgcgagttctgccagaaacccggtgccactgtcggctgctgtttaacctcatgtacctcgaattatcatttcatgtgttctagagcgaaaaactgcgtgttcctcgatgataagaaggtgtattgccagcggcatcgcgatctgatcaagggcgaagtcgttccggagaacggcttcgaagtttttaggagagtgtttgtggactttgaagggatttcactgaggagaaagtttcttaatgggttggaacccgaaaacatccatatgatgatcggcagtatgacaatcgattgcctgggtatcctgaacgacctgtccgattgcgaggacaaactctttcctatcggctaccagtgttcaagagtgtattggtctacaactgatgctaggaagagatgcgtttatacttgcaagatcgtggagtgccgcccaccagtggtggagcccgatatcaattctactgtggaacacgacgagaaccgcacaattgcacacagtccgacaagtttcacagaatcttcaagtaaggagtcacagaatactgcggagatcatcagtccaccatcgcctgaccggcccccccatagccagacctctggttcttgctattatcacgtcatcagtaaggtgccacggattcgcacaccttcctattcaccaacacagcgtagcccaggttgtcgtcccctccctagcgctggatcacccacaccaactacccacgaaattgtgacagtcggagatccgcttttgagttctgggctccgatcaatcggcagtcggaggcactcaacttcatctctgagccctcagcgatccaagctcaggattatgagccctatgaggactgggaatacctactcaaggaataacgtcagtagcgtcagcacgaccggaactgccacggatctggaatcctcagctaaagtggtggatcatgtgctgggcccgctgaactcatccacttctcttggtcaaaacacatccacaagttcaaatctccagaggactgtggtgactgtcgggaataaaaatagccacttggacgggagttcatcctccgaaatgaagcagtcgtccgccagcgacctggttagcaagtcaagcagcctaaaaggtgagaagacgaaggtcctttccagcaagtccagcgaggggtctgctcacaacgtcgcctaccccggcatcccaaaattggccccccaagtgcacaacaccacttcccgcgagctcaatgtgagtaagatcgggagttttgcggagccctctagcgtcagcttcagcagtaaggaggcgctgagttttccccacctgcatctacgcggtcagagaaacgacagggaccagcacaccgacagtacgcaatcagcaaacagttccccggacgaagatactgaagtgaaaaccttgaagctgagcggcatgagcaacagaagctccatcattaatgagcacatggggagtagttctagggacaggcgccaaaaaggtaaaaaaagctgcaaggaaactttcaaggagaagcacagttccaagtccttcctcgaacccgggcaggtcacaaccggagaggagggcaatcttaagccagagttcatggacgaggtactaacacctgagtatatgggccagagaccatgtaataatgtaagcagtgacaagatcggcgacaagggcctttccatgccaggagtgccgaaagccccaccaatgcaggtcgagggaagcgctaaggagctgcaggctccgagaaaacgcacagtcaaagtgacacttactcccctgaaaatggagaatgagtcacaaagcaagaacgcactaaaggagtcgagcccagcttccccattgcagatagagagcactagccccaccgaacccatcagcgcctccgaaaacccgggggatggcccagtagcacagccctcccccaacaacacctcctgtcaggactcacagtctaacaactaccagaacctgcccgtgcaggaccgcaacctgatgctgcctgacggacccaagcctcaggaggatggctctttcaagcggcgttacccccgacgatcagctcgcgctcgaagtaacatgtttttcggcctcacccccctctacggggtgcgatcctatggagaggaggatataccattttattcctcttccaccggaaaaaaacgcggcaagcgctcagccgagggccaggtcgatggtgccgatgacctgtcaactagcgatgaggacgatctgtactattataactttacaagaacggtgatttcctccgggggagaagagcgactcgccagtcataacttattccgcgaagaagaacagtgtgatttacctaagatcagtcagttagacggggtagatgacggtacagagtccgatactagcgtcacagccacaacccggaagagctcacagattccaaagcggaatggcaaagagaacggaactgagaacttgaagatcgatcgacccgaggacgcgggcgagaaagagcacgtgaccaagagctctgtgggccataaaaacgaaccaaaaatggacaactgccactctgtgtctagggtcaaaacgcagggtcaagattctctcgaggcacagctgagtagtctcgagagtagtagacgcgtgcacacctcaacacccagcgataagaatttgctggacacatataacactgagttgttgaaatccgattctgataacaacaatagcgatgattgcgggaatatactgccctcagacataatggactttgttttaaaaaatactccttcaatgcaggctttaggagaatcacctgaatcatcaagttcagaactgctgaatcttggggagggcttgggcctggactccaaccgagaaaaggacatgggtctgttcgaagtgtttagccagcagctgcccacaacagaacccgtagattcctccgtatccagttctatctccgctgaagagcagttcgagctgccattagagctgccttccgatctcagcgtcctgacaaccaggtcccccactgtgccctcacagaatccttctcggctcgcagtgatcagcgactcaggtgaaaagcgggttacaattacggaaaagtcagtcgccagttccgaatctgacccagccttgctgtctcctggcgttgatcccacgccagagggacatatgacaccagatcatttcatccagggtcacatggacgctgatcacatatcttcccctccctgcggatcggtcgagcaggggcacggcaataaccaagacctcacgagaaattcatctacacccggactgcaggttccggtctctcccacagtgcccatccaaaaccagaaatacgttcccaacagcactgacagccctggtcccagccaaatctcaaatgcagccgtacagaccacccccccgcacctgaagcctgccacagagaagttgatcgtcgttaatcagaacatgcagcccttgtatgtcctccagactctgcctaacggggtcacgcagaaaatccagctcacttctagcgtgtcctctacaccttcggtgatggagaccaacacatctgtgctgggaccaatgggtggtggacttactcttactacgggactgaacccatccctgccaacctcacagagcctttttccttctgccagcaaaggactgctcccaatgtcccaccatcaacacctgcactcatttcccgccgccactcagagctcctttccacccaatatttccaatccgccttcaggactgctcattggtgtgcagcctccaccggacccccaacttctggtgtctgaatcctctcagaggaccgatctaagtaccaccgtggccaccccttcgtcggggctcaaaaaacgacctatcagcagattacaaacacgtaaaaacaagaagctcgctccaagctctaccccaagcaatattgcccctagcgacgtggtgtccaacatgaccctcataaattttacacctagtcagctgcctaatcaccctagcctgctggatctaggaagtctgaacactagcagtcaccgtacagtgcctaacataatcaaaagatcgaaatcatctatcatgtatttcgaaccagcccccttactgccacagtcagttggcggtacggctgctacagcagctggaactagcactatttcccaggatacctctcaccttacatccggctcagtgagcgggctcgccagcagcagtagtgtgctgaatgtggtcagcatgcagacaaccactacccccacgtcttccgcttccgtacccggccatgtcactctgacaaatcctcggttgctgggtaccccagatatcgggagcatcagcaaccttctgatcaaggcgagtcagcagtccctcggaattcaggaccagcccgtggcactgccaccatcctctgggatgttcccccagctgggaacatcacaaacccctagcactgctgccatcacggccgcttccagtatttgtgtactgccatcaacccagaccaccggcattacagctgccagcccgtcaggcgaagctgacgagcactaccagctgcagcatgtcaatcaacttctagcatccaaaaccggcattcattcgtctcagagggatctcgattctgcaagcggcccacaggtctcaaacttcacacagacagtggatgcacctaacagcatgggtttggagcaaaacaaagctctgtcctctgctgtgcaggcttcccctacttcacctggaggaagcccgtcctctccctcgtccggccaacgttctgcatcgccctctgtacctggacctacgaagccaaagccaaagaccaaaaggttccagctgccacttgacaagggcaatgggaaaaagcataaggtgagtcatcttagaacctcatcctcagaagcacacatcccagatcaggaaacaacatccctgacttcagggactggaactccaggggccgaggcagaacagcaagatactgcctccgtggaacagagcagtcaaaaagaatgtggacagcccgcgggacaggtggcggtcctccccgaagtgcaggtgacacagaacccggctaatgagcaggaaagcgccgaaccgaagacagttgaagaggaagagtctaattttagcagccctctgatgctctggctccaacaggagcagaagcgtaaggagtctataaccgagaagaagcccaagaagggcttggtgtttgagattagtagcgacgatggctttcagatttgtgctgagagtatagaggatgcctggaaatccctaacagacaaggtccaggaagcgcggtcaaacgcccgcctgaagcagctcagtttcgccggggtgaatggcctcagaatgttgggaattctccatgatgcagtggtattcctgatcgagcagctgagcggcgcgaagcactgtagaaattacaagttccgatttcacaagccggaagaggccaatgagccccctctgaatccccatgggtcagccagagcagaagtgcacctccgaaagtctgccttcgatatgttcaattttctcgccagtaaacatcgacagccacccgagtacaacccaaatgacgaggaggaggaggaggtacagcttaaatcagctcgtagggccacatccatggacctccccatgccaatgaggtttcggcatttgaagaaaacttccaaggaggccgtcggagtctaccgctctcccatacatgggcggggcctcttctgtaaacgaaatatagatgccggggaaatggttatcgagtatgctggcaatgtgattcggagcatacagacggataagagggagaaatactacgatagtaagggcatcgggtgctacatgtttagaatagatgacagcgaagtggttgacgccacaatgcacgggaacgcagccagattcatcaatcattcctgcgaacctaattgttactcacgcgtaatcaatatagatggccagaagcacattgtaatattcgccatgcgcaagatttatcgcggtgaggagcttacatacgactacaagttccccattgaagatgctagcaacaagctgccctgtaattgcggggctaaaaagtgtaggaagtttttaaactag

SEQ ID NO: 196033 - DNA, 1680 bp, synthetic construct
  misc_feature 1..1680: note = Description of Artificial Sequence: Synthetic coding sequence
  source 1..1680: mol_type = other DNA
atggacaaccagtgcaccgtgcaggtgcggctggagctgggccacagagcccaattgaggaaaaaaccaaccacagaaggcttcacacatgattggatggtattcgtgcgggggccggaacagtgtgacattcaacatttcgtagaaaaggttgtcttctggttgcatgatagttttcctaaaccgaggcgggtctgcaaagagcccccctacaaagtcgaggagagcggatacgccggatttataatgccgattgaggtgcattttaagaataaggaggagcccagaaaggtttgtttcacatacgacctgttccttaacttggaggggaatcctcccgtgaatcatttaagatgcgaaaagttgacttttaataatcctaccactgagtttagatacaagctgcttagggccgggggcgtaatggttatgcccgagggggccgatacagtgtccaggccaagtcccgattaccccatgctcccaactatccccctctcggccttttctgacccaaaaaagaccaagcccagccacgggagtaaggacgccaacaaggagtcctctaaaacctcaaaacctcacaaggtgacaaaagagcatcgagagcgcccccgtaaagacagcgagtctaaatcatcatcaaaggaattagagcgcgaacaggctaaaagtagcaaagacacctctaggaagctcggagaggggcgcttgccaaaggaagagaaagctccacctcccaaagccgccttcaaggagcctaagatggctctaaaagagactaagctcgaaagtacttcgcccaagggcggccctccccctcctcctccacccccgcctcgtgcaagtagtaagcgccccgctaccgctgatagccctaagccctccgccaaaaaacaaaaaaaatcttctagcaaggggtcaaggagcgcaccaggtactagcccccgtacgtctagctctagcagcttcagtgataaaaagcctgccaaagacaaatcctcaacaaggggtgagaaggtcaaagcagaaagcgagccaagagaagcaaagaaggccctggaagttgaggaatcaaattcagaagacgaagccagcttcaagtccgagtcggcccagtcctcccccagcaacagctcctcctcatcagattccagctccgactcagactttgaacctagccaaaatcattcacagggcccgctccgctctatggtcgaggaccttcagtccgaggaaagcgatgaggatgactcttcctccggcgaggaggctgcgggaaagacaaaccccggaagagacagcaggcttagttttagtgacagtgaatccgataattcagccgattcatcgctgccctcccgggaaccccccccaccccagaaaccccccccacccaacagtaaagtctcagggcgccggagccctgaatcctgctctaagccagagaaaatcttgaagaaaggtacatacgacaaggcttacacagacgagttagtcgagctgcacaggcggctgatggctctgagagaaagaaatgtgctgcaacagatcgtgaatctcatagaagaaaccgggcactttaatgttacaaacaccacatttgactttgacttgttcagccttgacgagactactgtcaggaaactccagagttgcctggaggcggtcgcaacctag

SEQ ID NO: 196034 - DNA, 273 bp, synthetic construct
  misc_feature 1..273: note = Description of Artificial Sequence: Synthetic coding sequence
  source 1..273: mol_type = other DNA
atgcgggaccccgtgagcagccagtacagcagcttcctgttctggaggatgccgatcccagagctggatctcagcgaattggagggcctgggactatccgacacagcaacgtacaaggtgaaggactcctctgttggcaaaatgatcggccaggcaacagcagcagatcaggagaagaatcccgagggcgacggactgttagagtattctaccttcaatttttggcgggccccaatagcttctatccattcgttcgaactggatttgctgtag

SEQ ID NO: 196035 - DNA, 417 bp, synthetic construct
  misc_feature 1..417: note = Description of Artificial Sequence: Synthetic coding sequence
  source 1..417: mol_type = other DNA
atgaaggacctgcacagcgacgacaacgaggaggagagcgacgaggtggaggacaacgataacgattcggagatggaacggcctgtgaatcgcggaggctcccggagcagaagggttagcctgagcgatgggtcggactccgaatcaagctccgctagctccccactacaccacgaaccgccccctcctctactcaaaaccaataacaaccaaatcctagaggtcaagagtcctattaaacaaagtaagtccgacaagcaaattaaaaacggggaatgtgacaaaattgtgaacctcatcgaggagacggggcattttcacatcacaaatactacatttgacttcgacctgtgctccttagataaaactaccgtgagaaaactccaaagttatctggaaacttctggcacttcctag

SEQ ID NO: 196036 - DNA, 489 bp, synthetic construct
  misc_feature 1..489: note = Description of Artificial Sequence: Synthetic coding sequence
  source 1..489: mol_type = other DNA
atgaaggacctgcacagcgacgacaacgaggaggagagcgacgaggtggaggacaatgacaatgacagtgaaatggagaggcctgtaaatagaggcggatctcgctctcggcgggttagcctctccgatggctcagattccgagagtagttccgcttcttccccgttgcaccatgagccaccccctccccttcttaagacaaataacaatcaaattttggaggttaaaagccccattaagcagtctaaatccgacaaacagatcaagaacggcgagtgcgataaagcctacctagacgagctggtcgaactccaccgtaggctgatgactctccgggaacgccatatcctgcagcagattgtgaacttaatcgaagaaacagggcattttcacatcaccaatacaacattcgacttcgacctttgtagcctcgacaaaaccaccgttcggaagctgcagtcttacctcgagacctctggtacttcatag

SEQ ID NO: 196037 - DNA, 417 bp, synthetic construct
  misc_feature 1..417: note = Description of Artificial Sequence: Synthetic coding sequence
  source 1..417: mol_type = other DNA
atgaaggacctgcacagcgacgacaacgaggaggagagcgacgaggtggaggataacgacaacgattcagagatggagcggcccgtcaaccggggcgggtcccggtccagaagagtgtctctaagcgacgggtccgactcagaatccagctccgcgtctagtccattgcaccatgagccacccccaccgttgctcaaaactaataataatcagatcctggaggttaaatctccaattaagcagtcaaagtcagacaaacagattaagaatggcgagtgcgataagatagtcaatctgatcgaagaaaccggacacttccacatcactaacaccaccttcgatttcgacctttgcagcctggacaagacaacggtccgtaaattgcagtcgtatttggaaaccagcggcacctcctag

SEQ ID NO: 196038 - DNA, 1707 bp, synthetic construct
  misc_feature 1..1707: note = Description of Artificial Sequence: Synthetic coding sequence
  source 1..1707: mol_type = other DNA
atggccagcagctgcgccgtgcaggtgaagctggagctgggccaccgtgctcaagtgagaaagaaaccaacagttgagggattcacccatgactggatggtgtttgtgagggggccagagcatagtaacatccagcacttcgtggaaaaggttgtgtttcacctgcatgagtctttccctcggcccaagagggtttgcaaagatcctccatataaggtggaagagagcgggtacgccggctttattctcccaatagaagtatatttcaaaaataaagaggaacccagaaaggtgcgcttcgattacgacttgtttctgcatcttgaggggcacccccccgtgaatcatctgaggtgcgagaagttgaccttcaacaaccccacagaggactttcgacgaaagcttcttaaggcgggcggagatcccaatcggtctatacatacgtcctcctccagttcctctagctcctcttctagttcaagcagtagcagctcttcttcatcctcatcatctagttcttcctcctcttccagcagcagctcctctagtagctcatcatccagtagttctacctcattctccaaacctcacaagctcatgaaggaacataaggagaaaccttcaaaggacagcagggagcataagtcagcctttaaggaaccatcccgagatcataataaatctagcaaggaaagctctaagaagccaaaggagaacaaaccactgaaagaggagaaaatcgtgcctaaaatggcattcaaagagccaaagccaatgagtaaagaaccaaaaccggacagtaatctgctgaccatcacgtctggtcaggataagaaagcaccttccaaacgaccccctatttccgactccgaagaattgtctgccaaaaagcgcaaaaagtcctcctccgaggctctttttaagtcattttcctccgctcctcccctaattctcacatgtagcgcagataagaaacagataaaggataaatcccacgtcaaaatggggaaagtgaaaatcgagagtgagacatccgagaagaaaaaaagtaccctgccccctttcgacgatatcgtggatccgaatgacagcgacgttgaagagaatatctccagtaagtctgacagcgagcagcctagccctgcctcaagttcatcttcatcttcgtcctcgttcacaccatctcagacccgccaacagggcccactgagaagcatcatgaaggatctccacagtgatgacaatgaagaagagtcagatgaagtggaggacaacgataatgattctgaaatggagcgacccgtcaatagaggaggttctcgcagtcgccgggtttccctgtctgacggcagtgactccgagagcagttcagctagctcccctctccaccacgagccaccacccccactgttgaaaacaaacaataaccagatactggaggtgaagagccctattaaacaatctaagtccgacaaacagatcaaaaatggagaatgcgacaaggcctatttagacgaattggtagaactccacaggaggttgatgacactcagggagcgccacattctgcagcaaattgtcaacctcatcgaagagacaggacattttcacatcacaaataccacctttgatttcgatctgtgttccttggataagaccactgtaaggaaactccagagttatcttgagacctcaggcacaagctag

SEQ ID NO: 196039 - DNA, 1698 bp, synthetic construct
  misc_feature 1..1698: note = Description of Artificial Sequence: Synthetic coding sequence
  source 1..1698: mol_type = other DNA
atgtgcgccgtgcaggtgaagctggagctgggccaccgggcccaggttcgtaagaaaccaactgtggagggattcacccacgattggatggtatttgttcggggaccggagcattctaatattcagcactttgtcgagaaggttgtatttcacctgcacgaatccttccccagaccaaaaagggtgtgtaaggacccgccgtataaggtggaggagagcggatacgcgggattcattcttcctatcgaggtctactttaaaaacaaggaggagccacgcaaggttagattcgactacgatctctttttgcacctcgagggtcatccaccagtgaatcacctgcgatgcgaaaaactgactttcaataaccccacagaagacttcagacggaagcttttaaaggcaggtggtgatcctaatcggtcgattcatacatcctcctctagcagtagctcctccagctcctcttcatccagcagcagctcatccagttcctcaagtagcagctcctctagttcctccagctccagctcctcttcatcctcctcaagtagcagttccaccagtttctcaaagcctcacaagctcatgaaggaacacaaggaaaagcccagtaaagattctcgcgaacacaaatcggcctttaaagaacctagtagagatcacaataagtcctctaaagaaagttcgaagaaacctaaagagaacaaaccactgaaggaagaaaagatagtgcctaagatggcttttaaggagcccaagcctatgtctaaagaacccaagccagacagcaacttactcactattacgtcaggtcaagataagaaagcgccttcaaagcggccacctatttccgattccgaagaacttagcgccaaaaaacgcaaaaaaagctcatcggaagccctgttcaagtcctttagctcagccccacccctcatcctgacttgcagcgccgataagaagcagataaaagacaaatcgcacgttaagatggggaaagtcaagatcgagagcgaaacgagcgagaaaaagaagtccacgctccccccgttcgacgatatagtagaccccaatgattctgatgtcgaggagaatatcagctcaaaatctgatagtgagcagccgtccccggcatcatcgagctcatccagctcgtcgagttttactccaagtcagacccggcagcaaggcccactacggtccataatgaaggacctgcacagcgacgacaatgaggaggagtccgacgaggttgaagacaacgacaatgacagcgagatggagcgtccagtgaacagaggtggtagcagatctagacgcgtgtctctgtctgatggttctgatagcgaatccagctccgccagcagcccgctgcaccacgagcctcctcctcctttgctgaaaaccaataacaatcagatcttggaggtgaaatcccctatcaaacagagcaagagcgacaaacagatcaagaatggcgaatgcgacaaagcttatctggatgagctggtggaactgcaccgcaggctcatgaccctcagagagagacacattttacagcagatagttaatcttatagaagagaccgggcactttcatattacgaacacgactttcgattttgatctctgctccctggacaagacaacggtcaggaaactgcagagctaccttgaaacttcaggcacttcatag

SEQ ID NO: 196040 - DNA, 1824 bp, synthetic construct
  misc_feature 1..1824: note = Description of Artificial Sequence: Synthetic coding sequence
  source 1..1824: mol_type = other DNA
atgcagcgggccccccccttccccttcatgtgcgtgagccggcggcgaaagaaatgtcaggcacaacgaagcttgcctaagccccgactgcccgtgattcacggttgcctaagttctccttgtcctcaatgtgcggtgcaagtaaagctggagcttggacaccgggctcaggtgaggaaaaagcctactgtggagggtttcacccacgactggatggtgtttgtacgtggacccgagcacagcaacatccaacacttcgtggagaaggtggtgtttcatcttcatgagtcatttccacggcctaaacgggtttgcaaggacccaccttacaaagtggaagaatccggttacgccggattcatccttcccattgaggtttacttcaaaaataaggaagagccccggaaggtccgctttgattatgatttattccttcatctcgagggccatccgcccgtcaatcatcttcgctgcgaaaagttgacttttaacaatccaactgaagacttcagacgaaaattacttaaggcgggaggggatcctaaccgttctatccacacctcctcatcatccagctcaagctctagcagctcttcttctagctcttcaagctcttctagctctagctctagtagctctagtagcagcagctctagttcctcatccagcagttctagttcttcctccacctccttcagcaaaccccacaagcttatgaaggagcataaggagaagccatcaaaagactctagagagcacaagtcagcatttaaagagccttccagggatcacaataaatcatcaaaagaatccagtaaaaagccgaaagaaaacaagcccctgaaggaggagaaaatagtcccgaaaatggcgtttaaggaacctaagcccatgtcaaaggagcccaagccagatagtaatttgctgactataacatcagggcaggacaagaaggcacccagcaagagaccaccgatatcggatagcgaggagctctctgccaaaaaacggaaaaaatccagttccgaggcgctgttcaagtcattttccagcgctcctcctctaatactgacctgttctgcggacaagaaacaaattaaagataagtctcatgtcaagatgggcaaagttaagattgagagcgagacatctgaaaagaaaaagtcgactctacccccatttgacgatattgtagatcccaatgattccgacgtggaggagaatatctcttccaagtccgactctgaacagccttccccagcaagcagctcctccagctcttcgagcagtttcacaccgagccagaccaggcagcagggccccctgaggtcgattatgaaagatctgcactcagacgacaatgaggaggaatctgatgaagtcgaggataacgataatgactccgaaatggagaggcctgtcaaccgcgggggttctagatctcgaagagtgagcctgagcgatggcagcgactcagaatcatccagtgcgagttcaccgctccatcatgagccaccaccccctctgttgaagacaaataataaccagattctggaggtaaagagtccaatcaaacaatcgaaatcggataagcaaatcaaaaatggcgagtgtgacaaggcatacctggatgagttggtcgagctccataggcggttgatgactctgagagagcgacacatcctgcagcagatcgtcaatttgattgaggagacgggacatttccatatcaccaataccacatttgacttcgatctgtgctccctcgacaagactacagtaagaaagcttcaatcctatcttgagacttctgggacgtcttag

SEQ ID NO: 196041 - DNA, 4986 bp, synthetic construct
  misc_feature 1..4986: note = Description of Artificial Sequence: Synthetic coding sequence
  source 1..4986: mol_type = other DNA
atgagcgccggcggccgggacgaggagcggcggaagctggccgacataattcatcactggaatgcaaacaggctcgacctgtttgaaatatcacagcccactgaggaccttgagttccacggcgtaatgcgcttttattttcaagacaaggcggctggcaattttgcaaccaaatgtatcagagtgtcctcaactgctacaacccaagacgtgattgagacactcgctgaaaagtttaggcctgatatgagaatgctcagctcaccgaagtatagcctgtatgaggtccatgttagcggagagcgtaggctggacatcgacgagaaaccgttggtagtgcagctcaattggaacaaagacgacagggaaggtagattcgtgttaaaaaacgagaatgatgcaattcctcctaagaaagcgcagagtaatggacctgagaaacaggagaaggaaggtgtgattcagaacttcaagcgcaccctgagcaaaaaggaaaaaaaagagaaaaagaagagagaaaaggaggccctcaggcaggcttctgataaggatgaccgacccttccagggagaggacgtggagaattccagactggcggcggaggtttacaaggatatgccagagacctccttcacccgcaccatttcaaatcctgaagttgttatgaaacggagacgacaacaaaaactcgaaaaacggatgcaggaatttagaagctctgatggcaggccagatagcggaggtacactgaggatctacgctgactcccttaaaccaaacattccctataagaccattctcctctctactactgacccagcggactttgccgtcgccgaagccctggagaagtacggtctcgagaaggaaaaccccaaagattactgcatcgcccgggttatgcttcctcctggagcccagcacagcgacgaaaagggtgcaaaggagatcattcttgacgacgatgagtgccctctgcagatttttagagaatggccctcagacaagggaatcctggttttccagctcaagcggcggcctccggatcacatccccaaaaagacaaagaaacatctggaggggaagacgccaaaaggcaaagagcgggcagacggctctgggtacggaagtactttacctcctgaaaagctcccgtaccttgtggagctgtcccctggtaggagaaaccacttcgcctattacaactatcacacctatgaagacggcagcgattcacgggacaaacctaaattgtatcggctccagctttctgttacagaggtgggtacggagaagttagacgataacagtatccagctgttcggaccaggtattcagccacaccattgcgacctaaccaacatggacggagtcgtgacagtcacaccacgcagcatggacgccgagacatatgtcgaggggcagcggatttcggagacaaccatgctgcagagtgggatgaaggtacagttcggcgcctcacacgtctttaagtttgtggacccctcccaggaccacgcattagccaagaggagcgttgatggggggttaatggtaaaaggaccccgtcacaagcctggtattgttcaggaaacaacctttgatctcgggggggatatccacagcgggaccgccctgcccaccagcaagagtacaaccagacttgatagcgaccgggtttccagcgcatcatcaacagctgagcgcggcatggtcaaaccgatgattagggtagagcagcaacccgactatcgaaggcaggagtcccgaacacaggacgcatcaggcccagaactgattctaccagcctctatcgagtttcgcgaatcgtccgaagacagtttcttgtcagctattatcaactacacgaacagctctacagttcacttcaagctgtcgcctacatatgtcctgtacatggcttgccggtatgttctgtccaaccagtatagacccgatatctcccctaccgaaaggacacacaaagtgatcgctgtggtgaataagatggtgagtatgatggagggcgtaatacagaaacagaaaaacatcgcaggagccctggcgttctggatggccaatgccagcgaactgctcaatttcattaagcaggacagagatttaagcaggatcacgcttgatgcccaggatgtgttagctcacctggtacagatggctttcaaatacctagtgcactgcctgcagagcgagctgaataactatatgcctgcctttctggacgaccctgaggagaactctctacaaaggcccaaaatcgacgatgtacttcacaccctgacaggcgctatgtccctcctcagacgctgccgcgttaacgccgccctcaccatacaacttttttctcagctcttccactttattaacatgtggctgttcaacaggctggtcacagatccagatagcgggctgtgtagtcattattggggcgccattatcagacaacagctgggtcacattgaagcttgggctgagaaacagggattggagctggcagccgattgtcacctgagcagaatcgtgcaggccaccaccctgcttaccatggacaagtatgcccctgacgatataccgaacatcaacagcacttgcttcaagctaaacagcctccagcttcaggcgttactgcagaactaccattgtgctccagatgaaccattcattcctactgacctcatagagaatgtggtcacagtggcagagaatactgccgacgaactggcacggagtgacggtcgcgaggtgcaactagaagaggaccctgatctgcagctgcccttcctgttgcccgaggacggctacagttgcgacgtagtgagaaacatcccaaacggtctgcaagagtttctcgaccctttgtgccagagagggttttgtagactgatccctcatacacgctcaccaggcacatggacaatctacttcgaaggcgcagattatgagtcacatctgctgcgggagaataccgaactggccattccacttcgcaaggagccggagattattactgtaactctgaaaaaacagaatggtatgggcctctcaatcgtcgccgctaagggagctggacaggataaactgggcatctatgtgaaatccgtggtgaagggaggagccgcggacgtggacggtcggctggcggccggtgatcagcttctgtctgtggacggccgttcactggttggactttcacaggaaagggccgcagagctgatgaccagaaccagcagtgtagtgacgttggaggtggccaagcaaggagctatttaccacggcctagctacacttctgaatcaaccttccccaatgatgcagaggatttccgacagacgagggtcgggcaagcctcggcctaagtccgagggctttgagttatataataatagcacccaaaatgggagccctgaaagcccccagctgccctgggctgaatacagcgagcccaagaaattgcccggtgacgaccggctgatgaaaaaccgagcagaccacaggtccagccccaatgttgctaatcagcccccttccccaggtggaaaatctgcatatgccagcgggacaaccgcgaagatcacatccgtgtcaacgggcaatctgtgtactgaagagcagacaccccccccccggcccgaggcctatcccattcctacacaaacctacaccagagagtactttaccttcccagcttccaaatcccaggatcgcatggctccaccacaaaaccagtggcctaactatgaagagaagcctcacatgcacacagatagcaatcatagtagcattgctatccagcgtgtgactagatcccaggaagagctgcgcgaagataaagcctatcagcttgagcggcataggatcgaggctgcaatggatcggaagtctgactctgacatgtggatcaatcaatctagttcactggactctagtacttcctcccaggagcatctgaaccatagcagtaaatccgttacgccagcaagtacgcttacaaaaagtggccccggacgttggaagacccctgctgccattcccgctacccctgtggcagtgtcacagcctattaggaccgacctaccaccaccaccacctcctcctcctgtgcattacgccggagatttcgacggtatgtctatggatttaccactgccccctccaccatccgcaaatcagattgggctgcccagtgcacaggtggctgcagccgagaggagaaagcgggaggagcaccaaagatggtacgagaaagagaaagcccgactggaagaggagcgtgagcgtaaaagacgcgagcaggagagaaaacttggccagatgcggacccagagtctcaacccagccccctttagccccctgacggctcagcagatgaagcccgaaaagccctctacgctccaaagaccgcaggagactgtgatacgggaacttcagccccaacagcagccaagaacaatcgagaggagggatcttcaatacattacagtgtcaaaggaagagcttagctccggcgatagtctctccccagatccgtggaaacgcgatgcgaaagagaaactagagaagcaacaacagatgcacatagtggacatgctcagcaaggagatccaggagctgcagtctaagcctgacagatccgcggaggaaagcgatcgcctgcggaagctaatgctggaatggcagttccagaagagactccaagagagcaagcagaaggatgaggatgacgaagaagaggaagacgacgacgtggacaccatgctgatcatgcagcggctcgaagccgagcgcagggcccgccagacggctatgccggcgattagtgtcctggacctccttcaggacgaagagcggagacggcagcaacagctggaggaaatgagaaagcgcgaggccgaggatcgcgcacggcaggaagaggaacgcaggagacaggaggaagaacggactaagcgtgatgctgaggagaagtag

SEQ ID NO: 196042 - DNA, 4998 bp, synthetic construct
  misc_feature 1..4998: note = Description of Artificial Sequence: Synthetic coding sequence
  source 1..4998: mol_type = other DNA
atgagcgccggcggccgggacgaggagcggcggaagctggccgacattattcaccactggaatgcaaacaggttggatttgtttgagatttcccaacccactgaagatttggaattccatggcgtgatgaggttctatttccaggataaggctgccggcaatttcgcaactaaatgtattagggtttcaagtaccgcaaccacccaggatgtcatcgagaccttggctgaaaaatttcgacctgatatgagaatgttgtctagccctaaatatagcttgtatgaagttcatgtgagcggtgagcggaggttagatatagatgaaaagcctctggtcgtgcagctcaattggaataaggatgatagagaggggcgcttcgtgttgaaaaacgaaaatgacgctattccccctaaaaaggcccaaagtaatggcccagaaaaacaggaaaaggagggtgtgatccagaacttcaagcggacactttccaagaaagagaagaaggaaaagaagaaacgcgagaaggaggccctgcgccaagctagcgataaggatgatcggccatttcagggggaggacgtcgaaaattcccggcttgctgctgaggtgtacaaagacatgcccgagacaagcttcaccaggaccattagcaatccagaggtagtgatgaaacggcgccggcaacaaaaactggagaagagaatgcaggaatttcggagcagcgacgggagacctgactcaggaggcacactgaggatatatgctgatagcctgaaaccaaacattccctacaaaactatcctgctttctactaccgaccctgccgacttcgctgtggctgaagcactggagaaatacggcctggagaaagagaaccccaaggactattgcatagcccgggtcatgctgccacccggcgcacaacactcagacgagaagggcgcgaaagagatcatcctggacgatgatgagtgcccccttcagatctttcgggaatggccgtccgataaagggattcttgtctttcagcttaagagacgccccccggaccacattcctaaaaagacgaagaagcaccttgagggtaagaccccaaaggggaaggaacgagccgatgggagcggctacgggagcaccctgccaccagagaagctcccctatctcgttgaactgtcgcctgggcgcagaaaccactttgcttactacaactaccacacttatgaggacggttctgactccagagacaagcccaagctctatcgcctgcaactgtccgtaaccgaggttggcaccgagaaacttgacgataactcgattcagctgtttggccccgggattcagcctcaccactgcgacctaacaaatatggatggagtggtaactgtaacccctaggtccatggacgccgagacatacgtagagggtcaaagaattagcgagacaaccatgttgcagagcggaatgaaagttcagttcggtgcatcccatgtcttcaagtttgtggacccctctcaagatcacgccctggccaagcgatccgtcgatggcggattgatggtgaaagggccccggcataagcctgggattgttcaggaaaccacatttgatcttgggggcgacattcattcaggcactgccctgcccacctcaaagtctaccacccgcctggatagtgaccgcgtctctagtgcctcatccactgctgagcgtggaatggtgaaacctatgattcgcgtcgaacagcaacccgattaccggaggcaggaaagccgaacccaggatgcgtcgggccctgaactgattctcccagcttcaatcgaatttcgagagtcatctgaggatagtttcctatccgcgatcattaactacacaaactctagtaccgtacacttcaaactcagtccaacatacgtcctctatatggcttgccgctatgtgctgtcaaaccaataccgccccgatatcagtcccactgagcgaactcataaggttatcgccgtagtcaacaagatggttagcatgatggagggggttatccagaagcaaaagaacatagccggtgccctggctttttggatggcaaatgcgtcagagctgctgaatttcattaaacaggaccgcgacctcagccgcatcaccctggacgcgcaggatgtgttagcccatttagtgcagatggcctttaagtatctggtccactgtctgcaatcagagctcaacaattacatgccagcatttctggatgaccctgaggaaaacagcctgcaacgaccaaaaatcgacgatgtcctgcataccctcaccggggcaatgtcgctgctgcggcggtgccgagttaacgccgcccttactatccagttgttcagtcagctgtttcacttcataaacatgtggttgtttaacagactggtgacagatcctgactccggactgtgcagtcattactggggagccattatccgccagcagctcggccacatcgaagcctgggccgaaaaacaaggcctggaactagccgcagattgccacctgtccagaattgtgcaggctactaccctcctgacaatggacaagtatgcccccgatgacattcctaacataaacagtacatgttttaaacttaatagtttacagctccaggccctgctgcaaaactaccattgcgccccagatgaaccattcattcccactgacctcattgagaatgtggtgactgtggcagaaaatacagctgacgagcttgccagatctgatgggcgcgaggttcagctggaggaggaccctgatctacagctaccattcttgctgcccgaggatggctacagctgcgacgtagtgcgtaacattccgaatgggttgcaggaattccttgatccactgtgccaaagaggtttttgccgcctgatcccacacacaagatcccctggtacgtggactatttattttgaaggcgccgactacgagtctcatctgttgcgggaaaataccgagcttgcacagccattaagaaaggagccggaaatcatcactgtgaccctcaaaaaacagaatggcatgggattgtccatcgtggccgctaaaggtgctgggcaggacaagctggggatatatgtaaaatcagttgtgaagggcggcgccgctgatgtggacggccgactcgccgccggagaccagctgctgtctgtggatggccggtcactggtagggctcagccaagagcgggctgctgagctaatgacccgaaccagcagcgtggtgacactcgaggtagccaaacagggagctatctaccatggcttggcaactctgctgaatcagccatcacctatgatgcagcggatttccgatcggcggggttccggtaaacccaggcccaaatccgaaggctttgagctatataacaactccacccagaacggaagcccagagagtcctcagctgccctgggcagaatattcagagcccaaaaaactccccggcgacgacaggttgatgaagaatcgggccgaccaccgttcatcccccaatgtggcgaaccaacctcctagtccaggaggtaagtctgcctacgcctcggggaccacagcgaaaatcacttccgtgagtaccggtaatctgtgtacagaggagcagacaccccctcctagacccgaggcttaccctattcccactcaaacctacaccagagagtacttcacatttccagcttcaaagagtcaggaccgtatggctcccccccaaaaccagtggcccaactacgaagagaaaccccacatgcatacagattccaatcattcttctattgcaatccagagagtcaccaggagtcaggaggaactgcgcgaagacaaggcctaccaacttgaacgccatcgtatagaggcagccatggaccgcaagagcgattccgatatgtggatcaaccagagttcctctttggatagctcaacgagcagccaggaacatctgaatcattcttcaaagtccgtgacccccgcatcaacattaacaaaatcaggccctgggaggtggaaaaccccggccgccataccagctacaccagtggcagtgtcacagcctatacgcaccgatttacctccacccccccctccgccccccgtgcactatgccggagactttgacgggatgtccatggacttgccactgccacccccccctagcgccaaccaaattggacttcccagcgctcaagtggctgctgcagagagaagaaagcgcgaggagcatcaaagatggtatgaaaaggaaaaagcccggctggaggaggaacgggaacgcaagagacgggagcaagaacgcaagctcggccagatgagaacccagtctctgaatcctgcacccttttcacctctgaccgcacaacagatgaagccagagaagccttctactctgcagagaccccaggagactgttattcgggagctacagcctcagcaacagcctcgtactatcgagaggagggatctgcagtatattaccgtcagtaaggaggagctatcgtcaggggacagcctcagcccggacccatggaaacgcgatgccaaggaaaagcttgaaaaacagcaacaaatgcacattgtcgatatgctctctaaagagattcaggagctgcaatccaagcccgacaggagtgcagaagaatctgatagactgcgcaaactcatgctggagtggcagttccagaaaagactgcaagagagcaaacaaaaggacgaggacgacgaggaggaggaggatgacgatgttgacactatgttgattatgcagcggctggaggccgaacgcagggcaagacaaacagctatgccagcaatctccgttctggacctattgcaggacgaggagaggcgacgacagcagcagttggaggagatgcggaaaagggaggccgaggaccgtgcgcggcaggaagaagagcgccggcggcaggaggaggagcgtacaaaaagggacgccgaggaaaaagtcatggtactatag

SEQ ID NO: 196043 - DNA, 5475 bp, synthetic construct
  misc_feature 1..5475: note = Description of Artificial Sequence: Synthetic coding sequence
  source 1..5475: mol_type = other DNA
atgagcgccggcggccgggacgaggagcggcggaagctggccgacattatccatcactggaacgcaaaccgcctggacctcttcgagatcagccagcctaccgaagatctggaatttcacggagtgatgaggttctacttccaggacaaggctgccgggaactttgcgactaaatgtatcagagtgtcctctaccgccaccacacaagacgtaatcgagacactggcggaaaaattccggccggacatgcgaatgttgagcagcccaaagtactcactttacgaggtccacgtatctggcgaacgtaggctggatatcgatgagaaacctctggtcgtgcagctcaattggaacaaggatgatcgggaaggacgcttcgtgctcaagaacgagaacgatgccattccacccaagaaagcccaatccaatggacctgaaaaacaagagaaggagggagttattcaaaacttcaagaggaccctgtcaaaaaaggagaaaaaggagaagaagaaaagagagaaggaggccctgcgccaggccagcgataaggacgatcgcccctttcaaggcgaggacgtggagaacagtagacttgcagcggaagtgtacaaagacatgcccgagacgtccttcacaaggaccatcagtaatcccgaagttgtgatgaaaagaaggagacagcaaaagcttgagaagagaatgcaggaatttcggagctcggacggtcgccctgattctggagggacgcttcgaatttacgccgactctttgaagcctaacattccatataagacgattcttctctctacaaccgaccccgcagactttgcggtggctgaggcgctggagaaatatggattggaaaaggagaatccaaaggactactgtatcgccagggtaatgcttccgcctggcgctcagcactcagacgagaaaggcgccaaagagatcatcttggacgatgacgagtgtccactccagatttttcgcgagtggccttcagacaagggcattctcgtgtttcaactgaaaaggcgaccacccgaccatattcctaagaaaactaagaaacacctagagggaaagacccccaaggggaaggagcgggccgatggatctggctatgggtccactctgcccccggaaaagctcccctatctggtagaactaagtcccggccgacgcaaccacttcgcctattataattatcatacctacgaggacggtagcgactcccgagacaaaccaaaattatatagactccaactgtcagttactgaagtggggacagaaaagcttgacgacaacagtattcagctgttcggcccgggtattcagccccaccactgtgacttaacaaacatggacggagtggtcacggtgacgccgaggtcaatggacgcagagacttacgtagaaggccagcggattagcgagacaacgatgctccagtctgggatgaaagtccagtttggggcctcccatgtgttcaagtttgtcgacccaagccaggatcatgccctcgccaagaggtccgtcgatggcggacttatggtgaagggcccaaggcataaacctggcatcgtccaggagacaaccttcgacttggggggggacattcacagtggaaccgcactccctacctcaaagagcacaactaggctggatagtgaccgtgtgagtagtgctagtagcacggccgaacgcggaatggtcaaacccatgatcagggtagagcagcagcccgattaccgccggcaggagtccaggacccaagacgcatctggcccagaactgattttaccggccagcatcgaattcagagaatcttccgaggacagctttctaagtgcgatcatcaactatactaacagttcaactgtgcatttcaagctgagccccacctatgtcctgtatatggcctgcaggtatgtgctcagcaatcagtacaggcccgatatctcccctaccgaacgtactcataaggttatcgccgtggtcaacaagatggtcagcatgatggaaggagtcattcagaagcagaagaatattgccggagcactcgctttctggatggctaacgcatctgaactacttaacttcattaaacaagaccgcgatctatcccgaataacgttggatgcccaggacgtgctggcacatctagtacagatggccttcaaatatttagtacactgcctgcagtctgagttaaacaactacatgcccgcattcctcgacgatcccgaagaaaattctctccagaggcccaaaatcgatgatgtgctgcacaccctgaccggtgccatgtcactcctgcggcgctgtagagtaaacgccgctctcactattcaactatttagccagttatttcacttcattaacatgtggctctttaacaggttggtcacagatcccgattcaggcctctgctcccactattggggagccatcatcaggcagcagctggggcacattgaggcatgggccgaaaagcaggggctagaactcgctgcggattgtcacctgtctcggattgtccaagccacaaccctcctcaccatggacaaatatgccccagacgacattcctaacattaattcaacgtgttttaaactcaatagcctccagcttcaggcccttctgcagaactaccactgcgcgcccgacgagcctttcatacctactgacctgattgaaaacgtggtgaccgtggccgaaaatactgctgacgagctagccagaagcgacgggagagaggtgcagctcgaggaggatcctgatctgcaactgcctttccttctccccgaagatgggtatagctgtgacgtggttcgtaatatacccaacgggctccaggaattcctggatcctctgtgccagcggggattctgcagacttatccctcatacacggagccccgggacatggaccatatattttgagggtgccgattatgagtcgcacctgctgcgggagaacaccgagctcgcaatacctcttaggaaggaacccgagattatcaccgttactcttaaaaagcagaacggaatgggcttgtcaattgtagccgccaagggcgctggtcaagacaagcttggaatctatgttaaatctgtggtcaaaggtggcgccgctgacgtggatggacggctggcggcaggtgatcagctgctttcggtcgatgggagaagcctggtcgggctttcacaagaaagggccgcagagctgatgactagaacgtcttctgtggtgaccctggaggttgctaagcagggcgctatttaccacggtttggcgactctgcttaaccagccgagtccaatgatgcaacgaattagcgaccgtaggggatccggcaagcctagacctaagagtgaaggtttcgaactgtataacaacagcacacagaacggttcccccgaaagccctcagcttccttgggcagaatacagtgagccaaagaagttgccaggggatgatcgcttgatgaagaatcgcgcagatcaccgctctagccccaatgttgcaaatcagccgccttcccccggcgggaagtccgcttacgctagtggaaccactgctaagataacgtctgtttccacaggcaacctctgtacagaggagcagacccctccacctcgccccgaggcttacccaatccccacccagacctacaccagagagtatttcacttttccggcaagcaaatcacaagatcggatggccccaccacagaaccagtggccaaactatgaagagaagccccacatgcatacggattccaaccacagttctattgctattcaacgagtgacaagatcgcaggaggagcttagagaggataaggcctatcaactcgagagacaccggattgaggcagctatggatagaaagtcagactcagacatgtggattaatcagtcgtcctcactcgattcctctacaagctctcaggaacatctgaatcatagtagtaagtctgtgactccagcatccacactgacaaaaagcggacctgggcgatggaagacccctgccgctattcctgccacgcctgtggctgtgtcacagccaataagaaccgatctccctccacccccaccacctccacccgtccattacgccggcgatttcgatggcatgtcaatggatctcccgctcccgccacccccatcagccaaccaaatcgggctgccctccgcacaggtggccgcagcagaaaggcggaagagagaagagcaccagcggtggtacgagaaggaaaaagctcgattggaagaagaacgagagagaaaacgtcgagaacaggaacgcaaattgggccagatgagaactcagtcattgaacccagcgccgtttagtcccctcacagcccagcagatgaaacctgagaaacccagtactttacagaggccacaggaaacagtgattcgagagctgcagccgcagcaacaacccaggaccatcgaaagacgggatctgcagtatatcaccgtcagcaaggaagaattgtcatccggtgactccctgtcacctgatccctggaagcgtgacgcaaaagaaaagttggagaaacagcaacagatgcacatcgtcgatatgttgtccaaggagatacaagaactccagtcaaagcctgaccgatctgccgaagagtccgaccgcttaagaaagcttatgctcgagtggcagttccagaaacgcctgcaggagtctaagcagaaggacgaagacgatgaggaggaagaggacgacgatgtcgacaccatgctcatcatgcagcgcctcgaagccgaaaggcgggccagacttcaagatgaagagcgccgacggcagcagcagctcgaggaaatgcgcaagagggaggcagaggaccgtgcacgacaggaagaagagagaagaaggcaagaagaagagcgcactaaacgggatgcagaggagaagcgccgccaggaggaggggtattacagcaggcttgaggccgagagacgccgtcagcacgacgaagctgctagaaggcttctggagccagaggcccccggcttgtgtcgcccgcctctgccaagggattacgagccaccctcgccttcccccgctcctggggcacctccccctccaccacagagaaacgcctcctatttgaagacccaggtcctgagcccagactctctgttcaccgcgaagtttgtggcatataatgaagaagaagaggaggaggattgttctttggctggcccaaactcctatcccggaagcaccggagctgcagtgggcgcacatgacgcctgcagggacgctaaagagaagagatctaagagccaggatgcagactcccctgggtcctcaggtgctcccgagaatcttacttttaaggagcggcagcgcctgttctcccaggggcaggacgtgagtaataaggtgaaggccagtaggaagctcacagaactggagaatgagctaaacaccaagtag

SEQ ID NO: 196044 - DNA, 4956 bp, synthetic construct
  misc_feature 1..4956: note = Description of Artificial Sequence: Synthetic coding sequence
  source 1..4956: mol_type = other DNA
atgagcgccggcggccgggacgaggagcggcggaagctggccgacataatccatcactggaacgccaaccggctcgatctatttgagatcagccagcccactgaggatctggagttccatggagttatgcggttctacttccaggacaaagcggccggaaactttgctaccaagtgtatcagagtgtcgtccaccgctacaacccaggacgtaattgagacactggccgagaagtttcgtcctgatatgagaatgctgagctccccgaagtactccctgtacgaagtgcacgtgtctggtgagaggagactggatattgacgagaagccactggtcgtacagcttaattggaacaaagatgatagagaggggaggtttgtgttgaaaaatgaaaacgatgcaatacccccgaaaaaggcccagagcaacggcccagagaaacaggagaaggaaggagtcatccaaaattttaaacggacactctccaaaaaggagaagaaagaaaaaaagaagcgagagaaggaagcattgcgacaggcatcagacaaagatgacagacctttccagggtgaggacgtggagaatagcaggctagcagctgaagtgtacaaggatatgcctgagacctcctttacaagaacaatttctaaccccgaggtggtgatgaaaaggaggaggcagcagaagctggagaagaggatgcaggaattccgctcttctgacggaaggccagactctggaggcacgttaaggatttatgccgatagtctcaagccaaacattccctacaagacaattcttctgagcacaacagaccccgctgactttgccgtcgctgaggctctcgagaaatacgggctggagaaagagaatcccaaagattactgtattgctcgtgttatgctgccaccaggggcacagcattccgatgagaaaggcgccaaagaaatcattctggacgatgatgagtgccctttacagattttccgcgaatggcccagcgacaaagggattctcgtcttccagcttaagaggcggccgcctgatcacattccgaagaaaacaaagaagcacttggaaggtaaaactcccaaaggaaaagaaagagcagatggaagtggatatggcagcacattaccaccagaaaagctcccatacttagtggagttgtctcctgggcggcgtaatcacttcgcatattataactatcacacatacgaggacgggtccgattctagggataaacctaagctgtatagattacaactaagtgtcacagaggtgggcaccgaaaagcttgacgacaatagtatacagcttttcggtcctggaattcagcctcaccattgtgatctcacaaatatggacggagtggtaaccgtgacacctcgttccatggatgcagagacttacgtggaggggcaacggatttcagaaactacgatgctgcagtccggcatgaaggtgcaattcggcgcctcccacgtgttcaaattcgtcgatccaagtcaggaccacgcactggcaaagagaagcgtggacggcggcctgatggtgaaagggcctcgccacaaacctggaatcgtgcaggaaacaaccttcgatctcggcggtgacattcatagcgggacagctttgccgacgtccaagagcactactcggctggactcagacagagtcagttcagccagctccactgctgaaagagggatggtaaaacccatgattagagtggaacagcagccagattaccgacgccaagaaagccgaacacaggacgctagcgggcctgaattgatcttgccagcatctatcgagtttcgagaatcgtccgaagactcctttctgagcgctattattaattataccaacagctcaactgtccattttaagctcagcccaacttatgtactgtacatggcttgccgctatgtactgtctaaccagtaccgccctgacatatccccgaccgaacgaacccataaggtgattgcggtggtaaataagatggtatcaatgatggagggcgtgattcagaaacagaaaaacatagcgggggctttagcattttggatggctaatgcttcagaattgctcaatttcattaaacaggaccgcgacctatcacgtatcactctggacgcccaggatgtcttggcccacctggtgcagatggcattcaagtatttggtacactgcttgcagtccgagctgaataactacatgccagcgttcctggacgaccccgaggagaacagcttgcagcggcccaaaattgacgacgtgctccatacactgactggggcaatgtccctgctccgccggtgccgggtgaacgctgcgttgaccattcagttgttcagccagctcttccacttcattaacatgtggctttttaataggcttgttacagatcctgattccgggctgtgcagccactattggggcgctattattcggcagcaactcggacatattgaggcatgggctgagaagcagggactggagctcgcggcagattgtcatctcagtcgcatagtgcaggccacaacattgctgacaatggataaatacgccccagacgacataccaaacattaatagtacgtgttttaagctgaattctttacaactacaggcattgcttcagaactatcactgtgctccagatgaaccctttattcccacagaccttatcgagaatgtggtcactgtggccgaaaacaccgccgatgagttggcccgctcagatggaagggaagtacaactggaagaggatcctgatctgcaactcccttttttgctgcccgaggatgggtactcctgcgatgtagtccgcaacatccctaatggactgcaggaatttcttgatcccctgtgccagagaggattctgccggctgatcccacacacaaggtcgccgggcacatggacaatatatttcgaaggcgctgattacgagagccacctattacgcgagaacaccgagttggcccagcctctgcggaaagagcccgaaatcatcaccgtgacgctaaagaaacaaaacggcatggggctcagcattgtcgccgccaagggagcagggcaggacaagctgggaatttacgtgaaatctgtggtgaaggggggagccgctgatgtggacgggagactggctgccggcgaccagttgctctccgtggatggacgcagtctggttggtttatcacaggagcgagccgcagagctcatgacccgtacaagcagcgtcgtgactctggaagtagctaagcagggcgccatctaccatggtctggccacccttctgaaccaacctagccccatgatgcagcggatcagcgataggaggggctctggtaaaccccgcccaaagtctgaaggatttgagctttacaataactccacacagaacggcagtcccgaatccccccaacttccttgggctgaatacagcgaacccaagaaactccccggggatgatcgactcatgaagaacagggccgatcatagatcatccccaaatgtggctaaccaaccaccatcaccgggggggaaatccgcatacgcgtctggaaccaccgcaaaaattacaagtgttagcacaggaaatctgtgcaccgaggaacaaaccccccctcctaggccggaagcctacccaattcctacacagacctatactagagaatacttcactttccctgcctctaagtcccaggatagaatggcccccccacagaaccaatggccaaactacgaagaaaaaccgcacatgcacacagactccaaccattcctctattgctatacagcgtgtcaccagatcacaggaagagctgcgagaggataaagcttaccagctcgaaaggcaccggattgaggccgccatggacaggaagtccgattccgatatgtggattaaccaatcatcatctctggactcgtcaacaagtagccaggagcatcttaaccactccagcaagtccgtgacccccgcctccacccttaccaagtccggacccggcagatggaaaaccccagccgccattcctgccacacccgtcgcagtgtcacagcccatcaggactgatctccctccacccccaccccctcctcctgttcattacgccggggactttgatggaatgagcatggatctgccactccctcctcctccgtcagcgaaccagatcggactgccttcggcccaggtggccgccgctgaacgacgcaagagggaggaacatcagaggtggtatgagaaagagaaagctaggctggaggaggagcgtgaacggaagcgtagggagcaggagcggaaattgggtcaaatgcgcactcaatccctgaacccagccccattttcccctctcactgcacagcagatgaagcctgaaaaaccaagcacactgcagcggccccaagaaaccgtgatacgcgaactccagccacaacaacagccgcgcaccatcgagcgtagagacctgcaatatatcactgtctctaaggaagaactgtcctcaggcgacagcctaagccccgatccttggaaacgcgacgccaaggagaagttggagaagcagcaacaaatgcacatcgtcgacatgctcagcaaagaaatccaggagcttcaatctaaacctgatcggtccgcagaagaatcagataggcttaggaagctgatgcttgagtggcagttccagaagaggttgcaagagagcaagcagaaagacgaggacgacgaagaggaagaagacgatgacgtagacaccatgctcatcatgcagagactggaggcggagagacgcgccagggatgaggagcgtcggcgacagcagcaacttgaagagatgcgtaaaagagaagctgaggatcgcgccaggcaggaagaagaaagacgaaggcaggaagaagagagaacaaagcgcgacgccgaagagaaagtgatggtactgtag

SEQ ID NO: 196045 - DNA, 5232 bp, synthetic construct
  misc_feature 1..5232: note = Description of Artificial Sequence: Synthetic coding sequence
  source 1..5232: mol_type = other DNA
atgagcgccggcggccgggacgaggagcggcggaagctggccgacatcatacatcactggaacgccaatcgtctggatctgtttgaaattagccagccgactgaggacctggagtttcacggagtcatgcgattttattttcaggataaagcggctgggaactttgccactaagtgtatcagagtctccagtaccgccaccacccaggatgtcattgagactctcgctgagaagtttagaccggatatgcgtatgctgtcgagcccaaagtacagcctgtacgaggtgcacgtaagcggcgagagaaggttggacatcgatgagaagccattagttgttcagctcaactggaataaggatgaccgggagggccgctttgtgcttaagaacgagaacgacgccatcccacctaaggcgcaatcaaacgggccagaaaagcaggaaaaggagggcgttatacagaacttcaagcggactctttctaagaaggagaagaaggagaaaaaaaaaagagagaaggaggctctccgacaggcctctgataaagacgatcggcccttccaaggggaagatgtggaaaatagtcgacttgctgctgaagtttacaaggatatgcccgaaacctctttcacccgaactatttccaatcccgaggtcgtgatgaagcgccgacgtcaacagaaactagaaaagaggatgcaggagttccggtcatctgacggcagaccagactccggtgggactttgcgaatctatgctgactccctgaaaccgaatatcccctataaaactatccttctgtctactactgatcccgccgactttgccgtggccgaagcccttgaaaagtatggtctggagaaagaaaaccctaaagactactgtatcgcccgcgtgatgctgcctcctggggctcagcactccgatgagaagggcgccaaggagattatactggacgatgatgaatgtccgcttcagatttttcgtgaatggcccagcgataagggaattcttgtctttcagcttaagaggagacccccggatcacatccctaaaaaaacgaagaagcatctggaggggaagacccctaaaggcaaggaacgcgccgacggatctggctatggtagtaccttaccaccggaaaagctcccttacctggtcgagctcagccctgatgggagcgactcgcgggacaagcccaagctgtatcgcctgcaactgagtgttacagaggtggggaccgagaagctggacgataattctatccaactttttggtccgggtattcagccacaccactgtgacctgacgaatatggatggtgtcgtgacagttacccccagaagcatggacgccgaaacttacgtcgaaggtcaacgaatcagtgagaccaccatgctccagagtgggatgaaggttcagtttggggcatctcatgtgttcaagttcgtagaccctagccaggatcacgctttggccaaacgatctgtagatggcggactgatggtgaaagggccccgccataaacccggcattgtgcaagagactactttcgacctgggaggggatatccattccggaaccgctctgcccacctccaagtctaccaccagattggactccgacagagtttcttctgcttcatccactgccgagcggggaatggtgaagcccatgattcgggttgaacagcagccagactaccgccgacaggagtcaaggacccaggacgccagcggccctgaacttattctccccgcaagcatcgagtttcgggagagtagcgaagattcctttctgtccgctatcattaactacaccaatagcagcactgtgcatttcaaactctctcccacctacgtcctctacatggcttgtagatacgtgctgtcgaatcagtaccgccccgacatctcccctactgagagaacgcataaagtgatagctgtagtgaacaagatggtgagcatgatggaaggagtgatccagaagcagaaaaatatcgccggtgccctggccttctggatggccaatgcttctgaattgctgaatttcatcaagcaggatcgtgacctgagcaggatcacactggacgcccaggacgttctggcccatctagtgcagatggcctttaagtatctggtccactgtttgcaatccgagctcaataattatatgcccgcttttcttgacgaccctgaagaaaactcccttcaacgacccaagattgatgatgttctccataccctgacgggcgccatgtctctacttcgacgctgcagggtcaatgcggccctgacaatacagctcttttcccagttgtttcacttcatcaatatgtggctgttcaaccggttggttaccgatcccgacagtggcctttgctcccattattggggcgcaatcatacggcaacagctgggtcatattgaggcttgggctgaaaaacaaggtctcgaactagcggcagattgccacctatcgaggatcgtccaggctactacacttctcaccatggataagtacgccccagacgatattcccaacatcaactccacttgtttcaaattgaactccctgcaactgcaagccctgttgcagaactatcattgcgcacctgatgaaccttttatcccaactgacctgatcgagaacgtggtgaccgtggccgagaacaccgctgacgagcttgcacgcagcgatggacgcgaagtgcaactggaggaggacccagacttgcagttgccattccttctgcccgaagatggctatagttgcgatgtggtgcgtaacatcccaaacgggctccaggagtttctggaccctctgtgtcagcgtggcttctgccgactgattcctcatacacggagcccgggaacgtggacaatttactttgagggggcggactatgaatcccacctgctccgtgaaaacaccgagctggctatccctcttcggaaagagcctgaaattatcacagtgacgctgaagaaacagaatggaatgggcctgagcattgtcgcggcgaaaggggccggacaggacaagttaggaatatacgtgaaaagcgtggtaaaaggaggggccgcagacgacggccggctcgcagctggtgaccagcttctgagcgtggacggcaggtccttagtgggactctctcaggagagggccgctgaactgatgacccgcacctctagcgtcgtcacactggaggttgcaaagcagggcgctatctaccatggtctggccacgctcctgaatcaacccagccccatgatgcagaggatctcagataggagagggtcaggcaaaccgcggccaaaatctgaagggttcgaactctacaataacagcactcagaatggatcccccgagagccctcaactcccttgggcagagtacagcgaaccgaaaaaactgcccggagatgataggctgatgaaaaatcgggcggaccatcggagttcaccaaacgtcgcgaaccaaccaccatctcctggcggaaagtcggcatacgctagcggcaccaccgcaaaaatcacctccgtgtcaaccgggaacctgtgcaccgaagagcagacccccccgccgcgtcccgaagcttaccccatcccaacccagacgtacacgcgcgaatactttactttccctgcaagcaagtctcaggatagaatggccccaccgcagaaccagtggcctaattatgaagaaaagcctcatatgcatacagattcaaatcattcttccatcgctattcagcgagttactagatcccaggaggagcttcgtgaagataaagcatatcagctggagcgacatagaatcgaagcagcaatggaccggaaatcagacagcgatatgtggatcaatcaaagtagttctttagattcttcaacatcatcacaggaacaccttaatcactcgagcaagtcagtgacacctgcctctactttaactaagtccgggcctgggcggtggaaaacccctgccgccatccccgctactcctgtggccgtctcacagcccattcgtaccgatctgccaccgcctccaccccccccgccagtacactatgccggggatttcgacggcatgagtatggacctccctctgccaccccccccttcagctaaccaaattggactcccctcagcacaggtggcagccgctgagaggcgcaaaagagaggaacatcagcgctggtacgagaaggagaaggcccggttggaggaggaaagggagagaaagaggagagagcaagagaggaaactagggcagatgaggacccaaagtctaaaccccgctcctttcagtccccttacagcacagcagatgaagccagaaaagccatcaaccctccagcggccacaggagactgtcatcagggagctgcagccgcagcagcagccgcggaccatcgaaaggagagaccttcagtatatcacagtgtcaaaggaagaactatcttctggggattccctctccccagacccctggaagcgggatgctaaggagaagctcgagaagcagcaacagatgcatatagtggacatgttgagcaaagagatccaggagttacagagtaagccggatcggtcagctgaagagtctgaccgtctgcgaaagttgatgcttgagtggcagttccaaaagaggctccaggagtccaaacaaaaggacgaagatgacgaggaagaggaggacgatgatgtggacacaatgttaatcatgcagcggctggaggccgagagacgggctcggctgcaggacgaagaacgacgcagacagcagcagctggaagaaatgcgcaagcgcgaggccgaagacagagcaagacaggaggaagagcgacgccggcaagaggaggagcgcacgaagcgagatgcagaggagaagagaaggcaggaggaaggctattatagccggctggaggccgaacgacggaggcaacatgacgaagctgcccggcgactgttggaaccggaggcccctggtcctaactcatacccaggcagtacaggggcggcagtgggcgcacacgatgcatgtcgagatgccaaggagaagcgctcaaaatcccaagacgcagatagcccaggcagttccggcgcccctgaaaacttaacctttaaagagaggcagagattgttctctcagggacaggacgttagcaacaaggtgaaggcaagcagaaaattaactgaactggagaatgaattgaacactaagtag

SEQ ID NO: 196046 - DNA, 5475 bp, synthetic construct
  misc_feature 1..5475: note = Description of Artificial Sequence: Synthetic coding sequence
  source 1..5475: mol_type = other DNA
atgagcgccggcggccgggacgaggagcggcggaagctggccgacattatccaccactggaacgcaaacagattggacctattcgaaatttcccagccaactgaggacctggaattccatggagtcatgcggttctacttccaggacaaggcagcaggaaactttgcaaccaaatgtatacgagtttcaagcactgcaacgactcaagacgtcatcgaaactctggcagagaaattccggcctgacatgcggatgctctcgagcccgaaatactcgttgtacgaggttcacgtgtcaggcgagagacgattagatatagatgaaaagcctcttgtcgtgcagctcaattggaataaggacgaccgcgaagggcggtttgttctgaaaaacgaaaatgacgccatacccccaaaaaaggcccagagtaacgggccagaaaagcaggagaaggaaggcgtgattcagaacttcaaacggaccctgtcgaagaaagagaaaaaagagaagaagaagcgcgagaaggaggccctgaggcaagcatcagacaaagatgaccggccgtttcagggagaggatgttgaaaatagtagacttgcggcagaagtgtacaaagacatgcctgagacttctttcacacgaaccattagcaatcccgaagtcgtgatgaaacgtcgtaggcaacagaaactggaaaaacggatgcaggaattccggtcctccgatgggcggccagacagcggcggtacgctacggatatatgcagactctctcaagcccaacatcccctataagactatcttgctctcaaccacggatcccgccgacttcgctgtcgccgaagccctggagaagtacggactggaaaaggaaaatcctaaagactactgtattgccagagttatgcttcctccaggagctcagcattccgatgagaaaggtgctaaagagataatacttgacgatgatgagtgcccccttcaaatattccgcgaatggcccagcgataaaggaatcctggtattccaacttaaacgccggcctcccgaccatataccaaagaaaacaaaaaagcaccttgaaggcaaaactccaaagggaaaagaaagggcagacggaagcggctatggatctactttgcctccagagaagctgccttacctcgtagagttgtcccccggcaggaggaatcatttcgcctactacaattaccacacgtacgaggacggatccgattcccgcgacaagccaaaactttatcgcttgcagctgtccgttaccgaggttggtacggagaagttggatgacaattctattcagctgttcgggcccggaattcagccacaccactgtgatctgacgaatatggacggagtagttacggtcacaccacggagcatggacgccgagacctatgttgaagggcagaggatcagtgagaccactatgctgcagtccggtatgaaagtacagtttggcgcttcacatgtctttaaattcgtggaccccagccaggaccatgcattagccaagcggagtgtggacggggggcttatggtgaagggcccacggcacaaaccgggcatcgtgcaggagacaaccttcgatctggggggtgatatccactcaggtacagctctccctacatccaaaagcacgacacgtcttgacagcgacagggtttcatccgccagcagcacggctgaacgcggaatggtgaagcccatgatacgggtagaacagcagcctgattaccgtcggcaggagagcaggacacaggatgcatccggtccagagctcatactgccagcttctatcgaatttcgcgaaagtagcgaggatagttttctgagcgccatcattaattatactaactcttccacggtgcacttcaaactgagccccacctatgtgctctacatggcctgtcggtacgtcctatcgaaccaatatcgacccgacattagccccaccgagcggacccacaaggttatagctgtggtgaacaaaatggtcagcatgatggagggagtcatccaaaagcaaaagaacattgccggggccctggccttctggatggccaatgcgagcgagttgcttaacttcataaagcaggatagggatctctcccggattaccctcgacgcccaagacgtcctcgctcacttggtgcagatggccttcaagtatttggttcactgtctgcagagcgagctgaataactacatgccagcttttctggacgacccggaagaaaatagtctacaaagacccaagattgacgacgtcctgcacacattgaccggggccatgagtctcctgcgaaggtgtcgcgtcaacgccgctctgaccattcagctatttagccagctatttcatttcatcaatatgtggctgtttaaccggctggtcactgatccagacagcggactttgcagccactattggggcgcaattatccgacagcagctgggccacatcgaggcttgggccgagaagcagggtctcgagctcgctgctgattgtcatctgtcaagaatcgtgcaggccaccacgctcctcactatggataagtacgccccggatgatatccccaatattaactccacttgctttaagcttaacagtctgcaactgcaggctttactccagaattatcattgcgctcctgacgagccttttatccccaccgacctcattgagaacgtggtcaccgttgccgaaaataccgccgacgaactcgctagaagtgacggccgtgaggttcaactggaggaagaccctgacttgcagctgccattcctcctacctgaggatggttactcctgtgacgtggttcgcaacattcccaacggactccaagaattcctggatccactgtgtcagaggggattctgtcggttgatcccccatacaaggtcccccggaacatggaccatttacttcgaaggcgccgattacgaatcccacctcctgagggagaacaccgaactggcccagcctctgcgcaaggaacccgagattatcactgtcactctcaaaaaacagaatggaatgggactcagcatagtggccgccaaaggcgcggggcaggacaagttggggatatacgtcaagagtgttgtgaaggggggcgccgcagacgtagatggccgcctggcagctggggaccaactcctaagcgtagacggcagatctttagttggactatcacaggagagagccgctgagctgatgacaaggacaagctccgtcgtaactctggaggtagctaagcagggggctatttatcatgggctagcaacccttctgaaccaaccatccccgatgatgcagcgcatttcagataggcgaggctccggaaagcctcggccaaagagtgaaggtttcgagttatacaataatagcacgcagaatggctcgccagaatccccccagctgccctgggccgagtacagtgagccaaaaaaacttccaggcgacgatagattaatgaagaacagggccgaccatcgcagttcaccgaacgtagctaaccagcccccatcccccggtggcaagagcgcctacgccagtgggacaactgccaagatcacctcggtaagcacgggaaacctttgcaccgaggagcagactcctccgccacggcccgaggcatatccaatcccaacgcaaacctatactcgcgagtacttcacgttcccagcctccaaaagccaggaccgcatggctcctccacagaaccagtggcccaattatgaggaaaagccccacatgcacacggactcgaaccactcttctatagctatccagagggtcacaaggtcccaggaagaattgcgcgaagacaaggcgtatcagttagagcggcacagaattgaagccgcaatggacagaaaatccgacagcgacatgtggattaatcagtctagttccctcgattccagcacatcatctcaggagcacctgaaccacagcagcaagtcagttacaccagcctcaactttaacaaagagcgggcctgggagatggaaaacaccagcagccatacctgccaccccagttgccgtttctcaacccattcgcacagatcttccacctcccccccctccgccccctgtccactacgctggggacttcgatggcatgtctatggacctgcccctcccgccaccaccttcggccaaccagatcgggctccctagcgcccaggtcgcggctgcggagagacgaaaaagggaagagcaccaaaggtggtacgaaaaagaaaaagccagattagaggaagaacgcgagcggaagcggcgagagcaggagagaaagctggggcagatgcggactcaaagcctgaatccagctccattttcccccttgactgcacaacagatgaaacccgagaagcccagcactctccaacgcccccaagaaaccgtaatccgggagctgcagccacagcagcagccaagaactatagagaggcgcgacctccagtacatcacggtgtcgaaggaggagctgtcatccggcgactccttgtcccccgacccttggaaaagagacgcaaaagagaagctcgagaagcagcagcagatgcatatcgtcgatatgctgtctaaggagatccaagaattgcagagcaaaccagacagaagtgccgaggaatctgacaggctacggaaactcatgctcgaatggcagttccaaaagaggctgcaggaatctaagcagaaagatgaggatgatgaagaggaggaggacgacgatgtcgacacaatgctgataatgcagagactggaagccgaacggcgggcccggctccaagatgaggagagaaggagacagcaacagttagaggaaatgcgaaagagagaggccgaggacagagcgcgacaggaagaggagcgtcgacgccaggaggaagagcggactaaacgggacgccgaagaaaagagacgccaggaggagggctattactccaggttggaggcagagcgccggcggcagcacgacgaggccgcacggcgactactcgagcctgaggccccggggttatgccgccctcccctccctagagactatgaaccgccctcccccagtcccgcccccggcgccccgcctcctccccctcaaaggaatgccagctatctcaagactcaggtgctaagtcccgatagcttatttactgccaaattcgtggcctataatgaagaggaggaggaagaggattgttcactggcaggtccaaatagctatcccggtagcaccggcgccgctgtgggagcccacgatgcctgtcgtgatgctaaggaaaaacgttctaagtcccaggacgcagattccccaggcagcagtggtgcccctgaaaatcttacctttaaggagcgtcaacgccttttttcacagggccaggacgtgagcaacaaggtgaaagctagcaggaaactgactgagctggagaatgagctgaacactaagtag

SEQ ID NO: 196047 - DNA, 3282 bp, synthetic construct
  misc_feature 1..3282: note = Description of Artificial Sequence: Synthetic coding sequence
  source 1..3282: mol_type = other DNA
atgaaggagatggtgggcggctgctgcgtgtgcagcgacgagcggggctgggccgagaacccgctggtgtactgtgacggtcacgcctgtagcgtggtggtgcatcaggcctgctacgggatcgtccaggtacctaccggcccttggttttgtaggaagtgtgagtcccaggagcgagccgcccgggtccgctgtgaactctgtcctcacaaggatggagcactcaaacgaacggataacggagggtgggcccatgtggtctgcgcactctacatccccgaagtgcagtttgccaatgttctgacaatggagcccattgttctccagtacgtgcctcatgatagattcaataagacatgttatatttgtgaagagcaagggagggaatccaaggcggcatctggcgcttgcatgacatgtaatcgccatggctgccgacaagctttccatgttacgtgtgcccagatggccggtctgctttgcgaggaggaggtccttgaggtcgacaacgttaagtattgtgggtattgcaaataccacttctccaagatgaaaacctcaaggcactccagcggcggaggcggggggggggctgggggggggggcggctctatgggaggtggcggctctggctttatctcagggcggaggtctcgaagtgcctcaccatctacccaacaggaaaagcaccccacacaccatgaacgggggcaaaaaaagtctcggaaagacaaagagagacttaagcaaaaacacaagaaaagacccgaatctcccccgagcatccttacccccccagtcgttcctaccgctgataaagtgtccagctccgcttccagctcatcgcaccatgaagcctcaacacaggagacctcggaatcgtcgcgggaatcaaagggaaaaaagtctagcagccattccttaagccacaagggtaagaagctgtcttcaggtaaaggcgtctcttcattcacctccgccagttcatcttccagctctagtagctcttcatcaggcgggccttttcaacctgctgtgtcgagcttacagtcatctcctgacttctcagcatttcccaagctcgagcaacctgaggaagataagtattccaagcctaccgctcctgccccgtccgcacccccttctccctctgcaccggaaccgcctaaagccgacctatttgagcagaaagtggtcttcagtggcttcggccccatcatgcggtttagcaccacaacctcatcatctggacgcgcacgggcgccctctcccggtgattataaaagccctcacgttacaggctctggtgcttctgccggaacacacaaaagaatgccagcactgtcggctacaccagtcccggctgacgagacccctgaaaccgggctgaaagaaaagaaacataaggcctctaaaagaagcagacacggccctggccggccaaagggtagccgcaacaaggaggggaccggcggcccagccgcaccctctctgccgtctgctcaactggcaggctttactgccaccgcggcctcaccattctctgggggatccttagtgtcgagtggtctgggcggcttgtcttcccgcacattcggcccatcgggttccctcccctccctttcactggagtcaccgttgctcggtgcaggcatctacacctccaacaaggatcctatcagccatagcggcggcatgttgcgcgctgtgtgcagcaccccacttagcagcagtctgcttggccctccgggaacgtctgccctgccaaggctctctaggagcccctttacatccacacttccaagcagctcagcatccattagtacaacccaggtgttcagcctggctgggtccacattctctcttcccagcacccacatatttggtacccccatgggggcggtgaatcctttgttgtcacaagcagagtccagtcataccgaaccagatcttgaagactgctctttcaggtgtcgcgggacgtctccccaggaatctcttagctccatgagccccatttcctctctgccagccctcttcgaccagaccgcctcagcaccttgcggcgggggccagctcgatccggccgccccaggtactaccaatatggaacagctgttagagaaacagggggatggcgaagcaggtgtcaatatcgtggagatgctaaaagctctgcatgcgcttcagaaagaaaaccagcggttgcaggagcagatcctgtccctgaccgcaaagaaagagcgtctgcagattcttaatgtgcagcttagcgtcccctttccggccctccctgctgccttaccagcagccaatggcccagtgcccggtccttacggtctgcccccccaggcgggcagttccgattccctgtctacatccaagtcaccgccaggcaagtccagtctggggctggataatagcttatccacaagcagcgaagatcctcattccggctgtccatctagaagctctagctctctttcctttcattctacaccaccacccctgcccctgctgcagcagtccccggccactttacctctggccctgcccggggcccctgcccccctcccgcctcaaccgcagaatgggttaggacgcgctccgggagcagccggactgggggcaatgcccatggccgaggggctgcttggcggattggccggctccggcggcctgccattaaatggtctgctgggcggtctgaatggtgccgcggcacctaatccagccagcttaagtcaggccgggggtgcccccaccctccaactaccagggtgtctaaacagtctcaccgaacagcaaagacacttgcttcagcagcaggaacagcaactccaacagctgcagcagttgctcgcatccccacagctgacaccggagcaccaaacagttgtgtaccagatgatccaacagatccagcagaaacgcgagttgcagagacttcaaatggctggcggatctcagctgccaatggcaagcctgctcgctggctcaagtactcccttactgtccgccggaaccccggggctcctgcctacggcttctgctccgccactgcttcccgctggcgccctcgtcgctccctcactcggcaacaataccagtctcatggcagctgccgctgctgcagccgctgtagctgcagcagggggcccacccgtcttgactgctcagaccaacccgtttctatcgctgtccggtgcagaaggcagcggcggcggccccaagggggggacagctgacaagggcgccagtgctaaccaggaaaaggggtag

SEQ ID NO: 196048 - DNA, 978 bp, synthetic construct
  misc_feature 1..978: note = Description of Artificial Sequence: Synthetic coding sequence
  source 1..978: mol_type = other DNA
atgaaggagatggtgggcggctgctgcgtgtgcagcgacgagcggggatgggctgaaaaccccttggtgtactgtgacggccacgcctgcagcgtggtggtacaccaggcttgctacggtatcgtgcaggtgccaaccggaccctggttctgtcgcaagtgcgaatcccaggagcgtgctgctcgtgtccgctgcgaattgtgtccacacaaagatggcgcactgaaacggaccgacaatggagggtgggctcatgtggtgtgcgctctctatattcccgaggtgcagtttgccaacgtcctgaccatggaacctattgtgctgcaatatgtgccccatgatcgattcaacaaaacatgttatatttgtgaggagcagggtagggaaagcaaggccgcatcaggggcatgtatgacttgtaaccgacacggatgccggcaggcttttcacgtgacctgtgcccagatggctggcctgctatgtgaagaggaagtgttagaggtcgacaacgttaagtattgtgggtactgcaaatatcacttctcaaaaatgaagaccagccggcattctagtggcggcgggggaggaggcgcgggcggtggcggtgggtcaatgggcggcggcggtagcggttttatatctggccggaggagccggtcggcctctcccagtacccagcaggagaaacatccaacacatcacgagagagggcaaaagaaaagtcgtaaagacaaggagagattgaagcagaagcacaaaaagaggcccgaatctcctccttcaatattaaccccccccgtggtccccacagccgataaaccccgcagaggccaccagagcccaaccaatcatggaattggtagcctgggctgttgtctgccagatactcctatctgtctctgcccagaaggtcttagccccgggttattgtcagctgaatccggcgggagacatagtggactactgtccaagttctag

SEQ ID NO: 196049 - DNA, 16614 bp, synthetic construct
  misc_feature 1..16614: note = Description of Artificial Sequence: Synthetic coding sequence
  source 1..16614: mol_type = other DNA
atggacagccagaagctggccggcgaggacaaggacagcgagcccgcggctgacggcccagccgcctccgaggatccgtccgcaactgagtcagatttgcctaatccccatgttggcgaggtgtcggtgctcagttccgggtcgccaagactgcaagagactccccaggactgtagcgggggacctgtgcggcgatgcgccctgtgcaactgcggtgaaccttcccttcacggccagagggagctgcggcgcttcgaattgccattcgactggccacgttgtccagtggtttcaccagggggatccccaggcccgaatgaagcagttctcccttccgaggacctttcacagatcggattccctgaaggtttgacccctgcccacttgggggagcccggtggctcttgttgggctcaccactggtgcgctgcatggtctgccggcgtgtggggccaggaggggcccgagctgtgcggagtggataaggcaatcttcagcggaatttcgcagcgctgctcacactgcactcgactgggcgcatctataccttgcaggtcccccggatgtcctagattatatcacttcccttgcgccacggcatccggtagcttcctgagcatgaaaacactgcagctgttatgccctgagcacagcgagggcgctgcgtaccttgaggaagccagatgtgcagtctgtgagggcccgggcgagctgtgcgatctgtttttctgtacctcatgcggtcatcattaccacggcgcatgcctagatactgcattgacggcacggaagcgtgctggttggcagtgcccagagtgcaaagtctgccaggcctgccgcaagcctgggaacgactcaaagatgctcgtttgcgagacctgcgacaaggggtatcacaccttctgcttaaagccccccatggaagagttaccagcgcatagctggaaatgtaaggcttgccgggtgtgtagggcgtgcggggccggcagtgctgaactgaacccaaactctgaatggttcgagaactactccctgtgccaccgctgccacaaagctcagggtggacagacaattaggtcagtcgctgagcaacataccccggtgtgctccagattttcccctccagagcctggggatacccccactgacgagccggacgccttgtatgtcgcctgccaggggcagcctaaggggggccatgttacatctatgcagccaaaggaacctggccctctgcagtgcgaggctaagcccttagggaaagccggagtgcagcttgaaccacaactggaggcacccttgaacgaggaaatgcccctgctccccccccccgaggagtcaccactcagtccccccccagaagaatcccccactagtccacccccagaagcatcaagactgtcccccccaccagaggagttacccgcgagtcccctgcctgaggctctacatcttagtagacccctcgaagaatcccccctgtccccgccaccagaagagagtcctctgtctccaccccccgagtcatctccctttagcccacttgaggagagtcctttatctccccctgaggaatccccgccttcaccagccctggaaaccccgctgagtcccccacccgaggcctcgcccctgtccccccctttcgaagagtccccgctgagcccaccccccgaagaactccctacctccccccctccagaagcgtctagactgagtccaccacccgaggagagccctatgtctcccccaccagaggagagtcctatgagccctcctccagaggccagccgcctgttccctcccttcgaggaatcacccctgtcacctccacccgaggaatcccctctttcgcctccacctgaggcgtcaagattaagccctcctccagaagacagccccatgtcccccccccctgaagagagtcccatgagcccaccccccgaggtctcacggttgagtccccttccggttgtgtcgagactgtcaccccctcctgaagaatcccctctgagccctccgcctgaggagagtccgacttcgccccctcccgaagcttcccggctgagtcccccacctgaggatagcccgacctctccccccccagaggattcccctgcctctcccccaccggaggattcgctgatgtctctgcccctcgaggagagcccgctgctgccactgcccgaagaaccccagctgtgccccagatctgagggtccacacctgagccctaggcccgaagagcctcatcttagccccagacctgaggagccacacctgtcaccacaagcagaagaacctcacttaagtccacagccagaagagccatgtctctgtgctgttcctgaagagccccatctgagcccacaggctgaaggtccacatctgagtccccagcccgaggagctgcatctgtcaccccagaccgaggagcctcatctgtcccctgttccagaggagccatgcttgtccccccagcccgaagagtctcaccttagccctcagtccgaggaaccttgcttgtcaccaaggcccgaagaatcacacctatcaccagaacttgaaaagccgcctctgagtccacgccccgagaagcctccagaagaacccggtcaatgtccagccccggaagagttgcccttatttcccccccccggagagcctagcttatcacctctgctaggagagccggcgctgagcgaacccggagagcccccgctaagccctctccccgaagagctgcccctgagcccgtctggagagccctcgctctctcctcagctgatgccccccgacccactccccccaccgttgagccctattattaccgcagcagctcccccagcactaagccctttaggtgagcttgaatatccctttggcgcaaagggggacagcgatccagagtccccactggcagcccctatactagagacccccatcagcccaccccccgaggccaactgtactgacccagaaccggtgccccccatgatcctgcctccttcaccgggctcccctgtggggccggcatccccaatcctgatggaaccattacctcctcagtgctcccccctgctgcaacacagcttagtccctcagaatagcccaccatcacagtgcagcccccctgccctgcctttgtcagtcccctcaccacttagtcctatcggcaaggtggtgggcgtttcagacgaagccgaactccacgaaatggagactgaaaaagtgagcgagcctgaatgccccgccttagagccaagtgccacttccccattgccttctccgatgggtgatctaagttgccctgctccgtcccctgcccccgctcttgacgatttctccggccttggggaggacacggctcccttggacggaatcgatgccccaggaagccagcctgagccaggccaaacccctggttctttggcaagcgagttgaaggggagtcctgtgttattggatccagaggagctggctcctgtgactcctatggaggtctatcctgagtgtaaacagaccgcaggccaaggttctccctgcgaggaacaggaggagccgagggccccagtggccccaacaccaccaactcttataaaaagtgatatcgtgaacgagatttctaatctcagtcagggcgatgcttccgccagttttcctggcagcgagccgctgctcgggagccccgatccggaaggaggcggcagtttgtccatggaactgggcgttagtaccgacgtgtcgccagccagggacgagggctctctccgcctatgcactgattctctaccagagactgacgacagcctcctgtgcgatgcgggaactgcgatcagtggaggcaaagccgaaggggagaaaggacgtaggcggtccagtccggcccggtcacgcatcaagcaggggaggtctagtagttttccgggacgcagaagaccgcggggaggcgcacatggaggacgtggacgtggaagagcaagacttaagagcaccgcatcaagtatcgagactctggtggtggcagacattgacagctcccccagcaaggaagaggaggaggaggatgacgatacgatgcagaatacagtagtgctgtttagcaacaccgacaaattcgtgcttatgcaggatatgtgtgttgtgtgcggatcattcggacgcggcgccgaagggcatctgctcgcctgttcacaatgttcacagtgctatcatccatattgtgttaacagtaaaatcacaaaagttatgctgctcaaagggtggcgttgcgtcgagtgcatcgtgtgtgaggtgtgcggccaggcgagcgatccttccagactcctgctttgcgatgattgcgatatttcctatcacacttattgtctggaccccccgttactgaccgtgcctaagggaggctggaagtgcaagtggtgcgtgtcctgcatgcagtgtggcgctgccagcccaggctttcactgcgagtggcaaaatagctatacccattgcggaccttgcgcttcactggtaacatgcccaatctgccacgctccgtacgtcgaggaagatctgctgatccaatgcaggcactgtgagcgctggatgcatgccggctgtgaatccctgttcaccgaggatgacgtggagcaagcagcagacgagggctttgactgtgtgtcctgccagccatacgtagttaaacccgtggcacccgtggctccacctgagctcgtaccgatgaaagtgaaagagcctgagccccagtattttcgcttcgagggggtttggctgacggagaccggcatggccttgctgagaaatctcactatgtcgcccttgcacaagcggagacagaggagaggaagattgggtctgccgggcgaagcgggcctggagggaagtgagccctcagacgctctgggccctgatgataagaaggatggcgacctcgataccgatgagctcctaaaaggcgaagggggagtcgagcatatggaatgcgagatcaaattggaaggccccgtttccccagatgtggaacctggaaaagaagaaactgaagaaagcaaaaaacggaagcgaaagccgtacaggcctggcatcgggggattcatggtccgacagcgtaagagtcataccagaacaaaaaaaggtccggctgcccaggctgaggtactcagtggcgacgggcagccagatgaagtgattcccgcagatctgccagcagaaggggcagtggagcagagcctcgccgagggggatgaaaagaagaagcagcagcggaggggcagaaagaagagtaagcttgaggacatgtttcccgcatatctacaagaggcattctttggtaaagaactacttgacctctcgcgcaaagcgctgttcgcggttggagtcggcagaccctctttcgggctgggtacacccaaggcaaaaggtgacggcgggagtgaacggaaggaactgcccaccagccagaagggagatgacggccctgatatcgctgacgaggagtcgcgggggctggaaggcaaagccgacactcccgggcccgaggacgggggagtgaaggcctcccccgttcccagcgaccccgagaagcccggcacacccggcgagggaatgctctcgtctgatcttgaccgcataagtacagaggaacttccaaagatggaaagtaaggatttgcagcagttattcaaggatgtgctcggctcagagcgggagcagcacctcggctgtggcacccctgggctggaaggctctcgaactccactgcagagaccctttctgcagggtggtcttccgctgggaaatctcccttcctcttcacctatggacagttacccaggcctgtgccagagccctttcctcgatagccgggagcgtgggggtttttttagtcctgagccgggtgagccggattctccttggacggggtccgggggcacgacacctagcacccctactacaccaaccacagagggggagggagatggcctgtcttataatcagcgttctttgcagcggtgggaaaaggacgaggaactgggacaactgtccaccattagccctgtcctgtatgccaatattaatttccctaacctgaaacaggactacccggactggtctagccgctgcaagcagatcatgaagctgtggcggaaggtcccggccgccgataaagccccctatctacaaaaagcaaaagataatcgcgctgcccaccgaataaataaggtgcaaaaacaggccgagtctcaaatcaacaaacagactaaggtaggcgacatagctcgtaagaccgatcgccccgctctgcacttacgaatcccaccccaaccaggagccctcggaagccctccgcccgccgctgctccaaccatctttatcgggtcacccacgactcccgcaggcctttccaccagtgcggacgggtttcttaagccgccagctggcagcgttccagggcccgactctcctggagagctctttctgaaactccccccacaggtgccagcccaggtccctagccaggatcctttcggactggcaccagcataccctctcgagccgcgctttccaacggcccctccgacatatcctccatacccctcaccgacaggggctcccgcccaaccacctatgctgggagcaagctctagaccaggagccggccagcccggagaatttcataccacaccacccggcactcctaggcaccagcctagcacccctgacccctttttaaagccgagatgtccatctcttgacaacttagctgtgcccgagagccctggggtcggggggggaaaggcctccgagccactcctgtcacctcctccttttggtgagtccaggaaagccctagaggttaagaaagaggaactgggagcatccagtccgagctatgggccccccaacctgggctttgttgactctccctcaagtggtacacatttaggcgggctagaactcaagaccccggacgtctttaaagccccacttacgcctagggccagtcaagtggagccacagagcccaggcctcgggctgcggccacaagaaccgccgcccgcccaggccttggctccttctcctccttcccaccccgacatctttaggccggggtcatacacagacccctatgctcagccgccactgacaccacgaccacagcccccccccccagagagctgttgtgccctgccccctaggagtcttccctctgatcccttttcccgggtgccagcctcccctcagagccaatcatcatcacagtcccctcttacaccaaggcccctgagtgcggaggccttctgtccttcaccggttacacccaggttccaatcgcctgacccttattctaggcctccctcccggccccaaagtagagacccattcgcccctctacataaacctccacgtccacagccaccagaggtggcgtttaaggccgggtctctcgctcacaccagcctgggggccggtggatttccagccgccctacctgcaggtcccgcaggggagctccacgcgaaagtgccctctggccagccacccaactttgtgaggtctcccgggaccggggcgttcgtgggaacaccatctcctatgcggtttactttcccacaggccgtcggagagccatccctgaaacctcctgtgccccaacccggcctgccaccaccacacggtattaactctcactttggtccggggcccaccctggggaaaccacagagcacaaactacacggtggcgaccggcaatttccaccctagtggcagccctcttggcccaagtagcggctccacgggggagtcatacggactctctccactgcggccaccatccgtccttcctcctcctgctcccgacggcagtctgccgtatctctctcatggcgctagccagaggagtggaattacatcccccgttgagaaacgggaggatccagggactgggatgggctctagcttggccacagcagaacttccaggaacacaggatccaggcatgtctggcctatcccagaccgagctggagaagcagcgccaacgtcagcgccttagggagctcttgataaggcagcaaatccagcggaacaccctgagacaggaaaaagaaaccgcagcagccgccgccggtgctgtgggaccgcccggatcatggggggcagagccttcgagcccggcttttgagcagctttcgagaggccaaacgccctttgctggcacccaagacaagagttcgctggtgggcctccccccttctaagctgtcgggaccaattttagggcctgggtctttcccaagcgatgacagactctctagaccaccaccaccagcaacaccctcctccatggacgtgaattcaagacagctggtcgggggaagtcaggcattttaccaaagagccccctacccagggagcctgcccctacagcagcagcaacagcaactttggcagcagcagcaggcgacggctgccactagtatgcggttcgccatgtccgctcggtttcctagtacacccgggccagagctaggacgccaggctctgggctctcccctggctggaatctctacccgcctgcccggcccgggcgagcctgtccccgggcccgctggtcctgcccagtttattgagctgcggcataatgtccagaagggcttgggaccaggtggaactccattccctggacagggaccaccacagagaccacggttttacccggtctccgaggatcctcaccgactggctcctgaagggctgagaggactcgccgtcagtggcttgcctccccagaagccctctgcacctccggctcccgaactcaacaacagcctccatcccacgccccacactaagggcccgactctccccacaggccttgagctggttaaccggcctccgagctccacagagctgggacgacctaatccacttgccctcgaagcagggaagctgccctgcgaggatccagaactggatgacgactttgacgctcacaaggcactggaagatgacgaggaactcgctcatctggggttaggagtagatgtggccaagggagacgatgaactgggaacactggagaaccttgagaccaacgatccccatctggatgatctgctgaacggagacgagtttgacctgctcgcctataccgatcccgagttagacacaggagacaaaaaggatatcttcaacgagcacctcagacttgtagaatctgccaacgagaaagcagagcgcgaggccctgctgagaggagtggaaccgggacccttggggcccgaagaacgacctcctcccgctgcagatgcttcagagcctaggctggcttctgtactccccgaagtgaaacctaaggttgaggagggcgggcgtcaccccagtccctgccagtttacaatcgccacacctaaagtggagccagctccagctgccaactcgctggggctgggtcttaaaccgggccagtcaatgatggggagtcgtgatacacgtatgggcactggtccattttcgtctagtgggcacacggccgaaaaggcctcatttggcgccacaggaggccctcccgctcacctacttaccccctcaccactatccgggcccgggggttcatcccttctcgagaagttcgaattagagtcaggggcccttacacttccgggcggcccagccgcttcaggcgacgaactcgacaagatggaaagttctctggtggcaagcgagctccctcttctcatcgaagacctactcgaacacgagaaaaaggagctgcaaaaaaaacagcagctgagtgcccagctacagcctgctcagcagcagcagcaacagcaacagcaacacagcctgctctccgccccaggacccgcgcaggccatgagcctcccccacgagggcagcagcccatctttagccggctctcaacagcagttgtccttgggcttggctggagccagacagcccggtctgccccaacccctgatgcctacacagcccccagcccatgcattgcaacagcggctggcacctagcatggccatggtttccaaccaggggcacatgctgagcggccaacacggcggacaggccggcctggtccctcagcagtcctctcaaccagtccttagccaaaaacccatggggactatgccaccaagcatgtgtatgaagccacagcaacttgcaatgcaacagcagctagccaatagcttttttccggacaccgatcttgacaaatttgcagccgaagacatcattgacccaattgctaaagccaagatggtggccctcaaggggatcaagaaggtgatggcacagggaagcattggcgtcgcacccggcatgaatagacaacaagtgtcattattggcacagaggctgagcggaggaccttcttcggaccttcagaatcacgttgcagccggcagtggtcaggaacgcagtgcgggcgaccccagccagcccaggcctaatccacctacattcgcccagggcgtcataaatgaagccgatcagagacagtatgaggagtggctgttccacacgcagcagttgctgcagatgcagctgaaggtcctggaggaacagatcggcgtccaccgaaagtcaagaaaagcactgtgcgctaagcagagaaccgcgaagaaagccggccgcgaattccccgaagccgatgccgagaaactgaagttagtgaccgagcagcaaagcaagatccaaaaacagcttgaccaagtccgcaaacaacaaaaggaacatacaaacttgatggccgagtatcggaataagcagcaacagcagcagcagcagcaacagcagcagcaacaacagcacagtgcggttctggcgctaagcccctcgcaatcaccacgtctgctgaccaaactaccagggcagctgctccccggtcacggcctgcaacccccccagggccctcccggaggtcaagcaggcggattgcgtcttacccctggagggatggcattgcctggccagcctggaggtccattcttgaacacagctctcgcccagcagcagcaacagcagcactcgggtggagccggcagtctggccggacctagtggcggcttctttcctggaaatttggccttgaggtcactgggaccagactcccgtttactccaagaacgtcagttgcagctccagcagcagaggatgcagcttgcgcagaagctccagcagcaacagcaacagcagcagcaacaacaacatctcctcggccaggtcgcaatccagcagcagcaacagcagggtcccggcgtgcagactaaccaagcgctgggcccgaagccacaagggttgatgcctccctccagccatcaaggactgctggttcagcagctttccccacaaccgccacagggaccgcaaggtatgctgggcccagcgcaggtagctgttctccagcagcagcaccctggcgccttggggccacaggggccgcataggcaagtgctcatgacccagagccgggtattgtcttcgcctcagcttgctcaacagggccagggcttgatgggtcaccgcctggttaccgcccaacagcagcaacagcagcagcagcatcagcaacagggaagcatggctggcttgtctcacctgcagcaaagtctgatgtcgcatagcggccaaccaaagctctccgcccagcctatggggtccttgcaacaattgcaacagcaacaacagcttcagcagcagcagcaactgcaacagcagcaacagcagcagttgcagcaacagcagcaattacagcagcagcagctccaacagcaacagcagcaacagcagcttcagcaacagcagcagcagcagcttcaacaacaacagcagcagctgcagcagcagcagcagcaacaacagcagcagtttcaacagcaacaacagcaacagcagatgggcctgttgaaccagtcccgcacgctcttgtccccacagcagcagcagcagcagcaagtggctctaggccccggcatgccagccaagccattacagcacttctccagccctggagcgctcggaccaactctgctcctgacgggcaaagagcaaaatactgtggacccagccgtgtctagcgaagcaaccgagggccctagcactcaccaggggggccctctggcaatagggaccacgcctgaatctatggcaacagagcctggcgaagttaagcctagcctctctggagactcccagctattacttgtgcagccccagccccagccccagccaagttcccttcagcttcaaccgcccctccgcctacccgggcaacagcaacagcaagtttccctgctgcacaccgccggtggggggtcacatgggcaactgggctcaggatcctcatcagaggcttcttccgtccctcacctgctggctcagccctctgtatccctgggggatcagccaggaagcatgacgcaaaatctgttagggccacagcaaccaatgctggagcgcccgatgcagaataatactggtccccagccccccaagccggggccggtcctgcagagcggtcaggggctacccggagtggggataatgcccactgtcggccaactgcgcgcccagctccagggcgtcctcgcaaaaaaccctcagctcaggcacttaagtccacaacagcagcagcaactccaagctttgttgatgcagcgccagctgcagcaatctcaggccgtgaggcagactcccccataccaggagcctggtacacagacgagcccgctgcaggggctgcttgggtgtcagcctcagctcggcggctttcccggtccacaaacaggcccacttcaggaattgggagccggcccacgcccacagggccccccaaggctccccgccccccctggggcactcagtaccggacccgtgctagggccagtccatcccacccctcctcccagcagccctcaagaacctaagcgtccctcccagctcccctcaccctcgagccagctgcctaccgaggcccagcttccacccacccatcccgggactcccaagccccaaggccctaccctggaacctccccccggtagagtcagcccagccgccgcacagctagcagacactctgttctccaaggggctgggtccgtgggaccctcccgacaacctggcggaaactcagaagcccgagcagtcttctctggtacccggtcacctggatcaggtgaatggtcaggttgtgccggaagcgtctcagttatctatcaagcaggaacctcgtgaggagccatgtgccctgggggcccagagtgttaagcgcgaagccaacggggagccaattggagcccccggcacttctaaccacctcctcctcgccggcccaagaagtgaggccggacatctgctcctacagaaactgctccgggccaagaacgtgcagctctctaccggacgcggatctgagggactgagggcggaaatcaacggccatattgattcgaaattggctggcctggaacaaaagctccagggtaccccatccaacaaagaagacgccgctgcccgcaaacccttgactcctaagcctaaaagggtacagaaagctagtgacagactggtaagctcacggaaaaagctcaggaaagaggacggagtacgggcatctgaagccctccttaagcaacttaaacaagaactctctttgctgcctctgactgaacctgccatcacagcaaatttcagcctcttcgccccttttggatcagggtgcccagtgaacggccagtcgcagctccgcggagcctttggatctggggccctccccactggccctgactactacagccagctcctgaccaagaataatctttcaaacccgccgactccaccaagttctctgccccctacccctccacccagcgtacagcagaagatggtcaatggggtgaccccctcagaggaactaggcgaacatccaaaagacgcagcaagtgcgagggactccgagagggccctgcgagatacctccgaggttaagagtttagacctgttagctgcactgccaactcccccacataaccaaacagaggatgtgagaatggaatctgacgaggactctgactcccctgattctatcgtaccagcaagcagtcctgagtctatccttggcgaagaggctcccagattccctcatctgggaagcggtaggtgggagcaagaggatcgcgcactgtcacccgtcattcctctcattccacgggcttcaataccggtgttccccgatactaaaccttacggcgctcttggactggaagtccctggtaaactccccgtgaccacatgggagaagggcaaggggtccgaagtctcagtgatgctgaccgtgagcgctgctgccgcaaagaacttaaacggagtcatggtggccgttgccgagctgttaagcatgaagatccccaatagttacgaggtgttgttcccggaatcccctgcgcgggcagggactgagcctaaaaagggagaggctgaagggccaggggggaaggagaagggacttgagggcaaaagccctgatacgggccccgattggctgaagcagtttgatgccgtcctacccggctatactctgaagtcccagttggacatcctatcgctcttgaagcaggagtctccagcacctgagcccccaacacagcatagctatacgtacaatgtgtctaacctggacgtgagacagctcagtgcccctccccctgaggagccctcccccccacccagcccacttgcaccctcccccgcctcacctcctaccgaacccctcgttgagctccctacagagccacttgccgagccccccgtcccttcacccctcccactcgcgagctcacccgaaagcgctagacctaaaccccgagcacggcctcccgaggagggcgaggacagtcgcccacctcggctcaaaaagtggaaaggtgtaagatggaagcggcttagattgctcttaacaatccagaaaggatcgggtcggcaggaagatgagcgggaggtcgctgaatttatggagcagctcggcaccgccctgcgacctgacaaggtcccaagagatatgaggagatgttgcttctgccatgaagaaggcgatggagcaacagatggtcctgcccgcttacttaaccttgatcttgacctatgggtgcaccttaactgtgctttatggtccaccgaggtctatgaaacgcaggggggggcactgatgaacgtggaagtagccctccacagggggttattaactaagtgctccctatgtcagagaaccggtgccacgagttcgtgtaatcgtatgcgctgtccaaacgtgtaccacttcgcctgcgctataagagctaaatgcatgttttttaaagataaaaccatgctctgccctatgcacaaaatcaagggaccatgtgaacaggaactaagcagttttgcggtgtttcgacgggtctatattgaacgcgatgaagtcaagcagatcgctagcataatccagcgcggggagcggctgcacatgtttcgggtgggtggactcgtttttcacgcgatcggtcagctcctgccccatcagatggcggatttccactcggccaccgccctgtaccctgtgggttacgaggcaacacgcatctattggtccttgagaactaacaatagaagatgctgttacagatgttcgatcggggaaaataacgggaggcccgagttcgtcatcaaagtgatcgagcagggactggaagatctcgtgttcactgacgcctcgcctcaggccgtatggaacagaattatcgaacctgtggccgccatgcggaaggaagccgatatgctgcgtttgtttcctgagtacctgaagggagaggagctcttcggtctgacggtgcacgccgttctgcggattgcagagagcctgccgggtgtagagagctgtcagaactacctgttccgttatgggcgccatccgttaatggaactgcctctgatgatcaatcctaccgggtgcgcacggagcgagcccaagatattgacccattacaaaagacctcacacgttgaactcaactagcatgtccaaagcttatcagtctacctttaccggagagaccaacacaccctactccaaacaatttgtccatagtaagagcagtcaatatcggagactgagaaccgaatggaagaacaacgtctacttagcacggagtcgcattcaaggcctgggcttgtacgcagccaaagacctggagaagcacactatggtgatcgaatatatcggtactattattcgcaacgaggtagctaaccgacgcgagaaaatctatgaggaacaaaaccgggggatctacatgtttcggataaataatgagcacgtgatcgacgcaaccttgacaggtggaccagcaagatatatcaaccactcttgcgccccaaattgcgtagctgaagttgtaacgttcgataaggaagataagatcatcattatctccagtaggcgcattcctaaaggagaagagctcacatatgactaccaatttgactttgaggacgatcagcataagatcccctgccattgtggcgcctggaactgccggaagtggatgaactag

SEQ ID NO: 196050 - DNA, 441 bp, synthetic construct
  misc_feature 1..441: note = Description of Artificial Sequence: Synthetic coding sequence
  source 1..441: mol_type = other DNA
atggacagccagaagctggccggcgaggacaaggacagcgagcccgctgcagatgggccagcggccagcgaggatccatcggccacagaatcggacctccctaacccacatgtcggggaggtttccgtccttagcagcggcagccctaggctgcaagaaacaccacaggactgttcgggcgggcccgtgagaagatgtgctttatgcaactgtggcgagccaagccttcatggccagagagaactgcggcgctttgagttgcctttcgactggccacgctgtccagttgtctcacctggcgggtctcctggaccaaatgaagctgtgctgccctccgaagatctctcccagatcgggttcccagaggggctgactccggcccatctaggcgaaccagggggatcttgctgggcccaccactggtgcgcagcctggagctag

SEQ ID NO: 196051 - DNA, 14736 bp, synthetic construct
  misc_feature 1..14736: note = Description of Artificial Sequence: Synthetic coding sequence
  source 1..14736: mol_type = other DNA
atgagcagcgaggaggacaagagcgtggagcagccccagcccccccctccacccccagaagagcctggggctccagcgccatcacctgctgccgcggacaaaagaccacggggcagaccacggaaggacggagcatctccgtttcagcgcgcccgtaaaaagcctcgcagccgaggcaagaccgccgtggaagatgaagacagcatggacggtctagaaaccaccgagacagagactattgtggagacagagattaaagaacagtcagccgaggaggacgccgaggctgaagttgataattccaaacagctcattcccaccctccaacgttctgtgtctgaggagagtgccaactctctcgtgagcgtgggcgtggaagcaaagattagtgagcagctatgtgctttttgttactgtggggagaaatcttccctcggccagggagacctcaaacagttcagaatcactccaggcttcattctgccttggaggaaccagccatcgaacaaaaaagacatagatgacaactcaaatgggacctacgaaaaaatgcaaaacagtgccccacggaagcaaagaggccagaggaaggaacgaagtccccagcagaacatcgtctcctgtgtatcagtttctacacagaccgcctcggatgaccaggcaggcaaactctgggatgagctctctctcgtgggactcccagatgccatcgatatacaggccttatttgattcaaccggcacatgctgggcccaccatcggtgcgtggagtggtctctgggagtttgccaaatggaggaacctctcctcgtgaatgtggacaaggctgttgtgagcggtagtacagaacgctgcgccttctgcaagcacctgggagcaaccatcaagtgttgtgaggaaaaatgcactcagatgtaccactacccatgtgcagccggtgctggtaccttccaggacttcagtcacatcttccttctatgccctgagcacatcgaccaggcaccagaaaggtcgaaagaagacgcaaattgcgctgtgtgtgattctcccggtgatctgctagaccaattcttttgcaccacctgcggacagcattaccatggtatgtgcttggacattgcagtgacgccactgaaaagggcgggatggcaatgcccggagtgtaaggtgtgtcaaaattgtaagcagagcggtgaggattccaagatgttggtctgtgacacttgtgataaaggctatcacacattttgtctccaaccagtgatgaagtcggtcccaaccaatggttggaaatgcaaaaactgcagaatctgcattgagtgtgggacgagatcctccagccagtggcatcacaactgcctgatctgcgacaactgctaccagcagcaagacaatctgtgcccattctgtgggaagtgctaccacccagagctgcaaaaagatatgctgcactgcaacatgtgcaagcgttgggtgcacctagaatgcgacaagcctacggatcacgaattggacactcagttgaaggaagagtatatttgtatgtattgtaaacatcttggtgccgaaatggaccggctccagccgggtgaagaagtagaaatcgccgagctgacgacagattataataatgagatggaggtcgagggccccgaagatcagatggtgttctcggagcaggccgccaacaaagatgtaaatggacaagagtccactcctgggattgtccccgatgccgtgcaggtgcacaccgaagagcagcagaagagtcatccaagcgagtccttggacacagactctctgcttatagctgtgagtagtcagcataccgtcaataccgaattagagaagcagatttctaacgaggtcgatagcgaagacttgaagatgagtagcgaggtgaaacatatttgcggagaggatcagattgaagacaagatggaagttacagagaacattgaagttgtgactcatcagatcacagtgcaacaagagcagctgcagctactggaggaacctgagacagtagtgagcagggaggaatctagacccccaaagctggtcatggagagtgtgactctgcccctggaaaccctcgtgtctccccacgaagagtctatcagtctctgtcccgaagagcagctcgttatcgagcgattgcagggcgagaaggaacagaaagagaatagcgagctcagcacggggctgatggactctgagatgactcccaccattgaggggtgcgtgaaggacgtgagctaccaaggaggaaagtccattaaactttcatctgagaccgagagcagcttctcatccagtgccgatattagtaaggcggatgtgtccagctctcccacaccttcttccgacttaccaagccacgacatgctgcacaattacccttccgccttgtcatcttctgctgggaatattatgccaacaacctatatatctgtcactccgaaaataggcatgggcaaacccgccatcaccaaaagaaaattttccccagggagacctcgaagtaagcagggggcctggtccacccacaacaccgtctcaccgccctcctggtcaccagacatatcagaaggtcgcgaaatcttcaagcccaggcaactccccggcagtgctatttggtcaatcaaagtgggacgcggcagtggatttcccggtaaaaggaggcccagaggcgcagggctgagtggaagaggaggtagggggaggtccaaactgaagagcggaatcggcgcagtggtcttgcccggcgtgtccactgcggacatttcgagcaacaaggatgacgaagagaactccatgcataacaccgtggtgttattttccagttcagacaaattcaccctgaaccaagacatgtgtgtggtttgcggatctttcggccagggagctgaagggcgcctactggcctgcagccagtgtggacagtgttatcatccatattgcgtgagcatcaaaattaccaaggtggttttaagcaaagggtggaggtgcctggagtgcacggtgtgcgaggcctgcggtaaagcaacagatcccggtcgtctgctcctctgtgacgattgcgacatcagctatcacacctactgccttgaccctcctttgcagacagttcccaagggaggctggaaatgcaagtggtgcgtttggtgcaggcattgtggtgccaccagtgctggccttaggtgcgagtggcagaacaactatacacaatgcgctccttgtgcatctctcagtagttgtccagtgtgctatcgaaactacagagaagaggaccttatcctgcaatgccgacagtgcgatagatggatgcacgctgtgtgccagaacctgaatactgaagaagaggtagagaatgtagctgacatcggattcgattgctccatgtgtcgcccatatatgcccgcatccaacgtgccgtcctccgattgttgtgagagcagtctggtggcacagatcgtgaccaaagttaaggagcttgatcctccaaaaacatacacacaggacggggtgtgtcttactgagagcggaatgactcagctgcaatcgctcacggtaactgtaccaagaaggaagcgcagtaaacctaagctgaagctcaaaattatcaaccaaaatagtgtagcagtgttgcagacgccccctgacatccagagcgaacacagtagggatggggaaatggatgatagcagggagggagaactgatggactgcgatggtaagtcagaatcctctcccgagcgcgaagctgtcgacgatgaaaccaagggagtggagggcactgatggagtaaaaaaacgaaaacgcaagccctacagacccgggattggaggctttatggtgcgccagaggagcaggacaggccagggaaaaactaaaaggtccgtcattcgcaaggatagctccggtagtattagcgaacaactgccgtgtagagatgatggctggtctgagcagctccctgacactttggtggatgagagcgtttccgtgactgagagtactgagaagattaaaaagcgttatcggaagcgaaagaacaagctcgaagaaactttccctgcctaccttcaggaagcctttttcggaaaggaccttctggacactagccgacagtccaagattagccttgataatctcagcgaagacggagcccagctgctctataagactaacatgaataccgggttccttgacccatccctcgaccccctgctgtcaagctctagcgcccctacaaaatctggaacacatgggccggctgacgaccccttggctgatatttcagaggtgttaaataccgatgatgacatcctggggatcattagtgacgatctggccaaaagtgtggaccacagtgatatcgggcccgtgactgatgacccaagctctctgccccaaccaaacgttaatcagagttcccgcccgctctctgaagagcaactggacggcatcctgtctcctgaactcgacaaaatggtgactgacggtgcaattttgggaaaactatacaagatccctgaactcggaggaaaggacgttgaggaccttttcaccgctgttctatctcccgccaacacacagccgactcccctgcctcagccccctccccccacacagctgctcccaatccacaaccaggacgcattctcccgcatgcctttgatgaacgggctgatcggcagttctccacacctaccccataattctctgccgccagggtcgggacttggcaccttctcagctattgcccagtctagctatccggacgcccgggataagaatagtgccttcaacccaatggcaagcgatccaaataactcttggacaagttcagcccccacagtggagggcgagaatgatacaatgtctaatgcccagcgctcaactttaaaatgggaaaaagaagaggccctaggtgagatggctaccgtggcaccagtcctttatacaaacatcaacttcccaaatttaaaggaagagtttcccgactggacaactcgggtgaaacagatagcaaagttgtggcggaaggcgtcatcccaggaacgggccccatacgtccaaaaagccagagacaacagagccgccctgcgtatcaacaaggttcagatgagcaatgacagcatgaagcgtcagcaacaacaggactccatagatccatctagtagaatcgacagtgagttgtttaaggatccactgaaacagcgcgaatctgaacacgaacaggagtggaaattccgccagcaaatgcgacagaaatccaagcaacaggctaagatcgaggcgactcagaaactcgagcaggtcaaaaatgagcaacaacaacaacaacagcagcagttcggtagccagcatctgctggttcaatctggctctgatacaccttctagcggcatccagtcccctcttaccccccagcctggtaatggaaatatgtcaccggcccaaagttttcacaaagagttattcacgaaacaacccccatccactcccacaagtactagcagcgacgacgtctttgtgaagccacaggcaccccccccaccgccagcccctagtaggattccaatccaggacagtttaagccaggcacagacgtcccagccacccagcccccaggttttctcaccaggctcatccaactcccgccccccaagcccgatggacccttatgccaaaatggtaggcactccaaggcccccacccgtgggccacagtttttcaaggcgaaattcggctgctcctgtggagaattgcacccctctttccagcgtcagccgacccctgcagatgaatgaaactactgcaaatcggccaagtcccgtccgggacctatgctcctcctcaacgaccaacaacgacccctatgccaaaccacctgatactcctaggcccgtgatgactgaccagttcccaaagtccctcggactctcccggtcccccgttgtgtcagagcaaacagctaagggtcctatcgcagcaggaacatcagaccacttcacgaaaccttctcctcgcgctgacgtcttccagcggcagagaattcccgattcttacgcgagacctctgctgaccccggcaccattggacagcggcccgggcccctttaagactcccatgcagccccccccatcctcgcaggacccctatggctcagtatcacaggcaagtcgtagactttccgtggacccatacgaaagacccgcgctgactccaagacctattgataacttttctcacaatcagagcaatgacccttacagtcaaccaccactgaccccacacccagccgttaacgaatcttttgcccaccctagtcgggccttctcgcagccaggaaccatctcacggcctacttctcaagatccatacagtcagccgccgggaacccctaggcctgttgttgacagctatagccagtcttctggtacagcgcgatctaacaccgatccgtacagtcagcctccaggcaccccacggcccacaacggtcgacccttactcccagcagccgcagaccccgcggcccagtacccagaccgatctgtttgtgactccggttacgaaccagagacattccgacccttacgcccacccacccgggactccacggcccgggattagtgtgccttactcacagcctcctgccacacccagaccgcggataagcgaagggttcacaaggtcctctatgacccgaccagtcctgatgcctaaccaggacccattcttgcaagcagcgcagaatcgcgggcccgccttaccagggcctctggtccgcccccccgacacttgctctcagactccgaggccacccggccctggcctgtccgataccttctcacgtgtgagcccctcagcagccagagacccctacgatcaatctccgatgaccccgaggtctcagagcgactctttcggaaccagtcagacagcccatgacgtggcagaccagccccggcctggaagtgagggctccttctgtgccagttctaacagccccatgcattctcaggggcaacagttcagcggcgtgtcccagctcccagggccagtacctacctcaggggtgaccgacactcaaaacacggtgaacatggctcaggcagacacggagaagctcaggcagcgccaaaagttgcgtgagatcatcctgcagcaacagcagcaaaagaagatcgcaggacgtcaggagaagggcagtcaggattctccagccgtgccccacccggggccactccagcattggcaacccgaaaatgtcaaccaggctttcactcgaccacctcctccatacccaggaaatatccgcagcccagtcgccccacctctgggcccacggtacgcagtgtttccaaaggatcagaggggtccctaccccccagacgtggcctctatgggcatgaggccacatgggtttcgctttgggtttcccgggggatcacacgggactatgccatctcaggaacgctttctggtgcctccccaacagatccaggggtccggtgtttcgccgcagctccggcgttccgtctccgtggacatgcctcgaccactcaataactcccagatgaacaatcctgtaggactccctcagcactttagcccgcagtcgctcccagtgcagcagcacaacattttagggcaggcttacatagagctgaggcatcgagctcctgacggaaggcagagattgccgttcagcgcaccgccgggctctgtcgtggaggccagctcaaatctacgccacggcaatttcataccgagacctgactttccaggccctcgtcataccgaccctatgagacgaccacctcaagggctgcctaatcagctgccggtgcaccctgatctcgagcaggtacccccaagccagcaagagcaaggacattctgtgcattcctcttctatggtgatgagaacactgaatcatcctcttgggggtgaattcagcgaggccccattaagcacatcagtcccctctgagaccacgtcagataacttgcagattaccactcaaccatctgacggtctggaagagaagctggactccgatgatccttcggtaaaggagctggatgtgaaggatctggagggggttgaagtgaaagacctggatgatgaggacttggaaaacctcaacctggatacggaggatggtaaagtggtggaattggacacactggataacctggaaacaaatgacccaaatctagacgacctcttgagaagcggtgaattcgatatcattgcttacacggaccctgagctggatatgggcgataagaaaagcatgtttaatgaggagttggacctgcctatcgatgacaagttagacaatcagtgtgtgtccgtggagcccaaaaaaaaagagcaggaaaataagacactggtgcttagcgataaacacagcccccagaaaaaaagtacggtgaccaatgaagtgaaaactgaagtcttgagtcccaattcaaaggtggagagtaagtgcgagacagagaagaacgacgaaaacaaagataacgttgacaccccctgctcccaagctagcgcacatagcgatctaaacgacggagaaaaaactagtctgcacccgtgtgaccccgatcttttcgaaaaaagaacaaatagagaaacggctggcccctcggcaaacgtgattcaggcttcgacacagctaccagcacaggacgtcatcaattcttgtggcataacgggaagcaccccggttctctccagcctgctggcgaatgagaaaagtgataattctgatatccgaccttccgggtctcctccaccgccaacgctgcctgccagcccctcgaatcacgtaagctcactgcctcctttcatcgcacccccaggccgggttctcgacaatgccatgaattctaatgtgaccgtggttagtagggtcaatcatgtcttcagccaaggagtacaggtaaaccccggtctcatcccagggcaatcaacagtaaaccactctctcggaactggaaagccagccactcagacaggaccccagacaagtcagagcggtacttcctccatgtccgggccacagcagctcatgatcccccagactttggctcagcagaatagggaacgccctctgcttttagaggaacagccactgttgctccaggacctgctggaccaggagcgacaggagcagcagcagcagcgtcagatgcaggcaatgattcggcaacggagcgagccatttttcccaaatatcgattttgatgctatcaccgatcctattatgaaggccaaaatggtggctctaaagggaataaacaaggtgatggcgcagaacaaccttggcatgcccccaatggtgatgtctcggttcccttttatgggtcaggtggtgactggaacgcagaactcggagggacaaaaccttgggcctcaagccattcctcaggatgggtcaatcactcaccaaatatctcgccctaatccccccaacttcggccctggattcgtgaacgactcacagaggaagcagtatgaggaatggctgcaagagacccagcagctgttgcaaatgcaacaaaaataccttgaggagcagataggcgcccaccgaaaaagcaagaaagcactgtcagccaagcagaggaccgcaaagaaggcaggccgggaatttcccgaagaagatgccgagcagctgaagcacgtgactgagcagcagagtatggttcagaaacagctggagcagattcgaaagcagcagaaggagcacgccgagctgatagaggactatagaatcaagcagcagcaacagtgtgctatggctccccctacaatgatgccctccgtacagccacagccacccttgataccgggagccactccacccactatgtcacagccaacctttcctatggtgcctcagcagttgcagcatcaacagcacacgactgtaatctccggacatacctcacccgtgcgcatgcctagcctgcccgggtggcaacctaactcagctccggcacacctgccactaaacccacctaggatacagcccccgattgcccagctgccaattaaaacctgtacaccagcacccgggacggtgagtaacgctaaccctcagtccgggccacctccccgggtggaatttgacgacaataaccccttttcagagtccttccaagagcgcgagaggaaggagaggctccgtgagcaacaagagcgccagcggattcaactcatgcaagaagtggaccggcagagagccctgcaacagcgaatggagatggaacagcacggcatggtaggatcagaaatctctagctcaagaaccagcgtgagccagatccccttttattcgtccgacctgccttgtgatttcatgcaacccctcgggcccctccagcaaagcccacaacaccaacaacagatgggccaggtgttgcagcaacagaacatacagcagggttccatcaattccccaagcacacagaccttcatgcagaccaatgagaggagacaggtggggccgcctagctttgttcctgactccccttcaatccccgttggctcacccaatttttcgagtgtaaagcaggggcatggcaacctgtccggaaccagttttcagcagtcccccgtacgaccttcgtttactcccgctctgcccgcagcaccacctgttgccaattcttctctcccctgcggccaggacagcacaataactcacgggcactcttatcctgggagtacccagtccctaatccagctctatagcgatataattccggaagagaaaggaaaaaagaagagaaccaggaagaaaaagagagacgatgacgcagagtctaccaaggcccccagcacaccacattccgatatcaccgctccccccacgcccggtatttcagagacaacctccactcctgcagtaagcactcctagcgaactgccgcagcaagccgaccaggaaagtgtggagccggtcggaccgtccacccccaatatggccgcaggccagctgtgcactgagctggagaacaaacttccaaactctgactttagccaggccactccaaatcagcagacctacgctaattccgaagtggataaacttagtatggaaacacccgctaagacagaggaaattaaactggagaaggccgagaccgagtcttgtcctggacaagaagagcccaaactggaggaacagaatgggagtaaagtcgaagggaatgcagtcgcttgcccggtgagttcggctcagtctcccccacactcagccggagctcccgctgctaagggcgattccgggaatgagcttctcaaacacttattaaagaacaagaagtctagctctctcctgaaccaaaaacctgaaggatccatatgttcagaagatgattgcacaaaagacaacaaactcgtggagaaacagaatcctgctgaagggttacaaaccttaggagcacagatgcagggaggcttcggatgcggtaaccagctcccaaaaaccgatggcgggagcgaaactaaaaagcaacgttctaagcggacacagaggactggcgagaaggcagcgccaagaagtaagaaacggaagaaagacgaagaagagaaacaggcaatgtactcttccaccgatacatttacacaccttaaacagcagaataacctgtcgaatcctcccacccctcctgccagccttccccctacgccccccccaatggcctgccaaaaaatggccaacggtttcgctaccaccgaggaactcgccggaaaggcaggcgtcttggtgtcccacgaggtgaccaaaaccctggggcccaagccattccagttaccttttaggccccaggatgatttgctcgctcgtgcgctggcacaaggacccaaaactgtggatgtccccgccagcctgcctacccccccacacaataatcaggaggagctccgcattcaagaccactgcggcgatagggatacgcctgactcttttgtccctagctcgagccctgagtccgtcgtgggagttgaggtgagcaggtatccagacctgagcctggtaaaggaagaaccgcctgagcccgtcccctcccccattatccccattctgcccagcaccgccggaaagagtagtgaatcgcgtaggaacgatatcaaaacagagcctggtacgttatactttgcaagccctttcggccctagcccgaatgggcccagaagtgggctaatcagtgtggcaattaccttgcatccgaccgccgccgagaatataagctccgtggtggcagccttctccgatctgttgcatgtccggatcccaaattcttatgaggtatcttccgctcccgatgtgccatccatggggcttgttagcagtcataggatcaaccccggcctggagtaccggcagcacctgttactgagaggaccgccaccagggtccgcaaatccgcctagactcgtgagctcctaccgcttgaagcagcccaacgtgccgtttccccctaccagtaacggactcagcggatataaggactccagccatggcatagccgaaagcgcagctttgcgcccacagtggtgctgccactgcaaggtagtcatcttaggatcaggagtgcgcaagtcatttaaggacttaactctgttgaacaaggactcacgggagtccactaaacgggtcgaaaaggacatcgtgttctgctctaataattgcttcatactgtacagctctaccgcccaagccaaaaacagcgaaaacaaagaatccataccctcactcccccagtcccctatgagagaaacaccctcaaaagccttccatcagtattctaacaacatttcgacgctcgatgttcactgtctgccacagctgccagaaaaggcttctcctccagcaagtccgccaatcgcatttcctcctgctttcgaggctgctcaggttgaggctaagcctgatgagttgaaggtaaccgtgaaattgaagcctaggctgcgagccgtgcatgggggattcgaggattgtaggccattaaataagaagtggcggggcatgaagtggaagaaatggtccatccatatcgtcatcccaaaggggacttttaaacccccttgtgaagacgaaatcgacgagttcttaaaaaagttggggaccagcttaaagcctgacccagtccccaaagattaccgaaaatgctgcttttgccacgaagagggcgacgggcttacagacggaccggctcgtctgctcaatctggatttggatttatgggtgcatctgaactgtgctctgtggagtacagaggtgtatgagacacaggccggcgctctcatcaacgtagagctggctctcagacgcggcctccagatgaaatgcgtgttctgtcacaagaccggcgctacctccggctgccacagatttaggtgtactaacatctaccacttcacctgtgcaatcaaagcacagtgcatgttctttaaggataaaactatgctctgtcctatgcataagcctaaagggattcatgagcaggagctgagttatttcgccgtcttcagacgcgtgtatgtacagagggacgaagtgaggcaaatcgcttcaatcgtccagaggggagaacgcgatcacacgtttcgggtgggctctctcattttccacacgatcgggcagctgctgccccagcaaatgcaagcgtttcacagcccaaaggctctcttccccgtcggctatgaagcttcccgcctctactggagcacacgctacgccaaccgtagatgtaggtatttatgctctatcgaagagaaggacggtcgtccggtgtttgtcatcagaatcgtggagcagggacacgaagacctcgtgctctcggatatttctcccaagggtgtgtgggataaaatcttggagcccgttgcgtgtgtgcgcaagaagtccgagatgttgcagctttttcctgcctacctgaaaggtgaagatctatttgggttgacagtctccgcagtagcccgaatcgcagagagtctgcccggcgttgaggcctgcgagaactacacgttccggtacggaaggaaccctctgatggaattgcccttggcggtcaaccctaccggctgcgctagatccgagcctaagatgagcgcacatgttaagcgctttgtcctaagacctcacactttgaacagcactagcacctctaagtcatttcagtctactgtcactggtgaactgaatgccccctactctaaacagtttgtgcactctaaaagctcccagtatcgaaagatgaagacagagtggaagagcaacgtgtacctggcgcgtagtcggattcaaggcttgggactgtacgccgccagggacattgaaaaacatactatggtgattgagtatatcgggaccatcatcaggaacgaggtggctaaccgtaaagaaaaattgtatgagtctcaaaatcgtggcgtttatatgttcaggatggataacgatcacgtaatcgatgccacgttaactggcggccccgcacgatatattaaccacagctgcgcccccaactgcgtggctgaagtggtgacctttgagagggggcacaagattatcatttcctcgtctaggaggatacagaaaggtgaagaactttgctacgattataaattcgactttgaagacgaccagcataaaatcccttgccattgcggggcagtgaattgcagaaagtggatgaactag

SEQ ID NO: 196052 - DNA, 14907 bp, synthetic construct
  misc_feature 1..14907: note = Description of Artificial Sequence: Synthetic coding sequence
  source 1..14907: mol_type = other DNA
atgagcagcgaggaggacaagagcgtggagcagccccagccccccccccccccacctgaagagcctggcgcccccgcacctagcccagccgcagcagacaagcgccctcgtggcagaccaaggaaagatggagcgtccccgtttcagagggcccgcaaaaagcctcgatccagaggaaagaccgccgtagaggacgaggactccatggatgggctcgaaaccacggaaacggagaccattgttgagacggagataaaggagcagagcgctgaggaggatgccgaggccgaagttgataactctaaacagctgatcccaacactgcagcgctccgtttctgaggagagtgctaattccctcgtttccgtgggtgtggaagctaagattagcgagcagttgtgcgccttttgttattgtggcgaaaagagcagcctaggccaaggggatttaaagcagtttcggattacaccggggttcattctgccttggaggaaccagcccagtaataagaaggacattgatgacaatagcaacggcacctacgaaaagatgcagaacagcgcacctcgcaagcaaagggggcagcgcaaggaaaggagcccacagcagaatatcgtgtcttgtgtcagtgtttctacccagacggcttctgatgaccaggctggcaagctgtgggatgagctgagtcttgtaggactgcccgacgctatagacattcaggccctgtttgacagtaccggcacctgctgggcgcatcacaggtgcgtggaatggtcccttggagtatgccaaatggaggaacctttactggtgaacgtagacaaagcagttgtctctggatcaacagaacgatgcgccttttgtaagcacctcggagctaccatcaagtgttgcgaagagaagtgcacacagatgtatcattacccctgtgcggcaggcgccggcaccttccaggacttcagccatatttttttattatgccctgagcacatagaccaagcccctgagagaagcaaggaagacgcgaattgcgcagtctgtgacagtcccggtgatttgttggaccaattcttctgcactacttgtggccaacattatcacggaatgtgtctggatattgcagtgacccccctgaagagagccggatggcagtgtccagagtgtaaagtttgccaaaactgtaagcagagcggggaagactcgaaaatgttggtgtgtgacacctgcgataaaggctatcacacattctgcctgcagcctgtgatgaagtcagtcccaactaatgggtggaagtgcaagaattgccgcatctgtatcgagtgtggcacccggagttctagtcagtggcaccacaattgcctcatatgtgataattgttaccagcagcaagacaatttgtgccccttttgcggcaagtgttaccaccccgagctgcagaaagatatgcttcattgcaacatgtgtaaaagatgggtccaccttgagtgtgataagccaacagatcatgagctcgacacccagctcaaagaggaatatatctgcatgtattgtaaacatctgggcgccgaaatggatcgcctgcagccaggagaagaagtggagatcgcagagctcactaccgactataataatgagatggaagtggagggacctgaggatcagatggtgttctctgagcaagccgcaaacaaggatgtcaacggacaggagagcacccccgggatcgttcccgatgccgtgcaggttcacaccgaggaacagcagaagtctcatccaagtgagagcttagataccgacagcttactgatcgcagtgagttcacagcataccgttaacactgaactggagaagcaaatctctaacgaggtggacagtgaagatctaaagatgtcttcggaagtgaaacacatctgtggcgaggatcagatcgaggacaagatggaagtgaccgagaatattgaggtagtgacccatcagataacagtccagcaggaacaactgcaactgttggaggaacctgagacggtagtgagtcgtgaagagagccggcctcctaagctggtaatggagagtgttacactccctctggaaacactggtgtcgccgcatgaggagtcaatctcgctgtgccctgaggagcagctagtaatcgaacggctgcagggagagaaggagcagaaggagaatagcgagctgtctaccggcctgatggatagcgaaatgacaccaactatcgaaggatgcgttaaggatgtatcgtaccaggggggcaaaagcataaagttatcaagtgagaccgagtcctccttctcatcctctgcagatatatcaaaggcagacgtaagctcaagcccaacgccaagttccgatcttcctagtcacgacatgctgcacaactatccctccgctctgtcctcatcggccggaaacattatgcccaccacttatatttccgtgacacccaaaatcggcatggggaaaccagctatcacaaagcggaagttcagtcctggtaggccgagatctaaacagggtgcatggtctacacacaatacggtgtcacctccatcatggagcccagatatctccgaggggcgggaaatctttaaaccacgacagctgcccggctcagccatctggagcattaaagtcggacgtggaagcggatttcctggcaagaggcgaccaaggggtgctggattgtccggccgtggggggagaggaaggtccaagctcaaatcaggaatcggagctgtagttctacccggcgtcagcaccgcagacattagcagcaataaagacgatgaagaaaattccatgcataacacagtagtcctgttctcctcctctgacaagtttacccttaaccaagatatgtgcgtggtgtgtggatctttcggtcagggagctgaaggcagactgctggcttgttcgcagtgtggtcagtgctatcacccatactgtgttagcattaagatcacaaaggttgtgctctcaaaaggctggcgttgtctggaatgtaccgtgtgcgaagcctgtggcaaggcaacagatccaggtaggcttctgctctgcgatgattgtgatattagttaccatacctattgcctggacccaccacttcaaaccgtccccaaaggaggttggaagtgcaaatggtgcgtgtggtgtcgccattgcggtgccacaagtgctggcttaaggtgtgaatggcagaataactatacccagtgcgccccatgtgcaagtctttcctcttgccccgtgtgttatcggaactacagagaagaggacctgatcctccagtgcagacagtgcgatcgctggatgcatgccgtttgtcaaaatctaaacacagaggaggaggtggaaaatgtcgccgatattggcttcgactgctccatgtgtcggccgtatatgcccgccagcaacgtccctagctccgactgttgcgaaagttccctagtcgctcagatcgtaactaaggtcaaggaactcgaccctcccaagacctacacacaggatggggtgtgcttaacagaatcagggatgacacagctccaatcactgactgtgactgtcccccggcgaaaacgcagcaagccgaagctgaaactaaagatcataaaccaaaactccgtagcagttctccagaccccacctgacatccagtcagaacactcacgcgatggtgagatggatgactcaagggagggcgagctgatggactgtgatgggaagtcggagtcctcccccgagagggaagccgtcgatgatgaaaccaagggcgtcgaaggaactgacggcgtgaagaaaaggaaaagaaaaccatatagaccaggtattggaggatttatggttagacaaaggagtagaactggccagggcaaaaccaaacgttccgtcattcggaaggatagtagcgggtcgatatccgagcagctgccttgtcgtgacgacgggtggagcgaacagctccccgacaccctcgtcgatgagtctgtctctgtcacggaatcgaccgagaagataaagaagcggtaccggaagagaaagaacaagctcgaggagactttccctgcatacctgcaagaggcctttttcggtaaagacctgcttgataccagcagacaatctaagatctctctagataatctctccgaggatggcgcacaactcttatacaagactaacatgaacaccggtttcctcgatccatcattagaccctctcctgtcctcaagctctgctccgaccaaatctggcacacatggcccggctgacgacccgttagcagatatttccgaggtgctgaataccgatgatgatattctggggatcatcagtgacgatctggctaagtccgtggaccattcggatattggccctgtaacagacgatccgtcttccctgccgcaacccaacgtgaatcagtctagcagaccactttccgaggaacagttggatggcatactctcgcccgagctggacaagatggtaacagacggcgcaatcctcggaaagctgtacaagatccccgagctgggaggcaaagacgtggaagatctgttcacagcggtgttgtcccctgcaaacacccagcccacaccactgccccagccgcctcccccgacgcaattattaccaatccataaccaagacgcctttagtcgcatgcctctcatgaatggactcatcggctcctctcctcacttacctcataacagtttgcctccaggcagtggactcggcacctttagtgctatagcgcaaagttcataccccgacgcacgagataagaacagcgcgtttaatcccatggcctcagacccaaataacagctggaccagtagcgcccctacggttgaaggcgagaatgacaccatgtccaatgctcagcggtcaacgcttaagtgggaaaaggaggaagcccttggtgagatggcaaccgttgctcctgtgctctacactaacatcaatttccccaatctgaaggaagaatttcctgactggacaacccgcgttaagcaaatcgctaagctgtggcgaaaagcctctagtcaggaacgagccccatacgttcaaaaggccagggacaatagagctgcgctgaggataaataaagtgcaaatgagtaatgacagtatgaagcggcagcagcagcaggacagtatagacccctcttcccgcattgacagtgagttgttcaaggaccctctgaaacagagggagagtgagcacgagcaggagtggaagtttaggcagcagatgcgtcagaagtcgaagcagcaggcgaaaattgaggccacacaaaaacttgaacaagtgaaaaatgaacagcaacagcagcaacaacagcagttcgggtcccagcatctgctggtgcagtctggctccgatactccatcttcaggtatccagagcccgcttacacctcagcctggtaatggtaatatgtccccagcccagtcttttcacaaagaactatttacgaagcagccacctagcacgccaacatcgactagtagtgatgatgtgttcgttaagcctcaggctccccctccaccaccagcccccagtagaatccccatacaggatagtctctctcaagcccaaacctctcaacctccctcccctcaggtgttctctcctggatcctctaacagccggccaccttcgccgatggacccatacgcgaaaatggtgggaaccccccgaccccctccggtgggccacagtttctcccgcaggaactctgccgcccccgtggagaactgtacccctctctcaagtgtaagtcgcccattgcagatgaacgagacaacagccaacaggcccagtcctgtaagagatctatgcagctcaagcaccactaataatgatccctacgccaagcctccagacactcctcgccctgtcatgacagaccagtttcctaagagtctgggcctgtcccggtcccccgtcgtgtccgagcagaccgcaaagggaccaatagccgcgggaactagcgatcacttcacgaagccaagcccacgggctgacgtgttccagcggcagcgcatcccggactcttatgccaggccactccttactccagcaccgttggactcaggacccgggccattcaagacacccatgcagccaccaccctcttctcaggacccttacggttctgtgtcccaggcttcacgacggctgtcagtggatccctatgagcggccagccctgaccccacgacccatcgacaatttctctcacaatcagtctaatgatccatatagtcagcccccgttgacccctcatcctgccgtcaatgaatcatttgcccaccccagtagggcgtttagtcagccgggtacaatctcgcgcccaacctctcaggacccctacagtcagccccccggcacaccccgccccgtggtggattcctattcccagagttccggcacagcccgatcaaacaccgatccctacagccagcccccgggcacgcctcgcccgaccaccgtggatccatacagccagcagcctcagaccccgagaccctctacccagactgatttgttcgtgacaccagtgacaaaccaaagacatagcgacccctatgcccaccctcctggaactcctaggcccggaatttctgtcccttattctcagcccccagctactccgcgccctaggatatctgagggatttacacgaagcagtatgacaaggccagttctcatgccaaatcaggatccttttctgcaggccgcgcagaaccgtggcccagccttaccggggccacttgtccggcctccagacacctgtagccagacacctcgacctcctgggcctgggttatcagacaccttcagcagggtgtccccatctgctgctcgcgatccttatgatcagtccccaatgacccctcgaagccagtcagacagctttggcacttcgcagacggctcatgacgtggcagatcagcccaggcccggttccgagggttctttttgtgcctcctctaatagcccaatgcatagtcagggccagcagttttcaggggtgtctcagttgcctggacctgtacctacatccggcgttaccgatacacagaacaccgtgaatatggcacaggctgacacagagaagttgcggcagcgccagaaactgcgcgaaattatattgcagcagcagcaacagaagaagattgctggtcggcaagaaaaaggcagtcaggactcccctgctgtgccccaccctggaccgttacagcattggcaacccgaaaacgtgaaccaagccttcacacggccaccacctccataccctggcaacatacggagccccgtggcccctccgctcggacctaggtacgccgtgttccctaaagaccagcgggggccatatcctcccgacgttgcctccatgggcatgagacctcacggctttcgctttggttttcccggtgggagtcatggcacaatgccttctcaggagcggtttctagttccaccccaacaaattcagggatctggtgtgtctccccagctccgtcgatctgtgtccgtcgacatgccccgaccacttaataattcacagatgaacaacccagtgggacttcctcagcacttctcccctcagagcctccctgtgcagcagcataacattctgggacaggcctacatcgaactgcgccatcgcgcccccgatgggcgacagcgactacctttctcggccccgccaggttctgtcgtggaggcatcatccaacctgcggcacgggaactttatccccagacctgattttcccggccctagacataccgatcctatgcgccggcctccacaggggttaccaaaccagctgccggtgcatcccgatctggagcaagtgcccccctcccagcaggaacagggccacagtgtgcacagctcttcgatggtgatgagaacgctgaaccatcctcttggcggcgagttttcagaagcgcccctatctacatctgtgccatctgaaacaacgtctgacaatctccagatcacgacccaaccctccgacgggcttgaggagaagttagattcagacgacccctccgtgaaagagttggacgtaaaggatctcgagggcgttgaagtcaaggacttagacgatgaggatctggagaacctcaatctcgacaccgaagacggcaaggtagtggagcttgacaccttagataacttggaaacaaacgatccaaatctggacgatcttctacggtctggagagttcgatattattgcgtatacagatcctgagttagatatgggcgacaagaagtccatgtttaacgaagaactggacctcccaatcgacgataagctggacaatcagtgtgtgagcgttgagccgaagaagaaggagcaagagaacaagactttggtgctgagcgataagcactcaccccaaaaaaaaagcaccgttacgaatgaagtgaagacagaagtgctgagcccgaatagcaaggtggaaagcaaatgcgaaaccgagaaaaacgatgaaaacaaggataacgtcgacaccccttgttctcaggcttccgcacacagtgatttgaacgacggtgagaagacttccctacacccgtgcgacccagacctctttgagaagcggactaatcgtgagaccgccggtccctccgccaacgtgattcaggctagcacccagttgcctgctcaggacgttattaacagctgcggcataacaggtagcacgcccgtgctgagttcactgctggccaacgaaaagtcagacaatagcgatattagaccctcaggatccccaccacccccgaccctgcccgcctcaccatcaaaccatgtgagctccctgccaccctttatcgctccaccaggaagggttttagacaacgcgatgaacagtaatgtgaccgttgtctcaagagtcaaccatgtgttttcgcagggagttcaagtaaatcccggccttatacccggccagtctactgtcaaccactcattgggcaccggaaaacccgccacacagaccgggccacaaacaagtcagagtggaactagtagcatgtccggccctcagcagttaatgattccgcagaccttggcacagcagaacagggagaggccccttctcctcgaagagcagccgctgctgctgcaggatttgctggaccaagagagacaagagcagcagcagcaaaggcagatgcaggctatgatccgccaaaggagcgagccattcttcccaaacatcgattttgacgctattacagacccaattatgaaggctaaaatggtcgcattgaagggtattaataaagtgatggcgcagaacaacctgggtatgcccccaatggtaatgtcccgatttccgtttatggggcaggttgtgaccgggacccaaaactcagagggtcaaaacctgggcccccaagctatcccgcaggatggaagcataactcaccagatttctcgccccaacccccctaacttcgggcctggattcgtcaatgattcacagcgcaaacagtacgaagagtggcttcaggagactcagcagctcttgcagatgcaacagaagtacctggaagagcagatcggtgctcatagaaagagcaaaaaagccctctccgctaagcagagaactgctaagaaggctggcagggagtttccagaagaagacgcagaacaactaaagcacgtcaccgaacagcaaagcatggtgcagaaacaactggaacagatccgcaagcagcagaaggagcatgccgaactgattgaggactatagaatcaagcaacagcaacagtgtgcgatggcgccaccgaccatgatgccatccgttcagcctcagcctcctctgattccaggcgccacacccccaaccatgtcccagcccactttccctatggtcccccagcagctgcagcatcagcagcacacaacagtgatcagcggccacacaagccccgttcggatgcccagtttacccggatggcagcccaactcggcccctgctcatctacctcttaatcccccaaggattcaacctcccatcgcccagctcccaattaaaacgtgtactcccgccccaggcaccgtgtcaaacgcaaacccacaaagcggacctcccccgcgggtggagttcgacgataataatcctttttcagaaagcttccaggaacgggaacgcaaggaaagactgagggaacagcaagaacgacagcgcatacagttgatgcaagaggtcgacaggcaacgagcgttgcagcaaaggatggaaatggagcagcacggcatggtcggttccgagatctcaagtagtagaaccagtgtctcccagatccccttttactcatctgacctgccctgtgattttatgcagcccctaggacccctacaacagtccccccagcatcagcaacagatgggacaggttctgcagcaacagaacatccagcaggggagtataaacagcccatccacccagactttcatgcaaacaaacgagcggcgacaggtcggacccccttctttcgttccggactcccctagcatcccagtaggaagcccaaacttctcaagcgttaaacaggggcacggaaatctctcgggcactagttttcagcagtcacctgttcgtccctcctttacaccagctttgcccgccgcaccccccgtggctaactctagtttaccctgcggtcaagattcgactataacccatgggcatagttaccccggatccacgcagagcttgatacagctgtattctgacattatcccagaagaaaagggcaaaaaaaagcggacaagaaagaaaaagagagacgatgatgcagagtcgacgaaagctccttccacgccgcacagtgatatcactgcaccacccactcccgggattagcgaaaccacctctacaccggcagtgagcaccccatctgaactgccgcagcaggctgaccaggagtccgtggagcctgtgggtcccagcacccctaatatggccgccgggcagctctgtacagagttggagaataagctgccaaacagcgatttcagccaggcaactcccaatcagcagacctatgcaaatagtgaagtggataaactctcaatggaaacccctgcaaaaacagaagagattaaattggagaaagccgagaccgaaagctgtcccggacaggaggagccgaaactggaagaacagaatggcagcaaggtcgaagggaacgctgtggcgtgccccgtctcctcagctcaatcgcctccacacagtgcaggagcacccgcagccaaaggagactcaggaaatgagctgctaaagcacctgcttaaaaataagaagtcctcatctcttctgaatcagaagcctgagggatcgatctgcagtgaggacgactgcacaaaggataacaaactggtcgagaaacaaaaccctgccgagggtctgcagactttaggggcacaaatgcagggcggattcggatgcggtaatcaattgccaaagactgacgggggctctgaaacaaaaaagcagcgcagcaaacgcacacagaggacgggagagaaggcggccccacggtccaaaaaacgtaaaaaggatgaggaagagaaacaagctatgtattcatctactgacacgtttacgcatctcaagcaggttagacagctgagcctcctccctctcatggaacccatcattggagttaactttgcccattttcttccgtacggaagcggtcaattcaatagtgggaaccgcctgctgggaaccttcgggtccgcaaccctggaaggggtcagcgattattattcccagctgatttacaaacaaaacaatctgtctaacccacccacacctcccgcctctctgcctcctacacccccccctatggcctgtcaaaaaatggctaacggctttgctactactgaagagctggccggaaaggctggcgtcctggtttctcatgaggtgacaaagacccttggccccaagcccttccagcttcctttccgcccccaagatgatctcttagcccgtgcgctggcacaaggacctaaaactgtggacgtccccgcctcactgcctactccaccccacaacaaccaggaggagttacgcatccaagaccactgcggggaccgcgacacccccgatagcttcgtcccgtcgtcttcaccagagagtgtggtgggtgtcgaagtgagccgatacccagacctgtcattagtgaaggaagaaccaccagagcccgtgcccagccctatcattcccatccttccttctactgctggtaaaagctcagagtcccggagaaatgacattaaaacagaacccgggacactgtacttcgcttccccctttgggccttcaccgaatggcccacggtcaggtctcattagcgtcgctataacacttcacccgaccgctgccgagaatatttcctccgtggtggcagcgttctcagacctgttacacgtgcgtatacctaacagttatgaggtgagctccgcccctgatgtgccctctatgggcctcgtgtcaagccatcgcataaacccagggctggagtacaggcagcacctactgttgcggggcccgccccctggtagcgcaaatcccccccgccttgtgtcatcgtacagactgaagcagccgaatgtgcccttcccccctactagtaacggcttatcgggatataaagatagctcacacgggatcgccgaatctgcggctctgagaccccagtggtgttgccactgtaaggtggtcattctgggatcaggagtgcgtaagtccttcaaggatcttaccctcttaaacaaagatagccgcgagtctacgaaaagagtggagaaggacattgtcttctgcagtaacaattgtttcatcctctactcatccacggcccaggccaagaactccgaaaataaggagtccatccctagcctgcctcaaagcccaatgagggaaacccccagtaaagccttccaccagtatagcaataacatcagtacactcgacgtgcattgtctgccccaactgcccgagaaggcgagtccccccgcttctcctcctatcgcattcccgcctgcgtttgaggcagcccaagtggaagctaagcccgatgaactcaaagtgaccgttaaacttaagccaaggctgcgagccgtacacggcggtttcgaagattgcagacccctgaacaagaaatggcggggaatgaagtggaagaaatggagcatccatattgtcatacctaagggaaccttcaaaccaccttgcgaggacgaaatcgacgagttcctgaagaaattggggaccagccttaagcctgatccagtgccaaaagactatcgaaagtgttgcttctgtcatgaggagggcgacggacttaccgacgggcctgcccgcttgcttaatttggacttagacctctgggtgcacctcaactgcgccctgtggtccactgaggtgtacgaaacccaggccggggctctgatcaatgttgaactcgcccttcgcagaggactccaaatgaagtgcgttttttgccataaaactggggccaccagcggttgccacaggttccggtgcacaaatatctatcacttcacctgcgctattaaagcccagtgcatgttctttaaggataaaaccatgctgtgccctatgcacaaaccgaaaggcattcacgaacaggaactaagttacttcgcagtgtttaggcgagtgtatgttcagagggatgaggtccggcagatcgcttctatagtccagcggggggaacgggaccacacttttcgtgtgggtagtctgatcttccatacaatcggacagttactcccccagcagatgcaagcttttcacagtccaaaagccctgtttcccgtgggatacgaggcatcgcggctttactggtcgacacggtacgccaaccgtcggtgcagatatctatgcagtattgaagagaaggacggacggccagtcttcgtgataaggattgtggagcagggtcatgaggacctcgttctgagcgacatcagccctaagggagtgtgggataaaatcctcgagcctgtggcctgcgtcagaaaaaaaagtgagatgttacagctgtttccagcatatctcaagggagaggatctcttcggcctgaccgtgagcgccgtcgcccgtattgccgagtctctgccaggagtagaggcctgtgaaaactatactttcaggtacggaaggaatcccctgatggaactgcctctagcagtgaacccaactggctgtgctaggtccgaacctaaaatgtcagcccatgttaagcggttcgtattgcggcctcacactctgaattccacctcaacctcaaagtctttccaatctacagttactggtgaacttaacgctccatactcaaagcagttcgtgcattccaagtcatctcagtataggaaaatgaagactgagtggaagtcaaacgtgtatctggctcgctctcggatccagggcctcggcctttacgctgccagggacattgagaaacacaccatggttatagaatatatcggcacaatcattagaaatgaagttgcaaaccgcaaagaaaagctgtacgaatctcagaatcgcggcgtctatatgttccggatggataacgatcatgtgatagatgcgactctgaccggcgggcccgccagatatattaatcatagctgcgcacctaactgtgttgccgaagtggtgacctttgaacggggccataaaattattatttcatccagcaggcggatccagaaaggggaggaactttgttatgactacaaatttgactttgaagatgaccagcacaagattccgtgtcactgtggcgccgtgaattgtagaaaatggatgaactag

SEQ ID NO: 196053 - DNA, 4575 bp, synthetic construct
  misc_feature 1..4575: note = Description of Artificial Sequence: Synthetic coding sequence
  source 1..4575: mol_type = other DNA
ctgatgcaggaggtggaccggcagcgggccctgcagcagcggatggagatggaacaacatggcatggtcggaagcgagataagtagctcacggacgagtgttagccaaatacccttctactcctccgatctgccctgtgactttatgcagcccctcggtccccttcagcagagcccacaacaccagcagcagatgggccaggtcctgcaacagcagaatattcagcaggggtctatcaacagtccttctacccagacatttatgcagactaatgaaaggcgccaggttggaccaccttcttttgtgcctgactccccatcaatcccagtgggaagtccaaacttctcgagtgtgaagcaggggcatggaaacctctctgggacctccttccaacagtctccagttcggccgagctttacacccgctctgcctgccgcacctcctgtcgccaacagttcgctgccgtgcggccaggacagtacaatcacccatgggcactcctaccctggctccacccagagcttaatccagctgtatagtgatattattcccgaggagaaaggaaagaaaaagcgtacccgcaagaaaaagagggacgacgacgccgagagcacgaaggctcctagcacccctcattcggatatcacagctccacctacccccggcatctcagaaaccacaagtacccctgctgtaagtaccccttccgaactccctcagcaagcagatcaggaatccgtggaaccggtagggccaagtaccccgaacatggctgcaggacagctgtgcaccgaactcgaaaataagctgcccaactctgacttctctcaggcaacaccgaaccagcagacctacgctaattccgaggtggataaactttcaatggagacaccagcaaagaccgaggagataaaactggagaaggctgaaactgagtcgtgtcccggtcaagaagagcccaagctggaggaacaaaatgggagcaaggttgaagggaatgccgtcgcctgccccgtgtcttccgctcagtccccgccccacagtgcaggggcccccgctgcgaagggagattctggcaacgagcttctgaagcaccttcttaaaaacaaaaagtcctcatctctactgaatcagaaacccgaggggagcatctgtagtgaggacgactgtacaaaagataataaactcgttgaaaagcaaaaccctgcagagggcctgcagactctgggggcgcaaatgcagggcggattcggctgtgggaaccaacttcctaagacggacggaggctccgagactaaaaagcagagatcaaagcgcacacagcggaccggagagaaggccgcccccagatctaagaagcgcaagaaggacgaggaggagaaacaggcaatgtattccagcaccgacacattcactcacctaaagcaacagctgagcttactgcccctgatggagccgataatcggcgtgaatttcgctcatttcctcccatacggctctgggcaatttaactccggcaatagattgctgggaacattcggctctgccacattagaaggcgtgtccgactactacagccagttaatctacaagaaaatggccaatgggtttgcaactactgaggagctggccgggaaagctggtgtgctagtatctcacgaggtgacaaaaactctgggcccaaagccctttcagctgccattcaggccccaggacgacttgcttgctcgggcgcttgcccagggtcccaagaccgtggacgtgcctgcaagcctcccgacgcccccacacaataaccaagaggagttacggatccaggatcactgcggcgaccgggatacccctgacagttttgtaccatcatcctcgcctgagtcggtcgtaggcgttgaggtttcaagatatcccgacttaagtctggtcaaagaggaaccgcccgagcctgtgcctagtcccattattcccatcttaccaagtacagccggcaaaagtagcgagagccgcagaaatgatatcaaaacagaaccgggcaccctctactttgcctccccatttgggcccagccctaacggaccaagatccgggctgatttctgtggccatcacacttcatccgacagccgcagagaacatttccagcgtagtagcagccttcagcgatctcttgcatgtgaggattcctaatagctatgaagtatcatccgctccagacgtgccttccatgggcctcgtttctagtcaccggattaaccctggactggaatataggcagcatctgctgttgcgggggccccctccaggtagcgcgaacccaccacgactggtctcttcatatcgacttaaacagccaaacgtgccatttccgcctacaagtaacggtctatcggggtacaaggattcgtcccacggcatcgccgagagcgccgctctgagacctcagtggtgctgccattgtaaggtggtcattttgggcagcggcgtcagaaaatctttcaaggacttgacactgctgaataaggactctcgagaatccacgaaaagagtggagaaggatatcgtgttctgtagtaataattgcttcatcttatactcatcaacggcacaagccaagaattctgaaaacaaagagagtatcccgagtcttcctcagagtccgatgagagaaaccccaagtaaagctttccaccagtactctaacaatattagtacactagacgtacactgcctccctcaactgcctgaaaaggcctcacctcctgcttccccccccatcgccttcccacctgcttttgaggcggcccaggttgaggcaaaacccgacgagcttaaagtcactgtcaaactcaaacctcggctgcgggccgtccatggtggctttgaagactgccgacccctgaataagaaatggcgaggcatgaagtggaaaaaatggtccatccacatcgtgatcccaaagggcacattcaagccaccctgcgaagacgaaattgatgaattcctaaaaaagctgggaacatctctaaagcccgaccctgtgcctaaagattaccggaaatgctgtttctgccacgaagagggggacggactgacagatggcccggctcgtctgctgaatctagacttggatctttgggtccatctcaactgcgctttatggagtacagaagtgtatgaaacacaggcaggcgccctcatcaacgtcgagttggccctgagacgcggtctgcagatgaaatgcgttttttgtcataagacaggcgcaaccagcggttgtcaccgttttcgctgcactaacatttatcattttacatgtgccatcaaggcccaatgcatgttctttaaagacaagactatgctgtgccctatgcataagccaaaaggaattcacgaacaagagctcagctactttgcagtgttcagaagggtgtatgtgcagagagacgaagttcgccagatcgcgtccattgttcagcgtggcgagcgggatcatactttccgggtggggtcactcatctttcataccatcgggcagctgttgcctcagcagatgcaggctttccatagccccaaggccctgtttcctgtgggatacgaggccagcaggctgtattggtcaacacggtacgctaataggaggtgcagatatttgtgtagcatagaagaaaaggacgggcgtcccgtgttcgtgatccgaatcgtggagcaggggcacgaagatctggtgctctctgatatctcacctaagggggtttgggataagattcttgagcctgttgcttgtgtaagaaaaaagtccgagatgctccagctattcccagcttacctcaaaggcgaggatttgttcgggttaacggttagtgccgttgctagaatcgccgaatctctgccgggagttgaggcttgtgaaaactacaccttccgttatgggcgaaatcccctaatggagctccctttagctgtcaaccctacagggtgcgcaaggagtgagcccaagatgtccgcccacgtgaagcggcctcacactcttaattctacgtcaacctcaaaatcttttcagagcaccgtgaccggggaattgaacgccccttatagcaagcagttcgttcactcgaagagtagccagtatcggaagatgaagaccgagtggaaaagcaacgtgtacctggccagatcccgcatacaggggctgggactgtatgcagctcgggacattgagaaacatacaatggtgattgaatatatcggaacaatcatccgcaacgaggttgccaaccgcaaagaaaagctgtacgagtcccagaataggggagtgtacatgttccggatggacaatgatcacgttatagatgccacacttacagggggccccgctcgctacattaatcacagttgtgctcccaattgcgtggcagaggtggtgactttcgagagaggccacaaaatcatcatttctagctctcgcagaatccagaaaggagaagagttgtgctacgactacaagtttgatttcgaggacgatcagcacaaaatcccttgtcactgtggagccgtcaactgcagaaaatggatgaattag

SEQ ID NO: 196054 - DNA, 351 bp, synthetic construct
  misc_feature 1..351: note = Description of Artificial Sequence: Synthetic coding sequence
  source 1..351: mol_type = other DNA
atggtgatcgagtacatcggcaccatcatccggaacgaggtggccaacaggaaggagaaactttatgaaagtcagaacaggggagtgtatatgtttagaatggataatgaccatgttattgacgcaacactaaccggaggccccgcccgatacataaaccactcatgtgcacccaattgcgtcgccgaggttgtcacctttgagaggggtcacaagatcatcataagttcctcaagacgcattcaaaagggcgaagagctttgttatgactacaaatttgattttgaagatgaccagcacaaaattccttgtcactgtggcgcggtcaattgccggaagtggatgaattag

SEQ ID NO: 196055 - DNA, 5577 bp, synthetic construct
  misc_feature 1..5577: note = Description of Artificial Sequence: Synthetic coding sequence
  source 1..5577: mol_type = other DNA
atgagcatcgtgatccccctgggcgtggacaccgccgagaccagctatctggaaatggccgctgggtctgagcccgagtcagtggaagcatctcctgtggtggtggaaaagagtaacagctaccctcaccagttgtacactagcagcagccaccattctcactcctacatcggtttgccgtacgcagatcacaattatggcgcccgcccccccccgaccccaccagccagcccccccccgagcgttctgatcagtaagaacgaggtaggaatttttactaccccgaattttgacgagacgagctccgctactactatctctacctccgaagatgggtcgtatgggaccgatgtcacacgctgtatctgcggattcactcacgacgatggctacatgatttgctgtgataagtgctcagtttggcagcatatcgattgcatggggattgaccggcaacatattcctgatacctacctgtgtgaaagatgtcagccccggaacttggacaaggaaagggcggtgctgctacaacgacgcaaaagagagaatatgtctgacggagacacttctgccacggaatccggcgacgaagtccctgtggaactgtacacagcctttcagcacacacccacgtcaattaccttgacagctagcagggtatctaaggttaatgacaagagacggaagaaaagcggggagaaagaacagcacatctctaaatgtaagaaggcattccgggaaggcagccggaagtcgtccagagttaagggttctgcccccgagatcgatccaagtagtgatggtagcaactttggatgggagacgaaaatcaaagcgtggatggaccggtacgaagaagctaataataatcagtatagtgaaggcgtccaacgggaagctcagcggatagcgcttagattgggaaatggaaacgataaaaaggagatgaacaagtctgatctaaacacgaataatctgctgttcaagcccccagtcgagagtcatatccagaagaataaaaaaattctgaaatccgcaaaggatctccctcctgacgcgctcatcatcgaatatagggggaagtttatgcttcgtgagcagttcgaggctaatggatatttctttaaacggccgtaccccttcgttttgttctatagtaagttccacggattagaaatgtgtgtcgatgcgcgcacgtttggtaacgaggcgagattcattcgccggagttgcacaccgaacgccgaagtacgccacgaaattcaggacgggacgatacacttgtatatttacagtattcacagtatccccaagggcacagaaataaccatcgcatttgacttcgattacggaaattgtaagtacaaagttgactgcgcatgcttgaaggaaaatccggaatgccccgtgctcaagcgcagtagtgaatccatggaaaacatcaacagcggctatgagacgaggcggaaaaaaggcaagaaagacaaggacatctcaaaagagaaggatacccagaatcagaacatcacactggactgtgaaggcaccacgaataagatgaaatcccccgagacaaaacagcggaaactcagtcccctgcggctgtctgttagcaataaccaggaaccggactttattgatgatattgaggagaagacacccatctcaaacgaggtggaaatggaaagcgaggaacagattgccgaaagaaaacggaagatgacacgagaggagcgaaaaatggaagccatcctgcaggcctttgcaaggctggagaagagggagaaacggcgagaacaagcgcttgagagaatttctacagcaaaaaccgaggtgaagaccgagtgcaaggatacccaaatcgtgagtgatgctgaagtgattcaggaacaggctaaggaagagaacgcctctaaacccacccccgcgaaggtcaacaggactaagcagaggaaaagcttttcccgcagtcgtacccacataggccagcaacgaaggcggcacagaaccgtgagcatgtgctcagatattcagccttctagcccagacatcgaagtgacttcccagcagaacgacatcgagaataccgtgctgaccatcgaaccagaaaccgaaacagcactggccgagattattactgagacagaggtgcccgcgcttaacaagtgcccaactaaatacccaaagactaagaagcacttggtgaacgaatggctctcagaaaagaacgaaaagaccggtaaaccatcggatggactttccgaaaggccgctgcgcatcactactgatcctgaagttctagctacccaattgaacagcctacccgggttaacttattccccccatgtttactcgactcctaaacactacatcagattcacttccccatttcttagtgagaagagacggcggaaggagccgaccgagaacatcagcggatcctgcaaaaagcgttggctgaagcaggcactagaggaggagaacagtgcgatactacacaggtttaattccccttgccaggagcgcagcaggtccccagctgtcaatggggaaaataagagtccacttttgctcaatgacagctgttccctgccggatctgaccacaccattgaagaagcggagattctatcaactactcgattccgtctacagcgaaaccagcaccccgacaccctccccttacgccacgcctacccataccgacatcactcccatggacccctcctttgccacaccgcctaggatcaagagtgatgatgagacatgcagaaatggctataagcccatctacagtcctgtgacacccgtgacccctggtacccccggaaataccatgcatttcgaaaatatctcaagtcccgagtcttcccccgaaataaaacggcggacctactcccaggagggctacgaccggtcctccactatgttaactctgggcccgttccgtaacagcaacctgaccgaactgggtttgcaagagatcaagactattggctatacaagcccacgcagcaggaccgaggtgaaccggcagtgccccggtgagaaggagcctgtctccgatcttcagcttggtctcgatgccgtggagcctaccgcactgcacaaaacactggaaaccccagcacacgatcgtgctgagcccaactctcagctcgactctactcactctgggaggggcactatgtatagttcctgggtcaaatctcccgatcgtactggcgtcaacttttctgtgaattcaaacttacgcgatttaactccaagccatcagttggaagtgggcggcggcttccgtatcagcgagtccaaatgcctgatgcaggatgacacccgaggaatgtttatggagacaaccgtcttttgcacgagcgaggatgggctggttagcggattcggcaggacagttaacgacaacttgattgacgggaactgtactcctcagaatcccccgcaaaagaaaaaagtgtctctcttagaatacagaaagaggcaacgagaagcccgtaagtccggtagtaagaccgaaaactttcccctgatttctgtcagcccgcacgcgtcgggatcgctctccaacaatggtgatgggtgtgcgagtagcaatgataatggcgagcaggtggatcatactgcatctctacccctcccaacccctgctacggtgtacaatgcgacctcagaagaaaccagcaataattgtcctgtgaaggatgcaacagcttcggaaaaaaatgagcctgaggtacaatggaccgcgtctacatctgtggagcaagttagagaaagatcttatcagcgcgcccttctgctgtccgaccaccgcaaggacaaggacagcgggggcgaaagcccctgtgtgtcttgctcaccctcacacgtccagtcctctccttcaagccacagtaaccatattccacagctgcaggccaaaggacctgtcccctctttttcggaactgatggaggaccctgaccctgaaaatccggagcctaccacaacaaacgagtgcccaagtccagacacatcgcagaatacctgtaagtcacccccgaaaatgtctaaacctgggtcccctggaagcgtgattcctgctcaggctcacggaaagatatttactaaacccgacccacagtgggatagcactgtgtctgcgtcagaggcagagaatggtgtccacctgaagacagaacttcagcagaaacaactttccaataacaaccaggctctgagcaagaatcacccaccccagacacatgtgcgaaactcctccgaacaactctcacagaaacttccctcggtacctactaagctccattgtcccccttcgccacatctcgagaatccaccaaagagctcaacgcctcacaccccggtgcagcacggatatctctcaccgaaaccaccatcacagcagctgggatctccgtatcggcctcaccattctcagtcaccacaggtaggtacaccccaacgggaaccccagcggaacttttaccccgccgcccagaacctcccggctaatacacagcaggcgacttcaggaactctcttcacacaaacgccctccggtcagagctcagccacctacagtcagttcaaccaacagagcctgaattcgactgccccgccccctcctccacccccacctccaagcagctcatactaccagaatcaacagccctcagccaatttccagaattacaatcaactcaaaggttccctatctcagcagacagtgttcacatccgggcccaaccaggcactgccggggactacctctcagcaaactgtgccaggccatcacgttacccctgggcatttcctcccttcccaaaacccgaccatacaccaccagaccgctgctgccgttgtgcccccccctcccccccccccacctgccccaggcccacacctggtgcaacagccgaactctcatcagcagcatagcgttgcacatgtcgtgggcccagtacacgccgtgacaccagggtcgcatatccattctcagacagcaggtcatcacctgcccccaccccctccccctcctggtcctgccccccaccaccatcctccccctcacccatccaccggtctgcagggtctgcaagcacagcatcagcacgtggtgaactcagccccaccgccacctcccccgccaccacccagcagtgtgctggcaagcggtcaccacaccactagcgcccaggcacttcaccacccccctcatcaagggccccctctgtttccatcaagcgctcacccgacggtacctccatacccttcccaagccacacaccataccactttgggccccgggcctcagcatcaaccttccggtaccggcccccactgccctcttcctgtcaccggcccccatttgcagccgcaggggcccaatagtatccctactccaactgcaagcggtttctgcccccaccctggaagtgtggccctgccacacggggtgcaggggcctcaacaggcgtctcctgtgccgggccagattcccattcacagggcacaggttccacccacattccagaataattaccatgggagcggatggcattag

SEQ ID NO: 196056 - DNA, 5577 bp, synthetic construct
  misc_feature 1..5577: note = Description of Artificial Sequence: Synthetic coding sequence
  source 1..5577: mol_type = other DNA
atgagcatcgtgatccccctgggcgtggacaccgccgagaccagctatttagagatggccgcaggcagcgagcccgaatccgtcgaagcttcacctgtggtggtcgagaagtcaaatagctatccgcatcagctctatacttcatcgagccaccactctcattcttatatcgggcttccgtacgctgatcataactacggagcccgcccacctccgactcctcccgctagcccgcctcccagcgtcctgattagcaagaacgaagttggaatcttcaccacccctaattttgacgagacctcctcagccaccaccatttctacctcagaagatggcagttatggtacagacgtaacaaggtgcatttgtggattcacacatgatgatggttacatgatctgttgtgataagtgctctgtatggcagcacatcgactgcatgggaatcgacaggcagcatattccagatacctacctgtgcgagcgctgccagccccggaacctggataaggagagagcggtactgctgcagagacgtaagagagaaaatatgagcgacggagatacatccgctactgaatccggcgatgaagttccggtcgaactttataccgcatttcagcacaccccaacatccatcaccctaaccgcttccagagtgagtaaggtgaatgataagagaagaaagaagtctggcgagaaagagcagcatatcagtaaatgtaagaaggctttccgcgaaggtagcagaaagtcctctcgcgtgaaagggtctgcacctgagattgatccttctagcgacgggagtaactttggatgggaaacaaaaattaaggcttggatggaccgctatgaggaagcaaataacaaccaatacagcgagggggtgcagcgggaggcacagagaattgcactgcggctaggtaatggtaacgacaaaaaggaaatgaacaaaagtgacctgaacactaataacctcctgtttaaacctccagttgagtcccacatccagaaaaacaagaagatactcaaaagcgctaaagacctgcctcccgacgcccttatcattgagtacagagggaaatttatgctaagagagcagtttgaagcgaatgggtacttctttaaaagaccatatcctttcgtactgttctatagcaaattccatggcttagaaatgtgcgtcgacgctagaacatttggcaatgaggcccgattcattagacgaagttgtaccccaaatgccgaagtgagacacgagatccaagacggcaccatccatctctacatctacagtatccactccattccaaaagggactgaaataactatcgccttcgactttgactatggtaattgcaagtataaagtggattgcgcctgccttaaggaaaatccggaatgcccagtgctcaagcgctctagtgagtctatggaaaatattaattcagggtatgagactaggcggaagaaaggcaaaaaagacaaagatattagcaaggagaaggacactcagaatcagaatatcactctggactgcgaaggcacgaccaataagatgaagtcccctgaaactaaacagcgtaagctctcacctctgcgtctgtccgtgtccaataaccaggagccagacttcatcgacgacatagaagagaaaacccctatatctaatgaagtcgaaatggaaagcgaagagcagatcgccgaaaggaaacggaagatgacccgggaggaacggaagatggaggccattttgcaagcatttgctagactggagaaacgtgagaaacggagagaacaagcattggagcggatctcaaccgccaagaccgaagtcaaaactgagtgcaaggacacacaaattgtgtccgatgcggaggtgatccaggaacaggcaaaagaggaaaatgcttctaaacctacacccgccaaggttaatcgcactaaacagagaaaatcattttctcgatcccgaacgcacattggccaacagcggagacgccaccgtactgtgtcaatgtgtagtgatatccagccgtccagtccagacattgaggtgaccagtcagcagaatgatattgagaatacggttcttacaattgaaccagaaaccgaaaccgcccttgctgaaattattaccgaaactgaggtgccggctctgaacaaatgcccgaccaaatatccgaagacgaagaagcacctggttaatgagtggctttccgaaaagaatgaaaaaaccggaaaaccatccgacgggctcagtgagcgccctctcagaatcacgactgaccccgaagtgctggccacccagctgaacagtcttcccggtctaacatacagcccccacgtgtatagtacacctaagcactacattagatttacctctccctttctgtctgaaaagcgcagaaggaaagagcctacagagaacatcagcggttcgtgcaagaaacgatggcttaagcaggcgcttgaagaggagaactccgccattctgcacagattcaattccccatgccaggagcggtctcgctctccggccgttaacggggagaacaagtcccccctcctcctgaacgattcatgtagtctgccagatctgactacccctttaaagaaacgacggttctatcagctccttgattcagtctattcggagacgagcacgccaactcccagcccttatgctaccccaactcataccgatattacccctatggatccatcattcgcaaccccaccaagaatcaagagcgacgatgagacatgcaggaacggctacaaacctatatacagtccagtcacgccagtgacacccggcacgccaggcaacaccatgcactttgagaatataagttcccccgagtccagccctgagataaagcggaggacctactctcaggaggggtacgatcgcagtagtacgatgctgactctgggccctttccggaactccaatttaacagagttagggttacaggagattaaaacaatcggatatacatctcctcgatcccgcacggaggtcaataggcagtgcccgggagagaaggagcctgtgtccgacttgcaattggggctggatgcagtggagcccaccgcactgcataaaacgctcgaaacaccagcccatgatcgagctgagcccaacagtcagctggacagcacacattcgggccggggtaccatgtacagtagttgggtgaagagcccagatcgtacaggcgttaatttcagtgtgaactccaatctacgggatctcaccccaagccatcagctggaggttggggggggcttccgcatctcggaatcgaaatgccttatgcaagacgacacaagaggtatgtttatggaaaccactgtcttttgcacttctgaagatggcctggtgagtggcttcggacggaccgttaatgataacctgatagacggcaattgtactcctcagaaccccccacagaagaagaaggtatcgctcctcgagtacaggaaacggcagagagaagcccgcaaatcgggtagtaaaaccgaaaactttcccctaatctcagtgtctccgcacgcttcgggctctctctcgaataacggcgacggttgcgcgagcagcaatgataacggggaacaagtcgatcatactgcttctcttccactccctacaccggccacagtctataacgccacctccgaggagactagcaacaattgccccgtcaaggatgccaccgcctccgagaagaacgagcctgaagtgcagtggacagcctctactagtgtcgaacaagttcgggagcgaagctaccagcgtgcattgctgctctccgatcaccggaaagacaaggactctgggggagagtccccatgcgtttcctgttctccgtctcatgtccagtcgagcccctcttcacattctaaccatattccccagttgcaggctaagggtcccgtacctagttttagtgagcttatggaagacccggatcctgaaaaccctgagccaacaacaaccaatgagtgcccttccccggatactagccagaacacgtgtaaatcccccccgaaaatgtctaaacctggtagcccaggctccgtcatcccagctcaggctcacgggaagatctttaccaagcctgatccccagtgggacagcaccgtgtctgcctctgaggccgagaacggagtgcacctgaagacagagctccagcagaaacagcttagcaacaacaaccaggccttgagcaagaaccacccaccacaaactcatgtcaggaacagtagcgaacagctttctcagaagctcccatctgtccccactaaactgcattgcccaccatctccacatctggaaaatcctccgaaatcaagcactccccatacaccagtccaacacggctacctgtcccctaagcccccatctcagcagctgggtagcccttatcgtcctcaccactctcagtccccgcaggtcggcactcctcagcgcgaaccacagcgcaatttttaccccgccgcacaaaacctcccggccaacacacaacaggcaactagcggaacattgttcacacagaccccgtctggacagtcttccgccacttactcccagttcaatcagcagagccttaacagcaccgcaccccctccacctcctccaccccctccttcgagcagttattaccaaaatcaacaaccttctgccaatttccagaattataaccaactgaaaggcagtctctcacagcagaccgtgttcacttcagggcctaaccaggctcttcctggtacaactagccaacagaccgtgcccggacaccatgtgactcctgggcacttcttgccttcccagaatcctactattcaccaccaaactgccgctgcagtcgtgccccccccaccacctcctccaccagcgccgggacctcacctagtgcaacagcctaactcccaccagcaacactcagtggcccacgttgtgggaccagtacacgcggtaacccctggtagccacattcacagtcagacagccggtcaccatctcccgccccctccacctccacccggcccagctcctcaccaccacccgcccccacatccctcaacaggactccagggtctccaggctcagcaccagcacgtcgtcaatagtgccccgccccccccccccccccccccaccaagcagtgtattggcatctggacaccacaccacaagcgctcaagccttgcatcatccgcctcaccaggggcctccactcttcccatcatccgcgcatccgacagtccctccatatcccagccaggcaactcatcacacaactctgggccctggaccacagcaccaaccatccggcacaggtccacactgcccgctccccgttaccggtccgcacctgcagcctcagggtcctaatagtatccctactcctactgcttcaggattttgtccacatcccgggagcgtcgccctgccccacggggtacaggggcctcagcaggcgtcaccagtaccgggacagattccaattcacagggcccaggtccctccgacgtttcagaacaattaccacggctctggatggcattag

SEQ ID NO: 196057 - DNA, 5451 bp, synthetic construct
  misc_feature 1..5451: note = Description of Artificial Sequence: Synthetic coding sequence
  source 1..5451: mol_type = other DNA
atgagcatcgtgatccccctgggcgtggacaccgccgagaccagctacctggaaatggctgccggcagcgagcccgagtcagtggaagcctccccggtcgtggtggaaaaatccaattcatacccccaccagttatacacctctagcagccatcatagccatagctatatcgggcttccctacgccgaccacaactatggggccaggccacctcccacgccaccagccagtcccccccccagcgttttgatcagcaagaatgaagtgggcatcttcacaacaccaaactttgacgagacatctagcgccaccaccatatccactagcgaagatggatcctatggcactgacgtgacccgttgcatctgtggtttcactcatgacgatggatatatgatctgttgtgataagtgctccgtatggcagcacattgattgtatgggcatagacaggcaacatattccggatacctacctatgcgagcgctgccagcccagaaatttagacaaggagcgcgctgtactcctccagaggcggaagcgtgagaacatgtctgacggggatactagcgcaaccgaatcaggtgatgaggttcccgtagagttgtatactgcctttcagcatacgcctaccagcatcactcttacagcctctcgtgtctcgaaggtaaatgacaagaggaggaagaaaagcggcgaaaaggagcagcacatttcaaaatgcaaaaaggcgttccgcgaagggtctcgaaagtcctcccgggtcaaggggtccgccccagaaatagaccctagcagcgatggctccaactttggatgggagactaagattaaggcatggatggacagatatgaggaagccaataacaaccagtattctgagggggtgcagcgcgaggctcagcgtattgcccttcggctggggaatgggaacgataaaaaagaaatgaacaaatccgacctcaacactaataatttgttgtttaaacctccagtggaaagtcacattcagaaaaataaaaagatcctgaagtcggcaaaggatctgcctccagatgcactaattatcgaatacagaggaaaattcatgctgagggagcagtttgaagctaatgggtattttttcaagcgaccctatccatttgtgctcttttatagcaagttccacgggcttgaaatgtgcgtcgacgctaggacatttggaaacgaagcgcggtttatccgccggagctgcacaccaaatgcagaggttagacatgaaatacaagacggtacaatccatctgtatatctatagcattcacagcattccaaaaggcaccgagatcaccatcgcctttgacttcgactatggtaattgtaaatacaaggtggattgcgcttgcctgaaggaaaacccggaatgccccgtgcttaagaggagttccgagagtatggaaaatataaacagtggatatgagacgcgacgcaaaaaagggaagaaggacaaggatatctcaaaggagaaagacactcagaaccagaatataacactagactgcgaggggacaacaaacaagatgaagagtccagaaacaaaacagagaaaactctcgcctctgcgactatccgtttctaacaaccaggaaccagattttatagatgatatcgaagaaaaaacccctatctcgaacgaagtagagatggagtctgaggaacaaattgcggagcggaagagaaaaatgactcgggaggagagaaagatggaggctatattgcaggcttttgcaaggttggaaaaaagggagaaacggcgtgagcaggcactagagaggattagcactgctaagacagaagtgaaaacagaatgcaaggacacccagattgtgagtgacgctgaggtgatccaagagcaagccaaggaggagaacgcctctaagcccacccctgcaaaggtgaatagaacgaagcagagaaagagcttttcacgcagtagaactcacatcggacaacagcgtaggcgacatagaaccgtctcgatgtgtagcgatattcagccgagtagcccagacattgaggtgacctctcagcagaacgacatagaaaacactgttctgacaattgagcccgagactgagacagccctcgccgaaattatcactgagacagaagtccctgcactgaataagtgccccaccaaatacccaaaaacaaagaagcacctggtgaatgagtggctctccgagaagaacgaaaagaccggcaagccttctgacggcctctctgagagaccgcttaggattaccacagatcccgaagtgctcgctacccagcttaatagtctacctggactgacttactccccacacgtctactcaactcctaagcattatattcgcttcaccagcccgtttttgtccgaaaagcgtaggcgcaaggagccaaccgaaaatatctctggttcttgtaaaaaacgatggcttaagcaggctctcgaagaagagaattctgccatccttcacagattcaacagtccttgtcaggaacgaagccgatcccctgccgtcaatggcgagaacaaatccccgctgctgctcaacgatagttgctctcttcctgacctgaccacccctctcaaaaagcgccggttttatcagttgctcgactcggtgtacagcgagaccagcactccaactcccagtccttacgctacccctactcacacagatattacgcctatggatcctagcttcgctacgcctcctagaatcaaaagcgatgatgagacttgccggaatggatacaagccaatttactcaccggtgactccagttacacccggcacccctggaaacaccatgcacttcgagaatattagcagtccagaatctagcccggaaatcaaaagaaggacatactcacaggagggatacgatcggagcagcactatgcttacgctaggcccctttcgcaacagtaacctgactgaactcggactgcaggaaatcaaaaccatcggatatacgtcacctcggtctcggacagaagtcaatcgccagtgcccgggtgagaaggagcctgtgtctgacctgcagctggggctagatgccgtggagcccaccgcgctgcacaaaaccctagaaacaccggctcacgatcgggctgagcccaacagccagttggactccacccattctggtagaggtacaatgtacagttcatgggtgaagtctccagacagaactggcgtcaattttagcgtgaactcaaaccttcgagacctgacgccatcccatcagcttgaggtcggcggcggattccggatttcagagtcaaagtgtttgatgcaggacgacactaggggaatgttcatggagacgaccgtgttttgcacatccgaggacggcttggtatctggcttcggacgcacagtaaacgataacctgatcgacggcaactgtacgccgcagaaccccccgcagaagaagaaggtcagcttactggagtaccgcaaacgtcagcgcgaggccaggaagtccggaagcaaaacggagaatttcccactgatttccgtgtcacctcacgcaagcggctccctctccaataatggagatggatgtgccagctcaaacgacaatggcgagcaggtggatcatactgctagtctgccgctcccgacccccgccaccgtgtacaatgccaccagtgaagagacttcaaacaattgccccgtgaaggacgccacagccagcgagaaaaacgaacccgaggttcagtggaccgccagtacctctgtggaacaggtgagggagcgcagctatcagagagcgctgttgctctccgaccaccgaaaggacaaggattctgatcccgaccctgagaacccagagccgaccacgacgaacgagtgtcctagtccggatacctcacagaatacatgtaagagtcccccaaagatgagcaaaccgggttcacccggaagtgtgattccagctcaggcgcacgggaaaatctttacgaagcccgacccacaatgggatagcacagtctccgcctctgaagccgaaaacggcgttcatctgaaaactgagttgcagcaaaagcaactgtcaaacaataatcaagcactgagcaagaatcaccccccacaaacccatgtgagaaactcctcggagcagctttcccagaaactgccatctgtgcctacaaagctgcactgccccccctcaccgcacctggagaacccccccaaatcctccacaccccacacccctgtccaacacgggtatttatctccaaaaccaccatcacagcagctgggtagcccctacaggccacaccattctcagtccccccaggttggtacgccccaaagggagcctcagagaaacttttacccagctgcgcaaaatctgccagccaatacacagcaggcgaccagcggcacacttttcacacagactccctcaggccagagcagcgccacatactcccaatttaaccagcagtctctgaactctaccgcgcccccgccaccaccacctcccccaccttctagtagctattatcaaaatcagcaaccatccgctaactttcagaattacaatcagttgaaaggctcccttagccaacagactgtcttcacctctggcccaaaccaggctttacctggcactacgtcccagcagaccgtgcccggtcatcatgtaacgcctggacatttcctaccatcacagaatccaaccattcaccaccagacagcagctgcagtagttcctccaccccctcctcccccacctgcacccggacctcatttggtgcagcagccaaactctcaccagcagcacagcgttgcgcacgtcgtggggcctgttcacgccgttactccaggaagccatatccactcacaaacagccgggcaccacctgcctcccccaccaccccccccaggtcccgcgcctcaccaccacccaccacctcacccaagcaccggcctccaggggctccaggcacaacaccaacacgtcgttaacagcgcaccccctcccccaccccctccaccaccgagttccgtactggcaagtggtcaccataccactagtgcgcaggctctgcaccatcctccccaccaaggtcctcccctgtttccctcctcggcccatcccaccgtccccccttatccctcacaggcaacacaccacacaacactgggcccaggaccccagcaccagccttccgggaccggaccccactgtcccctgcctgtgacaggcccacacctccagcctcagggcccaaacagtattccgactcccaccgcgagcgggttttgtcctcaccctgggagcgtcgccctcccccatggggtccagggtccccagcaggcatcccccgtgcccggacaaatacctattcacagggctcaggtgcccccaacttttcagaacaattatcacgggagcggatggcactag

SEQ ID NO: 196058 - DNA, 1770 bp, synthetic construct
  misc_feature 1..1770: note = Description of Artificial Sequence: Synthetic coding sequence
  source 1..1770: mol_type = other DNA
atgcacttcgagaacatcagcagccccgagagcagccccgagatcaagcgtagaacttattcgcaggaggggtacgaccgatccagtacaatgcttacacttggccccttccggaactctaatctcacagagctgggattacaagaaattaagaccatcgggtacacgagcccccggtcccgtaccgaggtaaatagacagtgcccaggggaaaaggaaccagtgagtgacctgcagctcggcctggatgccgttgagccaacagcactgcataagaccctggagacaccagcccacgaccgggcggaacccaacagccagctggatagtacccattctggtagaggcacaatgtactcatcctgggtgaagtctccggatcggaccggagttaacttctcagtgaattctaatttgagggatctgacgccctcgcaccagcttgaagtcggggggggcttccgtatatccgaatccaagtgtttaatgcaggacgatacccgcgggatgtttatggagaccaccgttttctgcactagtgaggatggactcgtgtcgggctttggccggactgtgaacgacaatcttatcgacgggaattgtacaccccaaaaccccccccagaaaaagaaggtctcacttctcgaataccggaaacggcagagagaggcaaggaaatccggcagcaaaacagagaatttccctctcatatctgtgtctcctcatgcatctgggtccttaagcaataatggagacggatgcgccagcagtaacgacaacggcgaacaagtcgatcacaccgccagtctgccgctacctaccccagccaccgtgtataacgctacaagcgaggagacaagcaacaattgccccgtgaaagatgcaaccgcctccgagaaaaatgaacccgaggtgcagtggacagcctccacttctgtggaacaggtgagagaaagaagttaccaaagagccttgttgttatctgatcaccgcaaagataaggatagtgggggggagagcccgtgtgtgtcctgctcaccatcgcacgttcagagtagccctagctctcacagtaatcatatccctcagctgcaggccaagggaccggtacctagtttcagtgagttgatggaggaccccgacccggagaatccagagcctaccaccactaatgaatgcccatctccagacactagtcagaacacttgtaaaagtccgcctaaaatgagcaagccagggtcaccagggagcgtgattccggcccaggcccacggaaagatctttacgaagccggacccgcaatgggactccactgtgtcggcgtctgaagctgagaatggcgtgcacctgaagactgagctccaacagaagcagctgtccaacaacaatcaggctctcagtaaaaaccaccctccccagacacatgtcagaaactccagtgagcagcttagccagaaactgccttcagtccccaccaaactccactgtccaccttctccccacttggagaatcctcctaaatcaagtactcctcatacaccagttcagcacggttacctctccccaaaaccacctagtcaacagttaggaagcccatacaggccacatcactctcagagcccccaggtcggaacccctcagcgggaaccacagcgcaatttttacccagctgcccagaacctcccagctaacacgcaacaggctactagcggcactctcttcacccagactccgtcaggccaaagctcagccacctacactcagagatag

SEQ ID NO: 196059 - DNA, 5337 bp, synthetic construct
  misc_feature 1..5337: note = Description of Artificial Sequence: Synthetic coding sequence
  source 1..5337: mol_type = other DNA
atgagcatcgtgatccccctgggcgtggacaccgccgagaccagctaccttgagatggccgctggaagcgagcctgagtccgtggaagcctcccccgtggtagtggagaagtccaactcctatccacaccagctgtacacctctagttctcatcactctcatagctatatcggcttaccctacgccgatcataattatggcgctagaccacctcctactcctcctgccagcccgccgccctccgtactgatctctaagaatgaagttggtatcttcacaaccccgaattttgacgaaacgtcaagtgccactacgataagcacaagtgaagacggatcctatggtactgacgtcacccgctgtatatgcggttttacccacgatgatggctacatgatttgttgtgacaagtgtagcgtctggcagcacatcgactgtatgggcatcgacaggcagcacatcccagacacctatctgtgcgagcgttgccaaccaagaaacttggataaggaacgcgcagtgcttttgcaacgccgcaagagagagaacatgagcgacggcgatacgagtgctactgaatccggggatgaggtcccagtcgaactttataccgccttccagcacacacccaccagcatcaccctgacagcctcgagagtctctaaggtgaacgataagcgtcggaagaaatcaggcgagaaggaacagcacatctccaagtgcaaaaaggctttccgggagggatctaggaaatccagccgcgtaaaaggctctgcccccgagatcgacccaagctcggacggatcaaatttcgggtgggaaacaaaaattaaggcttggatggaccgatatgaggaggccaacaataatcagtacagtgaaggtgtccagagggaggcccagaggattgccctccgcttgggtaatggtaacgacaagaaagaaatgaataaatcagacctcaacactaacaatttgctgtttaaacctcctgtcgagtcccatatccagaaaaacaaaaagatcttaaaatcagccaaagacctgcctcccgacgctttaatcatcgaatatcgcggaaaattcatgctccgtgaacagttcgaggctaacggctatttctttaagaggccttacccctttgttttattctacagcaagttccatgggcttgagatgtgtgttgatgctaggaccttcggaaacgaggccaggtttataaggcgtagttgcactcccaatgcagaagtccgccatgagattcaggatggtacaatacacctctatatttatagcattcattctataccgaaaggcacagagattactattgcctttgatttcgattacgggaattgcaaatacaaggttgattgcgcctgccttaaagagaatcccgaatgtcccgttctgaaaaggtcttctgagtccatggagaacattaattccggctacgagactcgccggaagaaaggcaagaaaacgcgcgaggagcggaagatggaggccatcctccaagcttttgccaggttagaaaaacgcgagaaacgtagggaacaggcactggaacggattagcactgccaagacggaggttaagactgagtgcaaggacactcaaatcgtctcagacgccgaggtgatacaggagcaggctaaggaggaaaatgcgtcaaagcctacgccagcgaaggtgaaccgaaccaagcaacggaagtccttcagcaggagccgcacacacattggacaacagaggcgtagacataggacagtgagtatgtgtagtgatatccagccatcttctccagatatcgaagtcacttcgcaacaaaatgatattgaaaacaccgtgctcaccattgaacccgagaccgagaccgcacttgccgagatcataacagagacggaggtacccgccctaaacaagtgcccaacaaagtatcccaaaaccaaaaaacacctggtcaatgaatggctcagcgaaaagaacgaaaagacaggtaaaccttcagatggtctgagcgaaagacctttgagaattacaactgatcctgaggtgttagcaactcagcttaattctctccccgggctcacttattctcctcatgtctacagcacaccaaagcattacatccggtttacctccccctttctgtccgaaaaacgccggaggaaggagcccacagagaacataagcgggagttgcaaaaagcggtggcttaagcaagcacttgaggaggaaaatagtgctatcctgcacagatttaactctccatgccaagagcgaagccggagtcctgctgttaacggggaaaataagagccctttattactgaatgatagctgttcccttcctgacctcactaccccattaaaaaaacggagattttatcagctgctggacagtgtttatagcgaaacatctacgcctactccaagtccatatgccaccccgacacacacagatatcacgccaatggatccatcatttgctacccctccaagaattaagagtgatgacgagacttgtcggaatggctacaaaccgatctacagcccagtgactcctgtgacgcctgggaccccaggcaatactatgcactttgagaatatttcttcacctgaatcttctcctgaaatcaagcggagaacctactcacaggaagggtacgacagaagttccactatgctgacactcgggcctttccggaactctaatctcaccgaattagggcttcaggagattaagaccatcggctacacgtctccccggtcgcgcaccgaggtgaacaggcagtgcccaggggaaaaggaaccagtgtccgaccttcagctgggactcgacgctgtggagcctactgccctccacaagaccctggagacacccgctcacgatcgcgctgagccgaattcacaactggacagtacacactcgggacggggaactatgtactcctcttgggtcaaaagtcccgataggaccggtgtcaatttctctgttaattcaaatctacgggatttaacgccaagccaccagcttgaagtgggcggtggcttcaggattagcgagagcaagtgtctaatgcaggacgacacaaggggaatgttcatggaaactactgtgttttgcacatccgaggatgggctagtgtctggctttggtcgcaccgtgaatgataacctgatagacggtaattgcacacctcagaaccccccacaaaaaaagaaggtgtctctgcttgagtatagaaaacgccagagggaggcacggaagtccggttccaagaccgaaaatttcccacttatctcggtcagtccccacgcgagtggatctcttagcaacaatggcgacggctgtgcctccagcaatgacaatggcgaacaggtagatcacaccgcgtctcttccccttcctacccctgccactgtctataacgccacctcagaagaaacttcaaataattgtccagtaaaggacgccacagcgagcgagaagaacgaacccgaggtgcagtggaccgcctcgacgtcagtcgaacaagtaagagagcgaagctaccagcgggccctgctcctttcggatcatcgcaaagacaaagatagtggtggcgaatctccgtgcgtcagctgctctccctcccacgtccaatcctcacctagctcccactccaaccacataccccagctacaggccaaaggccccgtacccagcttttccgagctgatggaagatcccgaccccgagaaccctgaacccaccactaccaatgagtgcccatcccctgacaccagccagaacacatgcaagagcccaccaaagatgtcgaagccggggagcccagggtcagtgattccagcccaggcccacggaaaaatttttaccaaaccagatccccagtgggactccactgtaagtgcatctgaagcagagaatggagtccacttgaagactgagctccagcaaaagcagctcagcaacaacaaccaagccttatccaaaaatcatcccccccagacacatgtccgcaacagttcagaacagttaagtcagaaactgcccagtgtaccaacaaagctgcactgtcctccctcgccccatttggaaaacccaccaaagagctcaactccccacactcctgtgcaacacggttatttaagcccaaagccgcctagtcaacaactgggatctccctatcgcccacaccacagtcaatctcctcaggtcggcacacctcaacgcgagccccagcggaacttttatccggcggctcagaacctgcctgccaatactcagcaggctacatccggtactctatttactcagactccttctggccaatctagcgcaacctacagccaattcaaccagcagtccttgaatagtacagcgccaccaccccccccccctccaccaccgtcttcatcgtactatcaaaatcaacagccaagcgcgaactttcagaattacaatcagctcaagggctccctttcccagcagactgtgtttacttccgggccaaaccaagccttgccagggacaacttcacagcagactgtgcctggccaccacgtgaccccagggcattttcttccctcccaaaaccctaccattcatcatcagactgcagctgccgtggtgccaccgccgccaccaccccctcctgcacccgggccccacctcgtccagcagcccaattctcaccagcagcactctgtggctcatgtggtgggccccgtgcacgccgttacgcctggttctcatatccattcgcagacggcaggacatcatctcccaccaccaccgccacctccaggcccggcgccacaccaccacccccctcctcatccatccacgggtctccagggtcttcaggcacaacaccagcatgtagtaaactccgctccgcctccccccccccctccccccccttcctcagtgttagccagtggtcatcacactactagcgcccaagcactgcaccaccccccacatcaggggccccctctttttccatcctctgcgcatcccaccgtccctccctacccaagccaggccacacatcacaccaccctcggtcccggtccccagcatcagccatcgggaacaggtcctcattgccccctccctgtgacgggcccacacctgcagccccagggcccaaactctattcccacaccaacagcatctggtttctgcccccatcccggatctgtggctctcccacacggagtccagggcccccagcaggcttccccagttcctggtcagatccccattcatcgtgcccaggtgcctccaactttccagaataattatcacgggagcggctggcattag

SEQ ID NO: 196060 - DNA, 4962 bp, synthetic construct
  misc_feature 1..4962: note = Description of Artificial Sequence: Synthetic coding sequence
  source 1..4962: mol_type = other DNA
atgagcatcgtgatccccctgggcgtggacaccgccgagaccagctacctagagatggccgccggctcagaacccgaaagcgtggaggcttccccagtggtagtagagaagtctaactcatacccccatcagctttatacatcttcctctcaccatagccattcctacattgggttgccgtatgccgaccacaactacggcgcaaggcccccaccaaccccacctgcatccccaccaccgtcagtgctcattagtaagaacgaagtcgggatcttcacgacacccaatttcgatgaaacttcatctgccacaacaatatcaaccagcgaggatgggtcctatggcaccgacgttaccagatgtatctgtggcttcacacatgatgacggctatatgatctgctgtgacaagtgcagcgtgtggcagcacatcgattgcatgggtattgaccggcagcatatcccggatacctatctctgcgagcgatgtcaaccacgtaacctcgacaaagaaagagctgtcctgctccaaagacggaagagggagaatatgtccgacggcgacactagcgctaccgaatccggagacgaggtgccagtagagttgtatacagcctttcagcacacgccaaccagcataacgctcaccgcatctcgcgtgtctaaggtcaatgacaagagacgcaaaaagtccggcgagaaggagcagcacatcagcaagtgcaaaaaagctttcagagaagggtcaaggaagagctcccgcgtgaagggctctgctcccgaaatcgaccccagctctgatgggtcaaatttcggatgggaaactaagatcaaggcctggatggatcgttacgaagaggccaacaataatcagtacagtgagggggtccagcgcgaggcacaaaggattgctctgcggcttggcaacggaaatgacaaaaaggaaatgaacaagagcgacttgaacacaaacaatctcctttttaagccaccagtggagtcccacatccagaaaaacaaaaagattctgaagagcgccaaggatttgccccccgacgcactaattatcgagtaccgcgggaagtttatgctgagggagcagttcgaggccaatgggtactttttcaagagaccctacccatttgtccttttctacagcaaatttcatggtctcgaaatgtgtgttgacgcaagaaccttcggcaacgaggcacgattcatccggcggagttgcacccccaacgctgaggtgcgtcacgagatccaggatgggactatccatctgtacatctactccattcactccatccccaaggggactgaaataactattgcattcgattttgattatggtaactgcaagtataaagtggattgcgcttgcctgaaagaaaaccctgaatgccccgtcttgaagaggtcctctgagtccatggagaacatcaattcaggatatgagacacgacgcaaaaagggcaagaaagataaggacatctctaaagagaaggatacccagaaccagaacatcacactggactgtgaggggacaactaacaagatgaagtccccagagaccaaacagcggaagctgagcccactgcgcttgagcgtttctaacaatcaggagcctgattttatagatgatattgaagagaagacacccatctccaacgaggttgaaatggagtctgaagagcagatcgctgaacgcaaacggaaaatgactcgtgaggaacgcaaaatggaggcgattctgcaggcatttgcccggcttgaaaaacgggagaagagacgtgagcaagccttagagaggatttctacagctaagactgaagtgaaaaccgaatgcaaggatacgcagatagtgtcagacgcggaagtgatccaagaacaagcgaaggaagagaatgcatccaaacccacccccgcgaaagtgaatagaactaaacagagaaaaagcttttcgagatccaggacacatattggccagcaacgacggcgacatcggaccgtgagcatgtgctccgacatccagccatcctccccagacatagaagtgacgagccagcagaatgatatcgagaataccgtgctcactatcgagccagagactgagaccgcgttggccgagattatcacagagactgaggttccagcactcaacaaatgtcccaccaagtaccctaaaaccaagaaacatctggtcaacgagtggctgtccgaaaagaatgaaaaaacagggaagcctagcgacggcctctcagaacggcccctgaggataacaaccgatccagaggtgctagccacgcagctgaatagcctgccgggcctcacttactccccacacgtctactctactcctaagcattatattagattcacctcacccttcctctctgagaagcgtagacgaaaagaacccacagagaacatcagtgggtcgtgcaaaaagagatggctaaagcaggctctggaagaagaaaacagcgccatcctacatcggttcaactccccatgccaggaacgtagtagatctccagcggtgaatggcgagaacaaatctccgctgctccttaacgattcatgctctcttcctgacctcacaacccccctgaagaaacgccgcttctatcagctcctggacagcgtgtactcagaaacttccacccctacaccaagcccctacgctaccccgacccataccgatatcactcccatggacccttccttcgcaaccccacctcggattaagagtgatgacgaaacttgccgcaacggctacaaaccgatctattcccccgtgactccagttacacccggcactcctggcaatacaatgcacttcgagaacatctcctcacccgagagttcacccgagatcaagagacggacctacagtcaggagggatatgaccggagctccacaatgcttacgcttgggccattcaggaacagcaatctcacagagctcggactgcaggagatcaagaccattggttacaccagccccaggagcagaaccgaagtcaatagacagtgcccaggagagaaagaacctgtgtctgatttgcaactcggactagatgccgtggaaccgactgctcttcataaaacacttgagacgcccgctcacgaccgcgccgagcctaactctcagctggatagcactcattccgggagaggaaccatgtacagctcttgggtcaagagtcctgatcggacgggcgttaatttctctgtcaacagcaacctcagggaccttacaccctctcatcaactcgaggtaggcggggggtttcgaattagcgagtctaagtgcctgatgcaagacgatacccgcgggatgttcatggaaacaactgtgttctgcacctcagaagacggtttggtgtcagggtttgggcgaacagtgaatgacaatctgatcgatggaaattgtacgccccagaatccaccacagaagaagaaggtctccctgctggaatacaggaaaaggcagcgggaagctcgcaaaagcggttctaagaccgaaaattttcccctgatctcagtctcaccccatgcctctggatctctcagcaacaatggcgatggctgtgcgtcaagtaatgataatggggagcaggtcgaccacactgcctctttgccactgcccacccctgctaccgtgtataatgccaccagtgaagagacctccaataattgccccgtgaaggacgccaccgcatctgagaagaatgaacccgaagttcagtggactgcatcaacatcggtagaacaggtccgcgaacggagttaccagagggctcttctgctgagtgatcacagaaaggacaaggattctggcggtgagtccccatgcgtctcatgctcaccaagccatgtgcaatcttccccttccagtcactcaaatcatataccacaattacaggcaaaaggacctgtgcctagcttctcggaattgatggaggaccccgaccccgaaaaccccgagcctaccaccacaaatgaatgcccatccccggacacaagccaaaatacttgcaagtcgccacccaagatgtcaaagcctgggagtcctggctccgtcattcccgcccaggcccacggaaaaatattcacgaaaccagacccccagtgggactccaccgtgtctgcctcagaagcagagaacggagtccacctcaagactgagctgcaacagaaacaactctccaataataaccaggctctgtctaagaatcatccaccccagactcatgtcaggaattcctccgagcagctctctcaaaagctgccctctgtgcctactaaactgcactgtccgccatctcctcacctggagaaccctccaaagagtagcacaccccacactccagtgcagcatgggtatctgagccctaagccacccagccaacagttgggctcaccataccgcccccaccattcccagtcacctcaagtggggactccccaaagagaaccacagcggaatttttatccagctgcccagaatctgccagtgttctggctacttggcattatcccacatcaattgaaaccatatacaacccatctgatcaaggacctgcatttctttctccgggttctgatccagttgtaccaccggattcctcacaagctgcacataatcccgctgtgggacagagacccatcaacgagcctactcgaacaaggtcacatcgtacactacttaagtcaggtcctcatcagctcccccaaagatcagactgtgttccagcacctcctattgcaggggtccgtgctcatcttggctttatggccatgtcacatgggcttcaaagacctcagccgccacctgcagtgcttagacaggttccaattcacagagcaccgatgtcaccaacattttaagactatcactatggggcaagggggtataaagatggattctaagaacatttttctcaacgtgttgtag

SEQ ID NO: 196061 - DNA, 378 bp, synthetic construct
  misc_feature 1..378: note = Description of Artificial Sequence: Synthetic coding sequence
  source 1..378: mol_type = other DNA
tgaggcagcctgagcaacaacggcgacggctgcgccagcagcaacgacaacggggagcaagttgaccacaccgcttctctgcctctaccgacccctgctacagtatacaacgcgacgtctgaagagaccagcaacaattgcccagtgaaggatgccacagcgtccgaaaaaaatgagccagaggtacagtggacagcatccacgtctgttgagcaagtgcgcgaacggagctatcagcgtgctttactgctcagcgaccaccggaaggataaggactcggacccagaccccgaaaatcccgagccgacgacaacaaatgagtgcccttcgcctgacacgtcccaaaacacgtgcaagagtcctccaaaaatgagctag

SEQ ID NO: 196062 - DNA, 216 bp, synthetic construct
  misc_feature 1..216: note = Description of Artificial Sequence: Synthetic coding sequence
  source 1..216: mol_type = other DNA
atgagcatcgtgatccccctgggcgtggacaccgccgagaccagctacttagagatggcagcaggaagtgagcccgaatccgttgaggcctcccctgtggtggtcgagaaatccaacagttacccgcatcagctatacacatcctcttctcaccattcacactcctatattggcctgccgtatgcagaccacaattacggagccagacccccttag

SEQ ID NO: 196063 - DNA, 1830 bp, synthetic construct
  misc_feature 1..1830: note = Description of Artificial Sequence: Synthetic coding sequence
  source 1..1830: mol_type = other DNA
atgagcatcgtgatccccctgggcgtggacaccgccgagaccagctatctggaaatggcagcaggatccgagccagaaagcgtcgaggctagccctgtcgtggtagagaagagtaactcttacccacaccaactctacacatctagttcccatcactcccattcttacattggcctcccatatgcagatcataactacggtgctcgaccgccccctacacccccagcgagccccccccccagtgtgctaataagtaagaatgaagtcggtatcttcactactcccaattttgatgaaacaagctcagcgacaaccatcagcacctccgaggacggctcttacggtacagacgtgaccaggtgtatctgcggattcactcacgatgatggatacatgatttgttgcgacaagtgttcggtgtggcaacacatagactgtatgggcattgacaggcagcacatcccagacacctatctctgtgaaaggtgccagccgaggaatctcgacaaggagcgcgccgtcctgctgcaaagaagaaagcgagagaacatgtccgatggagatacatccgccactgagtccggtgatgaggttccagtggaactgtacacagccttccagcacactccaacatcaattacgctgaccgcttcccgcgtgagcaaagtgaacgacaagcggaggaagaagtccggcgagaaggaacagcatatttccaaatgcaagaaggcgtttcgggaagggtctcgtaagtcctccagggtgaagggctcagctcccgagattgatccctcatccgatggatccaacttcggatgggagaccaagattaaagcttggatggatcgctatgaggaggccaataacaaccagtactcagagggcgtacagagagaggcacaacgcattgcactacgcctaggcaacggcaatgacaaaaaggagatgaataagtccgatcttaacaccaataatctcttgttcaagccccctgtggaatcgcacatacagaagaacaagaagatcctcaagagcgcgaaagatctgcccccagacgccttgatcatcgagtatagggggaaattcatgttgagggaacaattcgaagccaacggttacttctttaaacggccgtatccattcgtgctgttctacagcaaattccatggtctggaaatgtgtgttgacgccaggaccttcgggaacgaggcccggttcatcaggagaagctgcactccaaacgctgaggtcaggcacgaaattcaagacggcaccatccacttatacatctattcaatacattctatccctaaaggaaccgaaattacaattgcattcgattttgactacgggaattgcaagtataaggtcgattgtgcttgtctgaaggagaatccagaatgtccagtactcaaacggtctagcgaatccatggaaaacatcaacagcgggtacgaaacgcggagaaagaaaggaaagaaggataaggacatatctaaggagaaagacacgcagaaccaaaacatcaccttggattgtgaaggcacaaccaacaagatgaaaagccctgaaaccaaacagcgaaagttgagcccccttcgccttagcgtctctaacaatcaggagccagatttcatagacgacatcgaggagaagacacctatctcaaacgaagttgaaatggagagtgaagaacaaatcgccgagcggaagagaaaaatggtgtcttgggaagccagtagcttaggactagtgactgctgctctacatatggtgatagtggcggccttcacttgggcgtttacccttttctttgaagtgtcagagtag

SEQ ID NO: 196064 - DNA, 693 bp, synthetic construct
  misc_feature 1..693: note = Description of Artificial Sequence: Synthetic coding sequence
  source 1..693: mol_type = other DNA
atgagcatcgtgatccccctgggcgtggacaccgccgagaccagctatctggaaatggccgccggttccgagcccgagtcggttgaagcctcacccgtggtagtggagaaaagcaacagctatccacatcagctgtacacatcaagcagtcaccactcccactcctacattggcctcccatacgccgatcataactatggtgccaggcccccccctacacccccggcttcccccccgccaagtgtactcatctcgaagaacgaagtcgggatctttacaacgcccaatttcgacgagacatccagcgctacaaccatatccacctccgaggacggcagttacggcaccgacgtaaccaggtgcatttgcggattcactcatgacgacggttatatgatctgctgtgacaaatgctcagtctggcagcatatcgactgtatggggatagaccgccagcacattcctgatacctacctgtgcgaacggtgtcagcctcggaacctagacaaggagagggcggtgttgctgcagaggcggaaacgtgagaatatgtccgacggggatacatcagcaacagagagcggcgatgaggttcctgtggaactgtataccgcatttcaacacacgccaacctccatcaccttgacagcttcccgagtgtctaaagttaacgataaacggcggaaaaagtag

SEQ ID NO: 196065 - DNA, 1362 bp, synthetic construct
  misc_feature 1..1362: note = Description of Artificial Sequence: Synthetic coding sequence
  source 1..1362: mol_type = other DNA
atggtgctggtgctgagcgacaccagcgccagccccccccccagcgtcctcataagcaagaacgaggtcgggattttcacaacccctaacttcgatgagactagctcggccactaccatcagtacctcggaagatgggtcatatggtactgacgtcacccgctgtatatgtggctttacccacgacgatgggtacatgatttgttgcgacaaatgtagtgtgtggcagcatatcgattgcatgggcatcgatcgccagcacattcctgatacgtatttatgcgaaaggtgtcagccacgaaatttagataaagagcgcgccgtgcttctgcagagacgcaagcgggagaacatgtcagacggcgacacctcagctacagagagcggggacgaggtccctgtggagctatacacggcctttcaacacacacctaccagtatcactctgacagccagtagggttagcaaagtgaatgacaaaaggagaaaaaaatctggcgaaaaagagcagcacatctcgaagtgcaaaaaagcttttcgcgagggttcaaggaaatctagtcgggtgaagggatcagcacccgaaatcgatccatcttctgacgggagcaacttcgggtgggagactaagatcaaggcctggatggatcgatatgaagaagccaacaacaatcagtatagcgagggtgtccagcgggaggcccaacgaatcgcactgcgcctgggcaatggtaatgataaaaaggagatgaacaagtcagacctcaacaccaacaatctgctttttaagccgcctgttgagtcacatatccagaagaataagaaaattctgaagtccgctaaagacctcccacctgacgccctgatcatagagtacaggggcaagttcatgctgcgtgagcagtttgaagccaacggatatttcttcaagagaccatatccctttgtgctcttttattccaagttccatggactggaaatgtgtgtggatgctcgcacatttgggaatgaagcaagattcatccgaagatcttgtacacctaacgcggaggtgaggcatgaaatacaggacgggaccattcatctgtatatctattctatacatagcataccgaaagggactgagatcaccatcgccttcgattttgactacggaaactgcaagtacaaagtagattgcgcttgcctaaaggaaaatccagagtgtccagtgttgaagcgctcatccgagagtatggaaaacattaattctggatatgagactagacggaagaaggggaaaaagaccaagatatttcagaagaagaaaattcacaagattaggatcttgctgtggattgtcaaagagcgaccgaccaagtag

SEQ ID NO: 196066 - DNA, 969 bp, synthetic construct
  misc_feature 1..969: note = Description of Artificial Sequence: Synthetic coding sequence
  source 1..969: mol_type = other DNA
atgcccgtgaccgtgacccggaccaccatcaccaccaccaccacctcctcgagcggactggggagcccaatgattgtcggcagcccaagggccctgacacaaccattgggcttgttgcgcttgctgcagcttgtctccacttgcgtagcctttagtctggtagcatccgtgggtgcttggactggctctatgggtaactggtccatgtttacctggtgcttttgtttttctgtcaccttgatcattttaatagttgaattgtgcgggctccaagccaggtttccactaagctggcgaaattttcccatcactttcgcctgttacgccgcgctgttttgcctctccgcgtccattatctatccgaccacttatgttcagtttctgtcacacggcagatcccgggatcatgccatcgctgctacttttttctcttgtatcgcttgtgtggcttacgctacagaggtagcgtggaccagggcgcgtccgggcgaaattacaggctacatggcaacggttcccgggctcctgaaggtgctggagacctttgtagcatgcatcatttttgcgttcatatccgacccaaacctgtatcagcaccagcctgctctcgaatggtgcgttgcagtctacgctatttgttttatactggcagcaatcgccatcctgttaaacctgggcgagtgcacaaatgtcttgcctattccttttccaagctttctctccggactcgcccttctgtctgtcctgctgtacgccaccgctctggtgctgtggcccctctatcagttcgatgaaaagtacgggggacagcccaggagaagtcgcgatgtgtcctgctcccgcagccacgcgtactacgtctgtgcctgggatcgaaggctggctgtcgccattctcactgccatcaacctgctcgcctatgtggcagaccttgtccacagtgcacacttggtctttgtcaaagtctag

SEQ ID NO: 196067 - DNA, 969 bp, synthetic construct
  misc_feature 1..969: note = Description of Artificial Sequence: Synthetic coding sequence
  source 1..969: mol_type = other DNA
atgcccgtgaccgtgacccggaccaccatcaccaccaccaccaccagcagtagcggcttaggtagtcccatgatcgtgggatcacctagggcattgacccagccacttgggttgttaaggctattgcaattagtctctacatgcgtagccttcagcctggttgcatccgtgggggcgtggacagggagcatgggaaattggagcatgtttacttggtgtttctgcttctctgtcacgcttatcattttaatcgtggagttgtgcggcttgcaggctagattccctctatcgtggcgaaactttccgatcactttcgcctgctatgccgccttattttgtctttccgcgagtattatttaccctacaacatacgtgcagttcctctcacatggacgcagtcgcgaccacgccatcgcagcaacattctttagctgtatagcatgtgttgcctacgcaactgaggtcgcctggacaagggcaaggcctggggaaattaccggctacatggccacggtgccgggtctcctcaaagtccttgagacctttgtcgcttgcattatttttgcatttatctctgatcctaatctgtatcaacaccaaccggccctcgaatggtgcgtggctgtttacgccatctgcttcattcttgcagccatcgctatacttctgaatctcggcgaatgcaccaacgtgttaccgatcccctttccttcattcttgtccggactagcgctcttgtccgtactcctctatgccactgctttggttctatggccgctgtaccagtttgatgaaaaatatggggggcaaccacggcgctcccgagacgtcagctgttctcgatcccatgcctattacgtgtgtgcatgggaccggaggctggccgtcgccattttgacagcaattaacctattggcttatgttgccgaccttgttcactctgctcatctggtgtttgttaaggtctag

SEQ ID NO: 196068 - DNA, 969 bp, synthetic construct
  misc_feature 1..969: note = Description of Artificial Sequence: Synthetic coding sequence
  source 1..969: mol_type = other DNA
atgcccgtgaccgtgacccggaccaccatcaccaccaccaccacctcttctagcgggctgggatctcccatgattgtgggaagcccccgggcacttacacaacccctggggctgctccggctcctgcaattggtgtctacctgtgtggccttctcactagtagccagcgtgggcgcctggactgggtccatgggaaactggagcatgttcacatggtgtttttgtttttctgtgactctcatcattctgatcgtcgagctgtgtggtctgcaagctagatttcccttgagctggagaaactttcctatcacctttgcttgttacgccgccttgttctgtcttagcgcttctatcatatatccaaccacctacgtgcagttcctctcgcacggccgctctcgtgatcacgctattgccgccacctttttttcctgcattgcgtgtgttgcctacgctactgaggtggcatggacccgcgccaggcccggcgagataacggggtatatggctactgtcccgggtctgctgaaagtgctggaaactttcgtggcctgcatcattttcgcgttcatttcagatcccaacctgtaccagcatcagcctgccctcgaatggtgcgtagcggtctacgctatctgtttcatcctggctgccattgctatcctgctaaacctgggggagtgtacaaatgtgttgcctataccatttccatcttttctgtctggtctggcgctgcttagtgtgctgctgtacgcgaccgcccttgtactgtggccactgtaccagttcgatgagaaatacggaggccagcctaggcgatcgcgggacgtctcatgttcacgcagtcatgcctactacgtgtgtgcgtgggaccggagacttgctgtggccatcctcactgctattaatctcctcgcctacgtcgctgaccttgtgcatagtgcacacctggtcttcgtcaaggtgtag

SEQ ID NO: 196069 - DNA, 969 bp, synthetic construct
  misc_feature 1..969: note = Description of Artificial Sequence: Synthetic coding sequence
  source 1..969: mol_type = other DNA
atgcccgtgaccgtgacccggaccaccatcaccaccaccaccacctcctccagcgggctcggatcccccatgatagtgggaagcccgcgcgcactcacccagccacttgggttactgcgcctgctgcagctggtgtccacatgcgtggcattctccttggttgccagcgtaggcgcctggacagggtctatgggaaactggtccatgttcacgtggtgtttttgcttcagcgttacattgattatcctgatcgtcgaactgtgcggacttcaggcaagattcccactctcttggcgcaattttcccatcaccttcgcatgctatgcggcgctcttttgcctgtcggcatcaattatttaccctactacctacgtgcaattcttaagccacggtagatctagggatcacgccattgctgctacattcttcagttgcatcgcatgtgttgcctatgccaccgaagtcgcctggacgcgtgcaagaccaggcgagatcactgggtacatggccacggttccaggtcttctcaaggtgctggagactttcgtggcctgcatcatctttgcgttcatctccgaccccaacctttaccagcatcagccagctctggaatggtgtgtggctgtgtatgcaatatgctttatcctggcagcaatcgcgattctgctcaacctcggagagtgtaccaacgttttgccaattccatttccatcgttcttgtcagggctcgctctcctgtctgtccttctgtacgcgacggctctggtcctctggcctctgtaccagttcgatgaaaaatacggaggacagccccgcagatccagagatgtttcctgtagccggagtcacgcttactatgtctgtgcctgggatcgcaggttagctgtagctattctcactgcaatcaatttgctggcttatgttgccgatttggtgcattcagcccacttggtcttcgtgaaggtgtag

SEQ ID NO: 196070 - DNA, 969 bp, synthetic construct
  misc_feature 1..969: note = Description of Artificial Sequence: Synthetic coding sequence
  source 1..969: mol_type = other DNA
atgcccgtgaccgtgacccggaccaccatcaccaccaccaccacctcatctagtggcctaggcagcccaatgatcgtgggtagtccaagagctttgacccagcctttgggactactccgtctgctgcagctggtgagcacatgcgtcgcgtttagtctggtcgcttcagtgggagcttggacaggatccatgggtaattggtctatgtttacttggtgtttttgtttttccgtgaccctgatcattctgattgtggagctctgtggcctacaggctcgattcccgctgtcgtggagaaacttccctattacttttgcctgctatgccgctctgttttgtctcagcgcctcaatcatttatccaacaacgtatgtgcagtttctgagccacgggaggtcgagagaccatgccattgcagcaacctttttcagctgtatcgcgtgcgtggcatatgccacagaagtggcgtggacccgtgccagaccaggggaaattactggatacatggcgaccgttccaggtctcttgaaagtccttgagacatttgttgcgtgcattatctttgctttcatctctgatcccaatttatatcaacaccagccagcgctcgaatggtgcgtggcagtgtacgcaatctgcttcatcctcgctgcaattgcaattctcttgaaccttggggaatgtactaacgttctccctatccccttcccttccttcttatcgggacttgccctcctctctgtgctgctgtacgctacagcccttgtgctttggcctctataccaatttgacgaaaaatatgggggtcagccccggcgatcccgggatgttagttgttcccgcagccacgcgtactacgtatgcgcctgggaccgcaggcttgccgtggctatactgaccgccatcaatttgctggcctatgtggccgacttggtgcacagcgctcatcttgtattcgtgaaggtgtag

SEQ ID NO: 196071 - DNA, 444 bp, synthetic construct
  misc_feature 1..444: note = Description of Artificial Sequence: Synthetic coding sequence
  source 1..444: mol_type = other DNA
atgcccgtgaccgtgacccggaccaccatcaccaccaccaccacctccagctcaggcttgggatcccccatgatcgtcggttcccctcgagccctcacgcagcccctgggcttgctgcggcttctccagctggtgtcaacatgtgtggccttctcgctcgtggccagcgtgggagcttggactggatctatgggcaactggtccatgttcacctggtgcttctgcttctctgtcactctaatcatcctgatcgtggagctgtgcggcctacaggctcgattccctctttcatggagaaatttcccaataacattcgcatgctacgcagcactattttgtctaagtgcttcaattatttaccccacaacatatgtccaatttctgagtcacgggagatcacgggatcatgccatcgccgccacattcttttcttgcatcgcatag

SEQ ID NO: 196072 - DNA, 858 bp, synthetic construct
  misc_feature 1..858: note = Description of Artificial Sequence: Synthetic coding sequence
  source 1..858: mol_type = other DNA
atgcccgtgaccgtgacccggaccaccatcaccaccaccaccaccagctcctcagggctaggtagccccatgatcgtggggagcccacgggccctgacacaacctcttggcctgttacgtctgctccagctggtgtccacttgtgttgccttttcgctcgtcgcttcagtgggcgcctggactggctccatggggaactggagcatgttcacatggtgtttttgcttttccgttacgctgataatcttgatcgtggaactatgtggcctgcaagctagatttcccctgtcttggcgtaactttccaatcacattcttctcttgtatcgcctgcgtagcctatgcaactgaagtggcctggacaagggctaggccaggagaaattaccggatacatggccaccgtccccggccttctcaaggtgttggagacctttgtggcatgtatcatctttgcattcattagcgatccaaacctgtaccagcaccaacctgccctggaatggtgcgtagccgtttacgctatctgtttcattctggccgccattgccatcttgctaaatctcggagaatgcacgaacgtgctgcctatcccattcccgtccttcctgtcaggattggccctgttgagcgtgctgttatatgctacagcactcgtgctgtggcctctctaccagttcgatgagaaatatggcggacaaccccgcaggtcacgggacgttagctgctcacggtcccacgcctactacgtctgtgcatgggaccgtagattggccgtggcaatccttaccgccatcaacctactggcttatgtagccgatctcgttcactcagcgcacctggtattcgtcaaggtctag

SEQ ID NO: 196073 - DNA, 729 bp, synthetic construct
  misc_feature 1..729: note = Description of Artificial Sequence: Synthetic coding sequence
  source 1..729: mol_type = other DNA
atgcccgtgaccgtgacccggaccaccatcaccaccaccaccaccagctctagcgggctgggaagcccaatgatcgtagggagcccacgcgctttgacccagcccttggggcttttacgcctgttgcaactggtttctacctgtgtggccttttctctagtagcttctgttggggcttggaccggctctatgggcaactggtccatgtttacctggtgtttctgttttagcgtgacattgataattctgatagtagagctgtgcggtttgcaagcgcgatttccgctgagttggagaaactttcctataaccttcgcctgctatgctgctctcttctgcctgtccgcttcaatcatttatcccacaacgtatgtccagtttctgagccatggacgctcaagggatcacgccatcgccgcaactttcttttcatgtatcgcatgtgtcgcttatgctaccgaggtggcatggaccagggctcgaccgggggagataaccggctacatggcaacagttcctggcctcttgaaggtgcttgagacctttgtagcctgtatcatattcgccttcatctccgatccaaatctttatcagcaccagcctgctctcgagtggtgtgtggcagtgtacgctatttgcttcatcttggctgcaattgccattttgctgaacctcggcgaatgcaccaacgttctgccaattcctttcccatcctttctgtccggctag

SEQ ID NO: 196074 - DNA, 780 bp, synthetic construct
  misc_feature 1..780: note = Description of Artificial Sequence: Synthetic coding sequence
  source 1..780: mol_type = other DNA
atgcccgtgaccgtgacccggaccaccatcaccaccaccaccacctcttcttctggccttgggtcccctatgatcgtgggtagcccgcgggcgcttacacagccattgggtcttctgcgactgctgcagctggtgtccacatgcgtggccttttcactggttgcatctgtcggtgcgtggaccggctcaatgggaaattggtctatgtttacttggtgcttctgctttagcgtcacgctgataatcctgatcgtggaactttgtggactgcaggcaaggttcccactgagctggcgcaatttcccaatcacttttgcgtgctatgcagccttattttgtctctcagcatccatcatttatcccactacctatgttcagttcctgagtcacgggcggtccagggatcatgccatcgccgccacattcttctcttgcatcgcgtgtgttgcttacgccactgaagtggcttggaccagggccagacctggagaaattactggttatatggctacggtacctggcctgttgaaagtcctagagaccttcgtcgcatgcatcattttcgccttcatttcagatcctaatctgtaccaacaccaaccagcccttgaatggtgcgtcgctgtgtatgcgatctgcttcatcttagccgccattgccatactcctgaacctgggagagtgtaccaacgtcctgcccatcccgttccccagctttcttagtggtctggcactcctttctgtactcctgtacgccaccgccttggttttgtggccctag

SEQ ID NO: 196075 - DNA, 567 bp, synthetic construct
  misc_feature 1..567: note = Description of Artificial Sequence: Synthetic coding sequence
  source 1..567: mol_type = other DNA
atgcccgtgaccgtgacccggaccaccatcaccaccaccaccacctcttcgtctgggctcgggagcccaatgatcgtcggaagtccccgagcccttacacagccgctgggactactccgcctccttcagctcgtttcaacttgcgttgcgttctcccttgtggccagcgtcggcgcctggactggcagcatggggaattggtccatgtttacctggtgtttctgcttcagcgttacacttatcatactgattgtggagctgtgcggcctccaagctcgattccctttatcatggagaaattttccgatcacctttgcatgttacgctgcactgttttgcctcagtgcctcaatcatttatcctacaacatacgtgcagttcctgtctcacgggcggagtagggaccacgctatagccgcgacctttttctcttgcatcgcctgcgttgcctacgctaccgaggtggcttggactagggctaggcctggggagatcactgggtacatggctacggtcccaggactgctcaaggtcctggaaaccttcgttgcttgtattatcttttag

SEQ ID NO: 196076 - DNA, 942 bp, synthetic construct
  misc_feature 1..942: note = Description of Artificial Sequence: Synthetic coding sequence
  source 1..942: mol_type = other DNA
atggccctgcggatctgcgtgacctacacccccgccctgcccatcggtctctgcacacggtgttgtctgtgtctggaacaaagtcctagctggtgtcactgtctccgcggcgtgtcgttcctcacattccacctgcatcagagcgttccattgggcgatcgtgactccctgctgatgtttacacgccaagcaggtcacttcgtggaaggttctaaggcaggcaggagccgaggccggttgtgcctttcacaggcactccgcgtcgccgtgcgtggcgcattcgtctccctctggttcgcagccggggcaggggatcgcgagcgtaataaaggggataagggagcacagaccggtgccggcctctctcaagaggctgaggatgtagacgtgtcacgtgcccgtcgggtgaccgacgctccccaagggaccctctgtggaaccggaaaccgaaactccgggtcacagagtgctcgtgtggtgggtgtggctcacttgggggaagcgtttcgcgtcggcgtggagcaggccatcagctcctgcccggaagaggtacatggtcgccatggattgtcaatggagatcatgtgggccaggatggacgtcgccctcaggagtcctggacgaggcctcctggccggcgctggagcgttgtgcatgactctggcagagagttcttgtccagattatgagcggggtcggcgggcatgtcttacgctgcatagacacccaactcctcactgctcgacatggggcctgccattacgggtcgctggatcatggctgaccgtggtcacagtggaggccctcggcgggtggaggatgggtgtgcggcgcaccggtcaagttggaccaactatgcacccaccaccagtgtccggcgcctcacccctgttacttcaccatctattgcttctcttgctgattataattctcacttgttag

SEQ ID NO: 196077 - DNA, 942 bp, synthetic construct
  misc_feature 1..942: note = Description of Artificial Sequence: Synthetic coding sequence
  source 1..942: mol_type = other DNA
atggccctgcggatctgcgtgacctacacccccgccctgcccatcggcctatgcaccagatgctgcttatgtctggaacagtcaccctcctggtgtcactgtctgcgaggtgtgagcttccttacctttcacctgcatcagagcgtgcccctgggcgaccgtgatagcttactcatgtttacaaggcaagccggtcacttcgtggaagggagtaaggctggtagatctcgaggcaggctctgcttgtcacaggcactgcgagtggcggtccgcggagccttcgtgtcactatggtttgcagccggagctggggaccgggaacgcaataagggagacaagggcgcccaaactggcgcgggcttatcccaggaagctgaggatgtggatgtgagccgtgcgcgaagagtgactgatgcgcctcaagggacgctttgtggcactgggaaccgaaattctggatcacaaagtgctcgcgtcgtcggtgtggcacatttgggagaggcgtttagagttggcgttgaacaggcaatcagtagttgccccgaggaagtccacggccgccatggcctgtcgatggaaatcatgtgggcccgaatggacgtggcactccggagtcccggccgcgggttgctggccggagcgggcgcactttgtatgactctcgccgagtcctcctgccccgattatgagcgcggtaggcgagcctgcttgacgctgcaccggcatcccacaccccactgcagcacttggggcttaccactccgggtggctggctcttggctgacagttgtaactgtggaggcccttggaggatggcgaatgggcgtccggcggactggccaggtgggtcctaccatgcacccccctcccgtgtcaggtgccagcccactcctgctccaccatctcctcctgttactgctaatcatcattttaacatgctag

SEQ ID NO: 196078 - DNA, 279 bp, synthetic construct
  misc_feature 1..279: note = Description of Artificial Sequence: Synthetic coding sequence
  source 1..279: mol_type = other DNA
atgcaggtgagcaccgccgccctggccgtgctgctgtgcaccatggccctctgcaatcagttcagcgctagcctcgcagctgatacgcccactgcatgctgcttctcttacacgtcacgccaaatcccacagaattttatagcagattattttgagacatccagtcagtgctctaaacccggagtcatctttctaaccaagcgctcccgtcaggtctgtgctgatccctccgaggagtgggttcagaagtatgtttcagacctggagctttccgcttag

SEQ ID NO: 196079 - DNA, 2334 bp, synthetic construct
  misc_feature 1..2334: note = Description of Artificial Sequence: Synthetic coding sequence
  source 1..2334: mol_type = other DNA
atgggcgtgcccttcttcagcagcctgcggtgcatggtggacctgggaccctgctgggcagggggactgactgcagagatgaagcttctcctggccctcgcaggactgctggctatcttagccacacctcagccatctgagggcgctgcccccgccgttctgggtgaagtcgacacttctctggtactcagctcaatggaggaagctaagcagttggtggacaaagcatacaaagagagacgagaaagcatcaagcagagactgcgtagtggctctgcgagcccaatggagcttttgagctacttcaaacagccggtcgcagctactagaactgccgtaagagccgctgactatctgcacgtggccctggacctgttggagagaaagctgcggtcgttgtggaggcgtccatttaatgtgacagatgtgttgactccagcccagctgaatgtgcttagtaaaagctctggatgtgcctatcaggacgttggcgtgacttgccccgaacaggataagtaccggaccataactggcatgtgcaataatagatgcggctggctgggagtggctgcgggcactgggctcagagaagccagtagaacacctcaagcaagtaggtgtcagcgccccgtgctcccttgtcggcgctcccctacactaggagcctcaaaccgggccttcgtccggtggctccctgccgagtatgaggacggctttagccttccctacgggtggacgccgggcgtgaaacgcaatggcttcccggtggcactagcacgtgccgtgagcaacgagattgtgcgctttcccaccgatcagctcactccggatcaagaacggagcctgatgttcatgcagtggggccagctgctggaccacgacctggactttacgcctgagccagccgcaagggcctcatttgtcacaggggtgaattgcgaaaccagctgtgtgcagcaaccaccctgttttcccttaaagattccacctaacgatccccggatcaaaaatcaagctgattgcatacctttttttcggtcatgtccagcctgccccggaagcaatattacgatccgaaatcagattaatgcgctgaccagttttgtggacgctagcatggtatacgggagcgaagaaccattggcaaggaatctgaggaatatgtctaaccagttagggctgttggcagttaaccagaggtttcaggacaacggacgagcccttctgccttttgacaacctccacgacgacccttgtctcctgaccaataggtctgctcggattccttgtttcttggcaggcgacaccagaagctctgagatgcctgaattgacatcaatgcatacacttctgctaagggaacataatagattagcaacagaactaaagagcttaaatcccagatgggatggtgagagactgtaccaagaggcgaggaagatcgtgggtgcgatggtccagattatcacctatagagattacctccccctggtcttaggtccaaccgcgatgcggaagtaccttccaacatataggagttataatgactccgtcgatccccggatcgcaaatgtgttcaccaatgcttttaggtatggacacacgctcattcagccgttcatgttcaggctagataatcgctatcagccaatggaaccaaacccgagagtcccgttatcaagagtgtttttcgcgtcctggcgcgtggttctggaggggggcattgaccccatcttgcgcgggctcatggccacacctgccaaactgaatcgccagaaccagattgccgtcgatgaaatccgtgagcggcttttcgagcaagtcatgaggattggtctcgacctgccagccctcaacatgcaaaggtctcgggaccacggacttccagggtataacgcctggagaagattttgtggtctcccccaaccagagacggtcgggcaattgggaaccgttctcagaaatctaaagctggctcgaaagctcatggagcagtacggaacccctaacaacatcgacatctggatgggtggagtcagcgaaccgctcaagagaaagggccgggtgggcccactgttagcttgcatcattggaacgcagttccgaaagctgagggacggcgaccggttctggtgggagaacgagggcgtttttagcatgcagcagaggcaggcccttgcccaaatctccctgcctaggataatctgcgacaacacaggaattaccaccgtgtcgaaaaataatatattcatgagcaactcctatccacgagatttcgtgaactgtagcacattgcccgcacttaatcttgcatcgtggagagaagcctcctag

SEQ ID NO: 196080 - DNA, 1542 bp, synthetic construct
  misc_feature 1..1542: note = Description of Artificial Sequence: Synthetic coding sequence
  source 1..1542: mol_type = other DNA
atgcccagctgggccctgttcatggtgaccagctgcctgctgctggcccctcaaaacttggctcaggtgtccagtcaagatgtatcccttttagcctccgatagcgaaccgttgaaatgcttctccagaacatttgaagacctgacttgtttctgggacgaggaagaggctgctccttcaggcacctatcagctgttatatgcatatcctcgcgagaaacctagagcttgtcctctgtcttctcagtccatgccccactttggcacccgttatgtttgtcagttccccgatcaggaggaagtacggctcttcttccccctgcacctttgggttaaaaacgtttttctgaaccagacacggactcagagagttctttttgtggattctgtgggcttgcccgcccctcccagtatcataaaagccatgggcggcagtcagcccggcgaactccaaatatcttgggaggaacccgcaccagagataagcgatttcctgcgctacgagctgagatacgggccgcgagatccaaaaaacagcactggacctacggtaattcagctgattgccaccgagacttgttgtccagcactgcagaggcctcattccgcctcagcattggatcaatctccctgtgctcagcccacaatgccctggcaggacggaccaaaacagacctcaccctctcgtgaggcaagcgcattgactgccgaaggtgggtcatgtttaattagcggccttcagcccggcaactcatactggctccaactaaggagtgaacccgacgggattagtttaggcggttcctggggttcttggtctctgccggtcaccgtagatctccctggtgacgcggttgccctggggctgcagtgcttcaccctggacctgaaaaacgttacatgccagtggcaacagcaagatcacgcttcctcccagggctttttttatcacagtagggcacgatgctgcccccgtgatcggtacccaatctgggagaactgtgaagaggaagaaaagactaatccagggctacagactccacagttctcacggtgccacttcaaatcccgcaatgattctatcattcacatcctggtcgaagtgactactgcacctggcacagtgcactcctatcttgggtcccccttctggattcaccaagccgtgcgcctgcctacccctaacttgcattggcgggagatctcgtccgggcatctggaactggaatggcagcaccctagttcatgggccgcacaggagacctgttatcaactgaggtatactggggaagggcatcaagattggaaggttttagaacccccacttggggcaaggggtggcaccctggagttgaggcctagatctcgataccgattgcagttacgggcccgtctgaatggacctacataccagggaccctggtcttcgtggagtgacccaactcgggtggaaacagctaccgaaacagcttggatttctctggtgaccgctctgcacctggttttaggcctgtctgctgtgctgggccttctgctactgtag

SEQ ID NO: 196081 - DNA, 1908 bp, synthetic construct
  misc_feature 1..1908: note = Description of Artificial Sequence: Synthetic coding sequence
  source 1..1908: mol_type = other DNA
atgcccagctgggccctgttcatggtgaccagctgcctgctgctggcaccccagaatctcgcccaggtcagttcccaggatgtaagtctgcttgccagcgatagtgaacctttgaagtgcttcagcaggacatttgaagatttgacatgcttttgggatgaggaagaagccgcgcctagcggaacgtaccagctgctgtatgcttaccccagggagaagccgagagcctgtcctctgtctagtcagtctatgccgcactttggtacgcggtatgtgtgccagtttcccgaccaggaagaggtgcggctgttttttcctctgcacctatgggtgaagaacgtcttcctgaaccagactagaactcagagggtgctttttgtggactcagtcggactgccagcacccccgtccataattaaagcaatgggaggctctcaacccggcgagctgcagattagttgggaggagccagctcccgagatcagcgacttcctgcgttacgaactgcgatacggccccagggatcctaaaaattcaactggcccaacagtgattcaactcatcgccactgagacatgttgccctgctttacagcgccctcactctgcctccgcgctcgaccagagcccttgtgcacagccaacgatgccttggcaagacggccccaaacagacctccccgtcacgggaggctagcgcgctcactgccgaaggtggtagctgcctcatctcaggtctgcagcccggcaattcttattggctccagctaaggtccgagcctgatggcataagtctcggcgggtcttggggttcatggtccctccccgttacagtcgatctgccaggagatgcggtggccctcggccttcaatgcttcacactggacctgaaaaatgtcacttgccagtggcagcagcaggaccatgcaagttcacaaggtttcttctaccactctagagcccgatgctgccctcgcgatcggtatcctatctgggagaattgcgaagaagaggaaaagaccaaccctggtcttcagaccccacagttttcccgttgtcacttcaagtcaaggaacgatagtattattcacatccttgtggaggtgactaccgcgcccggcaccgtccattcttacctcggcagcccgttctggatacatcaggccgtgaggttgcccacaccaaacctccattggagggaaatctcgagtggacaccttgaactagagtggcaacacccttcctcatgggccgctcaagaaacctgctaccagctgcgctataccggcgagggacatcaggactggaaagtgcttgagccccccctgggcgctagaggaggcacccttgaactacgaccgcggagccgttaccgtttgcagctgcgtgcccggctgaatggacccacataccaggggccctggtcttcgtggtctgatcctactagggttgagaccgccacagagaccgcttggatatcgctggtaacagcgctgcacctagttctgggactctcagccgtgctcggactgttattgctccggtggcaattccctgcacattaccgaagattacgacacgcactgtggccatccctgcccgacctccaccgtgtgctaggacaatacctgcgcgatacagctgccctgtcgccacccaaggctactgtgtctgacacctgcgaggaggttgagccctctttacttgagatcttgcctaagtcctcggagagaacacccctaccattatgcagctcgcaagcccagatggattaccgtaggcttcagccttcatgcctgggaaccatgcctctgagcgtgtgtccacctatggctgaatctggatcctgttgcactacccatatcgccaaccacagctacctgccactctcctactggcagcaaccttag

SEQ ID NO: 196082 - DNA, 1650 bp, synthetic construct
  misc_feature 1..1650: note = Description of Artificial Sequence: Synthetic coding sequence
  source 1..1650: mol_type = other DNA
atgcccagctgggccctgttcatggtgaccagctgcctgctgctggctccccagaacctcgcccaagtgagtagccaggatgtgagccttctggcctccgacagtgagcctctgaaatgtttcagccggacattcgaggacctaacctgcttctgggacgaggaggaggcggccccaagcggaacttatcagctgttatatgcttacccacgagaaaaaccaagggcttgtcccctgtccagccagtcaatgccccatttcggaacccgttacgtgtgtcagtttcccgaccaggaagaggtccggttgttcttccccctccatttatgggtgaaaaatgtatttctgaatcagaccagaacacagagagtacttttcgtcgacagcgtaggcttacctgccccaccctcaattattaaagctatgggcggaagccagcctggggagttacagattagttgggaagagccagctccagagatctctgattttctgcgctatgaacttcgttacggacccagagatcctaagaactccacagggccgacagtgatccagctgattgctacagaaacatgctgcccggcgctccagaggccccatagcgcctccgccctagaccaaagcccctgcgctcagccaactatgccctggcaagacggacccaagcagacctcacctagccgggaggcttccgcactaacagctgagggcggctcctgtttaatctctggtctgcagccaggcaacagttactggctgcagttaagatccgaaccagacggcatctcactcggtgggagctgggggtcctggagcctacccgtcacagtggaccttcccggcgatgctgttgccctgggtcttcagtgctttaccctagatctgaagaatgtgacgtgccaatggcagcaacaggaccacgccagctcccagggttttttctaccacagccgggctagatgttgcccaagagatcgctatcccatctgggagaactgtgaagaagaagaaaaaacaaatcccgggttgcaaacccctcagttttctagatgtcactttaagagcagaaacgactccatcattcatatccttgtggaagtgaccactgcacccggtactgtgcacagctaccttggatccccgttctggattcaccaggccgtgaggttgccgacccccaatcttcactggcgggagattagttcaggccacctggaattggaatggcagcacccttcctcctgggcagcccaagaaacctgttaccagctgaggtatacaggggaaggccaccaggactggaaagtcctagagccccccttgggggcacgggggggaacattagaacttaggcctagatcaagataccggctccaactgagagctcgattgaatggtcctacctaccaaggcccctggtcaagctggtctgatccaactcgggttgaaacagctactgagacagcctggatctcactcgtgactgccctgcatctggtgctgggcctcagcgccgtgctggggctattgctcctccggtggcagttccccgctcattaccggtacaggcccaggcaggccggagattggagatggacaaggtggtcacgacgaccagtgaaccgccatagttggtttgcactttag

SEQ ID NO: 196083 - DNA, 2817 bp, synthetic construct
  misc_feature 1..2817: note = Description of Artificial Sequence: Synthetic coding sequence
  source 1..2817: mol_type = other DNA
atgaccctgctgggcagcgagcacagcctgctgatccggagcaagttcagatccgtcctgcaactgcgcctgcaacaacgcaggacccaggagcagctggctaaccaggggattatcccaccacttaaaaggccagctgagtttcacgagcagcgtaagcatctggactctgataaggcaaaaaacagcctgaaacggaaagctcgcaacaggtgcaacagtgccgacctggttaacatgcacatcctccaagcatcgactgccgaaaggtccatacccactgcccagatgaagctgaaaagagcccgactagccgacgatctgaatgagaaaatagctctcaggcctggacccttagagctggtcgaaaagaacatcctgccagtggacagtgcagtaaaagaagcaatcaagggtaatcaggttagcttcagcaagtccacggatgcttttgcatttgaagaggatagctcctctgacggtctctctccagatcagactagatccgaggatccccagaactcagcaggctcacctcctgacgcaaaggcctctgatacgccctccacaggcagccttggaaccaaccaggaccttgcatccggcagcgaaaacgaccggaatgatagcgcctctcagccatcccaccagagcgatgcagggaaacaaggactcggccccccaagcacccccatagcagttcacgccgccgtgaagtccaagtccctgggtgacagcaagaacagacacaaaaaaccaaaggaccccaaaccaaaggtgaaaaaattgaagtaccaccagtatatccctccagaccagaaggcggaaaagtccccacctcccatggattcagcatatgcccgtctgctccagcaacagcagctgttcttgcaattgcaaatccttagccagcaacaacagcagcagcagcacaggtttagttatctaggtatgcaccaagcccaactcaaggagcccaatgaacaaatggtaagaaaccctaacagctctagcactcctctatctaacacaccactgtcgccagttaaaaacagcttttctggacaaactggtgtgagctcttttaagcccggacctctccccccaaatctggacgacctcaaggtgagtgagctacggcagcaactccggattagaggtctacctgtatctggcacaaaaaccgccctgatggaccggcttcggcccttccaggactgtagtggcaaccctgtgcccaactttggggacattacgactgtcactttcccagtgacccctaacaccctgccgaactaccaatcttccagcagtacctccgccctcagtaacggattttaccactttggcagtacctcaagcagcccccctattagccccgccagttctgatctgtcagtggcaggcagcctccctgacacatttaatgacgccagcccgtccttcgggttacatccaagtccagtgcatgtctgcacagaagagtcactgatgtcctctctcaacggtgggtccgtgccatcagagctggatggtcttgattcggagaaggataaaatgctggtcgagaaacagaaggtgatcaacgagctcacctggaagttgcaacaggagcagaggcaggttgaggaactgaggatgcagctccagaaacagaagaggaacaattgtagcgagaaaaaacctctgcccttcttggcagcctctatcaaacaagaggaggctgtgagcagctgtcctttcgctagccaagtgcctgtgaagagacagtcatcaagcagcgagtgtcatccgcccgcatgcgaggctgcccagttacagccattggggaacgcacactgcgtcgaaagctcggatcaaacaaacgtcttaagtagcacttttttatcaccacagtgctcgcctcagcattctccacttggcgctgtcaaaagcccgcaacacattagcttgcccccctcaccaaacaacccacacttcttaccctcatcctcgggtgctcagggcgaaggccaccgagtatctagtccgataagcagtcaggtttgcaccgcccagatggctggcctccactcaagtgacaaggtgggtcccaagttcagcattcctagtcctacattctcaaaaagctccagtgctattagcgaggttacccaaccaccctcctacgaagatgctgtgaaacagcaaatgacccgaagccaacagatggatgagctgttagatgttctcatcgagtccggcgaaatgcctgccgacgctagggaggaccactcttgcttgcagaaagttccgaagatccctagatccagtagaagccctaccgccgttctaaccaagccgtcagccagttttgaacaggcttcctccggttcacaaatccctttcgacccttacgccacagacagcgacgagcacttagaagttctcctcaattcccaaagtcctcttggaaagatgtcggatgtgaccctgctgaagattggttccgaggaaccccactttgatgggatcatggatggtttcagcgggaaggccgcagaagatctgttcaatgcccatgaaattctgcctggacctctgtccccaatgcagactcaatttagtcccagttcagtagatagcaacggcctgcaactatcatttacagaatctccttgggagactatggagtggttggacttgacgccacctaattcaaccccgggcttttcagctctcaccaccagcagtccctccattttcaacatcgactttctggacgtgaccgatctgaacttgaacagtagcatggatctccatttgcagcagtggtag

SEQ ID NO: 196084 - DNA, 1989 bp, synthetic construct
  misc_feature 1..1989: note = Description of Artificial Sequence: Synthetic coding sequence
  source 1..1989: mol_type = other DNA
atggacagcgcctacgcccggctgctgcagcagcagcagctgttcctacaacttcagattctgagtcaacaacagcagcagcagcagcatcgattcagctacctgggaatgcaccaggcacagctgaaggagcctaatgaacagatggtaaggaacccaaactcctcctccactccactttccaacacaccgctctcaccagtgaagaatagtttcagcggacagacaggagtgagctcattcaaacctggacctctgcccccgaacttggatgacctaaaggtaagtgagttacggcagcagcttcggatcagagggttgcccgttagtggcaccaaaacagccctgatggatcgcttgaggccctttcaggactgcagtgggaatcctgtcccaaatttcggtgatataaccacagttacttttcccgttacaccgaacaccctgcctaactaccagtcgtcctcttctaccagtgcactgagtaatgggttttatcacttcggaagtacatctagtagccctccgatctcgcctgcaagtagcgatctgagcgtcgcaggaagtcttcccgatacgtttaacgatgctagcccaagtttcgggctacatccgtcacctgtgcatgtgtgtaccgaagaaagtctcatgtcctctctgaatggtggatcagtccccagcgaattggacgggttggattctgaaaaggataagatgctggtggagaaacagaaggttataaacgagctcacatggaaactccaacaggaacaaaggcaggtggaagagcttagaatgcaactccaaaaacagaagagaaacaattgttccgaaaaaaagccgctacctttccttgccgctagtattaaacaggaggaagcagtgtcatcgtgtccattcgcttctcaggtgcccgtcaaacgccagtccagctcatctgaatgtcatcctccagcatgtgaggcagcgcaacttcagcccctgggcaatgcccattgcgtcgagtccagcgatcaaacaaatgttctctcaagcacatttctttcaccacagtgcagtccgcagcatagcccactgggggccgtaaagagcccgcagcacatttccttaccaccttcccccaacaatccacacttcttaccctccagctccggcgcgcaaggagaaggacaccgggtgagttctccaatcagtagccaagtatgcaccgcccaaaactccggtgcgcacgacggtcatccacccagtttctctccccactcttcatccttgcatcctccattttccggtgcgcaggcagacagtagccatggcgccggtggtaacccttgccctaaatcaccctgcgttcagcagaagcagatgacgcggagtcaacaaatggacgagctgctagatgtactgattgagagcggagagatgccggctgacgcccgtgaagaccattcttgcttgcagaaggtccctaaaattcccaggtcttccagaagtcccaccgcagtacttaccaaaccgtctgcctcattcgagcaagcctcgtcggggtctcagattcccttcgatccatatgccacagattccgacgagcacctggaggtccttttaaattcgcaatccccactgggcaaaatgtccgatgtgactctgttaaagattgggagtgaggagccgcattttgatggaataatggacggcttttcagggaaagccgccgaggacttgtttaatgcccatgagatcctgcctggccctctctccccgatgcagacacagttcagcccaagttccgtggactccaacggcttacaactgagcttcacagagtccccctgggagactatggaatggctagacctcacgccccctaactcaacccccggcttttctgccctgaccacaagctccccctctatcttcaacatcgacttcctggacgtgaccgatcttaatttaaattcttccatggatcttcacttgcagcaatggtag

SEQ ID NO: 196085 - DNA, 2055 bp, synthetic construct
  misc_feature 1..2055: note = Description of Artificial Sequence: Synthetic coding sequence
  source 1..2055: mol_type = other DNA
atgaagctgaagcgggcccggctggccgacgacctgaacgagaagatagctttgcgtccgggccctttggagctagtcgagaagaacatcctgccagtggattctgctgtcaaggaggccatcaagggaaatcaagtttcatttagtaaatccacagatgcttttgctttcgaagaggacagcagttctgacggtctttcgccagatcagacccgcagcgaagatccacagaacagcgctggatcccctcccgatgcaaaagcatctgacacgccaagcacggggtctctcggcacaaaccaggatctagcatcgggatcggaaaatgatcggaacgactccgccagccagccttcccaccaaagcgatgcagggaaacaggggctgggtcctccttccactcccatcgctgtgcacgctgccgtgaagtctaaaagcctcggggactctaaaaaccggcataagaagcccaaggatcccaagcctaaagtgaaaaagctcaagtatcatcaatacatcccacccgaccagaaagcagagaagtctcctccaccaatggacagcgcatatgcacggctgctgcagcagcagcagctgtttctgcagctgcagatcttaagtcagcaacagcaacagcagcagcacaggttttcttatctgggaatgcatcaggcacagctcaaggagccaaacgaacagatggtaagaaaccccaactcaagcagtactcccctcagtaataccccactcagtcccgttaaaaattcattctccggccagacaggagtgagcagttttaagcccgggccactcccgccgaatcttgacgacctgaaagtcagcgaattgagacagcaactgaggattaggggtctccctgtatcgggaacaaagactgctcttatggatcggctgaggccatttcaggattgttcgggaaaccctgtgccaaattttggagacatcacgaccgtgaccttcccagtgacacctaataccctgcctaattaccagtcgtcaagcagcacctccgcattgtccaacgggttctaccacttcggctcaacctcttcaagcccacccatctctcccgccagttccgatctgagtgtcgctggaagtttgcctgacactttcaatgacgcttctccatcttttggtctgcacccaagcccagttcatgtctgcacagaggagtccttgatgagtagcctgaatggggggtcggtacctagtgagcttgacgggttagattctgagaaagacaaaatgctcgtggagaagcagaaggtcattaacgagctcacctggaagctccaacaggaacagagacaagtggaagaactccgaatgcagctgcagaaacagaagcgaaataattgctctgaaaaaaaaccgctgccattcctggcagcctcgatcaaacaggaagaggccgtgtctagttgcccatttgcctctcaggtgccagtgaagcggcagtcatcgtcaagtgagtgccacccacccgcatgtgaagcggcccagcttcagccattgggaaatgctcattgtgtagaatccagtgaccaaaccaatgttttgagtagtaccttcctgtctccccagtgctcaccacagcattcccccctaggagccgtcaaatcccctcagcatatctcactgccaccatcccccaataaccctcatttcttaccctctagctccggcgcccaaggtgaaggtcatcgtgtgtcaagtcccatcagttcccaggtctgcaccgcccaaaacagcggtgctcatgatggacaccccccatccttctccccacatagctcttctctgcacccccctttctctggggctcaagccgactcctcacacggcgctggcgggaacccctgccctaaaagcccttgcgtacagcaaaaaatggctgggctgcattcttcagataaggtgggtcccaagttctctatcccgagccccactttctctaaatcctctagcgccataagtgaggtgacacagcccccttcttatgaagacgcagtgaagcaggtcaccatgtag

SEQ ID NO: 196086 - DNA, 2961 bp, synthetic construct
  misc_feature 1..2961: note = Description of Artificial Sequence: Synthetic coding sequence
  source 1..2961: mol_type = other DNA
atgaccctgctgggcagcgagcacagcctgctgatccggagcaagtttcgatccgtgttacagttgaggctgcagcaacgccgaacacaggaacagttagcaaaccagggaataatcccgcccttgaagcgacctgccgagtttcacgaacagaggaaacatctggactctgataaggcaaagaactctctgaaacgaaaggctaggaaccgctgtaacagcgccgatctggtgaacatgcatatcttgcaagcctctaccgctgagagatctatccctactgcccagatgaagttgaagcgggcacgactggctgatgatttgaatgagaaaatcgcactgagaccagggccgctggagctggtggagaaaaacatcctgcccgtcgattctgccgtgaaggaagccattaaggggaaccaggttagcttcagcaagtcaactgacgcgttcgctttcgaagaagatagctcctcagacgggctaagtcccgaccagacaagatccgaagaccctcaaaactcagctggatcccctcccgacgctaaggcatccgacacaccttcaaccggcagtttaggcacaaaccaagatttggcctccgggagtgagaacgataggaacgatagtgccagccagccttcacatcagtccgacgccggaaagcagggtctgggccctcctagcaccccgatcgcggtgcatgcagccgttaaatctaagtcactcggggacagcaaaaacaggcacaaaaagccaaaggatccaaaacctaaagtcaaaaaactgaaatatcaccagtacattcctcccgatcagaaggctgaaaagagcccaccaccaatggacagcgcatacgcacgactgctccagcaacagcagttgttcctccagctccagattctgtcccaacagcagcaacagcaacagcatcggttctcctacctcggcatgcaccaagctcagcttaaggagcccaacgaacaaatggtgagaaaccccaactctagctccaccccgctctcgaacactcccttatcccccgtcaaaaattcgttcagcggtcagactggagtttcttctttcaagccagggccactgcccccaaatctggacgacctaaaagttagtgaactgcggcagcagctgagaattcggggattgcccgtctccggaacgaagactgctctcatggataggctgcggcccttccaggactgttcaggaaaccctgttcctaactttggggatatcaccacagtgacttttcctgtgacccccaacaccctccctaactaccagtcttcctcatctaccagcgcccttagcaacggcttttatcatttcgggtcgacgtcgagcagccctccaatctcccctgcctcttccgacctctccgtggccggcagtcttccagacacttttaacgacgccagcccctcctttggacttcacccctccccagtgcacgtctgcacggaagagtccctcatgtccagccttaatggtggatctgtgccatccgagcttgacggactggactcagagaaagataaaatgttagtggaaaaacagaaggtaatcaatgaactcacttggaagctgcagcaagaacagcgccaggtcgaagaactgcgtatgcaattgcaaaaacagaaacgcaataactgttccgagaagaagccactgccatttctggccgcgagcatcaagcaggaggaggcagtgagcagctgcccatttgccagccaggtgcccgtcaagagacaaagctcgagctctgaatgccacccgccagcttgtgaggccgcgcagctgcagccgttggggaacgcacattgcgtcgaatcttctgaccagacaaatgtgctttcctccacgtttctgagtcctcagtgctctccacagcatagccctcttggcgcagtgaagagtccacaacacatcagcctacccccttcccccaacaatcctcatttcctgccttccagtagcggggctcagggggaggggcaccgcgtgtcctcccctatctccagtcaggtgtgtaccgctcagaactccggcgcccacgacgggcatcccccaagcttctcccctcattcctcatccttgcatccacctttttctggcgcccaggctgatagctcacatggggccggcggtaacccgtgtcccaagtccccttgtgttcagcagaaaatggccggccttcacagttcggataaggtcggacctaaattcagcatcccctctcccacgttctctaagtcttccagtgccatttcagaggtgacgcaacccccatcatatgaagatgccgtgaaacagcagatgacgaggtcacaacagatggatgaactactggacgtgctcatcgaaagcggagagatgcccgctgatgcccgggaggaccacagctgccttcagaaagtacccaagatcccacggtcaagccggagcccgacagccgttctgaccaaacccagcgcctccttcgagcaggcttcttccgggtctcaaattccctttgatccctacgccactgactcagatgagcacttggaggttctgctcaactctcagtccccgcttgggaagatgtctgacgttacacttttaaaaatcggctcagaggagccgcatttcgatggtatcatggatggcttttcaggcaaggccgccgaagacttgttcaacgctcacgaaatcttacctggtcccctatcgcccatgcagacccagtttagccctagtagtgtggatagtaacggactccagctgtctttcacagagagcccctgggaaaccatggaatggctggatctcacaccacctaactcaactcccgggttttcagcattgacgacttcttcaccatctattttcaatatagacttcctagatgtgacggacctcaatctaaactccagtatggacctccacctgcagcagtggtag

SEQ ID NO: 196087 - DNA, 1947 bp, synthetic construct
  misc_feature 1..1947: note = Description of Artificial Sequence: Synthetic coding sequence
  source 1..1947: mol_type = other DNA
ttcctgcagctgcagatcctgagccagcagcagcagcagcagcagcaccgcttttcgtacctgggcatgcatcaggctcagctcaaagaaccgaatgaacagatggttcggaaccctaacagcagcagtacacccctgtcaaatacccctctaagtccagtcaaaaacagcttctccggacagaccggcgtgtcatcttttaagcctgggcctcttccgcctaatctggatgatttgaaggtttccgagctacgccaacagttacgtatccgtggcttgcccgtgagtggtaccaaaacggcattgatggataggttacgccccttccaggattgctccggtaatccagtgcctaattttggggacattactactgtgacctttcctgtcacccctaacaccctgccaaactatcagtcatcttcctccactagtgccctttctaatggattctaccatttcggctccacctcctctagccctcccataagcccagcttcctccgatttatccgtcgcagggagcttacctgacacattcaacgatgcgagcccctccttcgggctgcaccctagccccgtgcacgtgtgcacagaggagagcctcatgtcctccttgaatgggggctccgtgcctagtgaactggacggtctcgacagcgagaaagataaaatgctcgttgaaaagcagaaagttattaatgagcttacatggaagctccagcaggaacagaggcaggtcgaagaacttagaatgcagctgcagaagcaaaagaggaacaactgttctgagaagaagcccctcccatttctggcagcatcaattaagcaagaggaagccgtgagcagctgcccttttgcaagccaggtcccggtcaagcgtcagagctcatcctccgaatgccatcctccagcttgtgaggcagcacagctgcagcccctgggtaacgctcattgcgtggagtctagtgaccaaaccaacgtcctgagctccacctttctgagcccacagtgttcgccacaacactcacctctgggggctgtcaagtcgcctcagcacatctccctgcctccaagccctaacaatccacatttcctgcccagctcttcaggcgcccagggcgaagggcaccgggtttcctccccgatcagttcccaggtgtgcaccgcacagaacagcggagctcacgacggacacccacctagtttcagtcctcattcctcctcccttcatcccccctttagcggagcccaggccgacagtagccatggtgctggcggaaatccctgtcccaagagtccctgcgttcagcagaaacagatgacgcggagccaacaaatggatgagctcctagacgtgcttatagagagcggagaaatgcccgcggatgctcgagaagaccattcgtgcttacagaaagtccctaagatccctcggtcctcccgaagccctacggctgttctgacgaaaccatcagcatctttcgagcaggctagttcaggcagccagatcccgttcgatccctatgctaccgactcggatgaacacctcgaggtgctccttaatagccagagccccctgggcaagatgtcagacgtgaccctccttaaaataggctccgaagaaccgcacttcgacggcattatggacggatttagcgggaaggccgctgaggacctttttaacgcccacgaaattcttcccggccctctgtctcctatgcagacccaattctctccttccagcgtggattcaaacggactgcagctgagcttcaccgagtccccgtgggaaaccatggagtggctggacttgactccacctaattccacgcctggattctccgccctgactacctcttccccttctatcttcaacatagattttctggatgttaccgaccttaacttaaacagctcaatggacctgcatctgcagcagtggtag

SEQ ID NO: 196088 - DNA, 1515 bp, synthetic construct
  misc_feature 1..1515: note = Description of Artificial Sequence: Synthetic coding sequence
  source 1..1515: mol_type = other DNA
atgcggttcttctgcgcccggtgctgcagcttcggccccgagatgcctgccgtccaattgctcctgctggcctgtctcgtgtgggacgttggcgcccgtactgcgcagctacggaaagccaatgatcagagcgggcggtgtcagtatacatttagtgtggcctcgccaaacgaaagctcatgccccgagcaatctcaggccatgtcagtgattcacaatctgcagagagattcgtccacgcaaagactggacctcgaggctaccaaggctcggctttcgagcctcgaatccttactgcatcagctcactctggatcaggccgcccgtcctcaagagacccaggaggggctccaaagagaactcggcaccctccgccgggaaagggatcagctagaaacccagactcgagagcttgaaactgcctattctaaccttctgcgcgacaagagtgtactcgaggaggagaagaaaagactgcgtcaggagaatgaaaatctcgccaggaggcttgagtcttcaagtcaggaggttgctcggcttaggcggggacagtgccctcaaacacgcgatacggcgcgggctgtaccaccaggatctcgtgaagtgtcgacctggaacctggacacgctcgcgttccaggaactgaagagcgaactgaccgaggtcccggcttcgcgaatcctcaaggagagtccatccgggtatctgcgcagcggggaaggagacacaggctgtggggaactcgtatgggtgggtgagcccctgaccctccggaccgcagaaacaatcaccggcaagtacggcgtctggatgcgcgaccccaagccaacctacccatacactcaggaaactacctggcgaatcgatacagtaggcacagatgtgagacaggtgtttgaatacgacttgatttctcagtttatgcagggctaccccagtaaagtgcatattctgccgagacctttagaaagtaccggcgccgttgtttatagtggcagcctctactttcagggcgctgagtcacggacagttattagatatgaattgaataccgaaactgttaaagccgaaaaagagattcctggagctggctatcatggccagtttccctattcatggggcggctacactgacatcgacctcgccgtggacgaagccggactctgggtcatatattccaccgatgaggctaagggcgccattgtgctttccaagttaaatcctgagaatcttgaactggaacaaacttgggagaccaacatccgcaaacagtccgtggccaacgcattcataatttgcggcacactgtacaccgtgtccagctatacctccgcagatgccactgtcaacttcgcttatgacaccggcacaggcatttctaaaacacttacaatccctttcaagaataggtataaatacagcagcatgatcgattacaaccctctggagaaaaaactgtttgcttgggataacctcaatatggtgacttacgacatcaaactgagcaagatgtag

SEQ ID NO: 196089 - DNA, 1374 bp, synthetic construct
  misc_feature 1..1374: note = Description of Artificial Sequence: Synthetic coding sequence
  source 1..1374: mol_type = other DNA
atgcggttcttctgcgcccggtgctgcagcttcggccccgagatgcccgcggtccagctcctactgctggcatgtctcgtgtgggacgttggcgcgaggacagcacagctgcggaaggctaacgatcagtcaggcaggtgtcaatatactttttctgtagcatctccaaacgaaagctcgtgcccggaacaatcacaggcaatgtctgtcatacataatctccaaagagatagttcgacccaacggctggacctggaggctaccaaggcccgcctgagttctttggagtcacttttgagggataagagtgtactagaagaggaaaaaaaacggttacggcaggagaacgaaaatctggctcgaaggctggaatctagtagccaggaagtggccaggctgcgcagaggacagtgccctcagacacgggacacagcaagagcggtacctccaggcagcagggaagtaagcacctggaatctggatacacttgccttccaggagctaaaaagtgagctaacagaggtgcccgcttcacgaatcctcaaggaatcccccagtggttatcttcgcagcggggagggtgatacaggatgtggtgagctcgtgtgggttggggagcccctaacactgaggacggccgaaacaataactgggaagtatggggtgtggatgagggaccccaagccgacctatccctatacccaagagacaacctggcgtatagatacagtggggactgacgtgagacaggtatttgagtacgacctgatctctcagtttatgcaggggtatccctccaaggtccatatcctgcctaggccattagaatcaactggcgcggtggtttattctggcagcctgtactttcagggcgctgagagtagaactgttatacgctacgagctcaacactgaaactgtaaaagctgagaaggagattcccggcgccgggtaccacggccagtttccctactcatggggcggctacactgatatcgacctcgccgtggacgaggccggcctctgggtgatctactccaccgacgaagcaaaaggcgctatcgtgctgagcaagctgaatccagaaaacttagaactcgagcagacgtgggagacaaatatacgaaagcagagcgtcgccaatgcctttattatttgtggaaccctgtacaccgtgtccagctatacctctgccgacgctaccgtgaatttcgcttatgatacaggaactggcatatccaagaccctgacgatcccattcaagaataggtacaagtattccagcatgatcgactacaatccgctcgagaaaaaactgttcgcctgggacaatctcaatatggtgacctacgatatcaaactttccaaaatgtag

SEQ ID NO: 196090 - DNA, 1314 bp, synthetic construct
  misc_feature 1..1314: note = Description of Artificial Sequence: Synthetic coding sequence
  source 1..1314: mol_type = other DNA
atgagcgtgatccacaacctgcagcgggacagcagcacccagcggttagacttggaagctaccaaggctagactgagcagtttagagagtctgcttcaccaactgacacttgatcaggctgcccgaccccaggaaactcaggagggcctgcagagggaattgggaacactgaggagagaacgcgatcagttagagacgcagacccgagagctggagaccgcctactctaatcttttgcgtgataaaagcgtactcgaggaagagaaaaagcgcctgagacaggagaacgagaatctagcgcggcgactcgagtcatcaagccaagaggtggctcgactcagacgcggccaatgtccacagactcgcgatacagccagagctgtgcctccgggtagtcgggaggtgtctacttggaacttggatacactggcatttcaggagctgaaaagtgaattaacggaggtaccggccagccgcattcttaaagaatccccctctggctatctccgaagcggggagggtgatacggggtgcggcgaacttgtgtgggtgggagagcccttgactctccgcaccgctgaaacaatcactggcaagtatggcgtctggatgcgcgaccctaagccaacctatccttacacccaggagactacatggcggatcgataccgttgggacagacgtaagacaagttttcgagtatgacctcattagtcagttcatgcaggggtaccccagcaaggtacacattctaccccgccctctcgagtctaccggggcagtggtgtatagcggctctctgtactttcagggcgcagagagtcgtaccgtgatccggtacgagctgaatactgagaccgtcaaggctgagaaggaaatccccggtgctgggtaccacggacagttcccatattcatggggaggctacacagatattgacctggcagtggatgaggccggcctctgggttatttacagcactgacgaggccaagggggccatcgtgctgtcaaagttgaatcccgaaaatttagaattggaacaaacctgggagacaaacatcaggaagcagagtgtggcaaacgcatttatcatctgcggcacactgtataccgtctcctcttacacatccgccgatgctacagttaactttgcatatgatacaggaacgggcatctctaagaccttaactattccatttaaaaaccgttataaatatagctcgatgatcgattacaaccctcttgagaagaagctattcgcttgggataatctgaacatggtcacttacgacatcaaactgagtaaaatgtag

SEQ ID NO: 196091 - DNA, 1035 bp, synthetic construct
  misc_feature 1..1035: note = Description of Artificial Sequence: Synthetic coding sequence
  source 1..1035: mol_type = other DNA
atgcggttcttctgcgcccggtgctgcagcttcggccccgagatgcctgccgtgcagctcctgctgctcgcttgcctagtgtgggacgttggcgcccgaactgcccaattacggaaggcaaacgaccaatccggacggtgccagtacaccttcagcgtcgcttcccccaacgagtcaagctgtcctgaacagtcgcaagctatgagtgtcatccataacttgcagagggactcttcgactcagaggctggatttagaggcaactaaagcccgcttatcttccctggaaagcctcctgcatcagctaaccctggaccaggcagcccggccccaggaaacccaggagggccttcagagggaactggggaccctgcggcgtgagcgcgaccagttagaaacccagactcgagagctggagacagcctactcgaacctcctaagggacaagtctgtcctcgaagaagagaaaaaaagactgcgtcaggaaaacgagaatctcgcccggagactggagtcctcctctcaagaggtcgccaggctgagaagaggacaatgcccccagacccgggacacggctagggcagttcctccggggagccgcgaagtgagcacctggaacttggatactcttgcttttcaggaactgaagtcagagttgaccgaagtgccagcaagtcgcattttgaaggaatctcctagtgggtatctgaggtccggagaaggtgatacggggtgcggcgaacttgtgtgggtcggcgaacccctgacactgcggactgctgaaaccattactggtaagtacggcgtgtggatgagagacccaaaacccacttacccctatactcaggagacaacctggaggatcgataccgtggggacagacgttaggcaggttttcgagtacgaccttatctcacagttcatgcaggggtatcccagcaaggtgcacattctccccaggcccttggagtccaccggcgctgttgtgtatagtgggtccctttatttccgcgctcttagtccagaacttagctag

SEQ ID NO: 196092 - DNA, 1521 bp, synthetic construct
  misc_feature 1..1521: note = Description of Artificial Sequence: Synthetic coding sequence
  source 1..1521: mol_type = other DNA
atgggccggaagaagatccagatcacccggatcatggacgagcggaacaggcaagtgacttttacaaagagaaaattcgggctgatgaaaaaagcctatgaactcagcgtgctctgcgattgcgagattgctctcatcatttttaacagctcaaacaagctcttccagtacgcctccacagacatggacaaggtattactgaaatacaccgaatataacgaacctcatgaatcccggaccaactccgatattgtggagacacttagaaaaaaggggttaaatggatgcgaatctcctgatgccgatgactacttcgaacacagtccattgtctgaagatagattcagcaagttgaacgaagactcggacttcatcttcaaacgtggacccccgggcctgcctcctcagaacttcagcatgagcgtcaccgtgcccgtaacttcacccaacgccctatcatacacaaatccgggttcgtcccttgtgagtccatcattagcagcgtcatccaccctcactgattcttcaatgcttagtcctccccagaccactctccatcgcaatgtttccccaggcgcccctcagcggccccctagcacgggcaacgctgggggcatgttgtcgacaaccgacctgacggtgcctaacggcgccggatccagtcccgtaggcaacggcttcgttaatagccgggcctctcctaaccttatcggcgctactggggccaactccctcggcaaagtgatgcccaccaagagcccccctccgcctggagggggaaatctcggcatgaacagccgcaagccagacctgcgggtagtaattcccccatcctccaaaggaatgatgccacccttgtatctcaaaaggcagctgaatacgaataatacccagaggatcagtagcagccaggcaacacaacctcttgctactcctgttgtctctgtgactaccccttcgttgccacctcaggggctggtctactctgcaatgcccacagcctacaatacagactactctctcacctcagcagatctgtctgcactgcaggggttcaatagccctggcatgctgtcgctaggccaagtctctgcctggcaacagcatcacttagggcaggccgccctctccagcctcgtcgcggggggacaactgtctcagggcagcaatctttctatcaatacaaatcaaaatatatccataaagagtgagcctataagcccgccaagggatcgcatgacaccctccggatttcagcagcagcagcagcagcaacagcaacaacagccaccccctcccccccagccacagccacaacctcctcagccccagccccggcaggaaatgggacgctcccctgtggacagcctctccagctcgtcctcttcctacgatggatccgacagagaggatcctagaggcgattttcacagtccaattgtcctgggccgccctcccaatactgaggaccgggaatcaccgagtgtcaagcggatgcgaatggatgcttgggtgacttag

SEQ ID NO: 196093 - DNA, 1500 bp, synthetic construct
  misc_feature 1..1500: note = Description of Artificial Sequence: Synthetic coding sequence
  source 1..1500: mol_type = other DNA
atgggccggaagaagatccagatcacccggatcatggacgagcggaacaggcaggtaacttttacgaaaagaaagttcggcctgatgaagaaggcttatgaattgtccgtactgtgcgactgcgaaatagccttaatcatttttaactcttcaaacaaactgttccagtatgcgtctaccgatatggacaaggtgctgctgaagtatacagagtacaacgagccccacgagagccgcaccaattccgacatcgtggaggctttaaataaaaaagaacataggggatgcgacagtcctgaccctgacacctcttatgttctgactccccacacagaggagaaatacaaaaaaattaatgaggaattcgacaacatgatgcgcaatcacaagattgccccaggtctaccaccccagaatttcagcatgtcggtgacagtgcctgtgacgagccccaatgcattgagttacacaaaccccggctcttctctggtgagcccttctctagcagcctccagcacacttaccgacagtagcatgctgtcgcctccacagaccaccctgcaccgcaacgtctcccccggcgctcctcagcgtccaccatcaactggcaatgcgggggggatgctcagcacgaccgacctcacagtacccaatggagccggtagtagccccgtcggtaatgggttcgttaactcacgggcgagccctaacctgatcggggctactggcgctaactcactcggtaaagtgatgcctaccaagtctccaccccctcccggaggaggcaatctgggaatgaactcgagaaaacctgatctgcgggtggtgatcccacccagtagtaaggggatgatgccgcctctgaacactcaacggatctcttccagccaggctacacagcccctggccactccggttgtatctgtgacaactccctctttacccccccagggactggtctattctgcaatgcctacagcctataataccgactactctttgacaagtgctgacctgtcagctctgcaaggattcaactcccccggtatgctgtctctcgggcaggtctctgcgtggcaacaacaccatctggggcaggcggccctctccagtttagtggctggaggacaactgtcacagggctccaatttaagcatcaacacgaaccaaaacatatccataaagtctgagcccatttcaccaccaagagaccgtatgacaccttccggcttccagcagcagcagcagcaacagcagcagcagcaacctcctcctccaccacagcctcagccccagcccccacagccccagcccaggcaggaaatgggcaggagccccgtggatagcttatcctcttcttcctcatcctatgacggaagtgaccgggaagaccctcgcggtgattttcactcaccaatcgtgctgggccgaccacctaacactgaggatcgggagagcccatctgttaaacgcatgcgaatggatgcctgggtgacctag

SEQ ID NO: 196094 - DNA, 1290 bp, synthetic construct
  misc_feature 1..1290: note = Description of Artificial Sequence: Synthetic coding sequence
  source 1..1290: mol_type = other DNA
atgggccggaagaagatccagatcacccggatcatggacgagcggaaccgccagacactgcggaagaaaggactgaatggatgcgaatcacctgacgcagacgattacttcgagcacagccccctttcagaggaccgtttttcaaagctgaacgaagattccgactttatctttaaaaggggccccccaggcctccccccccagaattttagtatgtctgtcacagtcccagtgacatctccaaacgctttgtcctacaccaaccccgggtcaagcctcgtcagtccatctctggcagcgagctcgactctcacagacagttctatgctgtcaccccctcagacaacacttcaccgcaacgtaagtccaggggcgccacaaaggcctcctagcacagggaatgcaggagggatgctgtctactaccgatctcacagtgccaaacggggctgggtcatcgcctgtggggaatggtttcgtgaattctcgagcctctcccaatctgataggcgctaccggagctaatagtctgggcaaggttatgcccaccaaatccccacccccgcccggcggggggaacctgggcatgaatagcaggaagcctgaccttcgggttgtaatacccccctcaagtaaagggatgatgcctccattgaatacgcagaggatctcgtcttctcaggccacgcagccccttgccacacctgtggtcagtgtgaccacaccctcgcttcctcctcaggggttggtatacagcgctatgcccactgcctacaacaccgactactccctaacctccgctgatttgtccgcgttacagggcttcaactcaccggggatgctgtctcttggacaggtttcagcgtggcagcaacatcacctcgggcaagccgccctctcttccctagttgccggaggccagctgagccagggctctaacctcagcataaacacaaatcagaatatctcaataaagtccgagcctatttcccctcctcgggatcgcatgaccccaagcggctttcaacagcaacaacagcagcaacagcagcaacagccccctccaccaccccagccacagccccagcctccccagccgcaaccgaggcaggaaatggggcgcagccctgttgatagcctgagttcgtctagctcttcatatgatggctcagatcgagaagatcctagaggcgacttccatagccccattgtgctcgggcgcccccctaatacggaagaccgggaaagcccctcggtcaaacgtatgagaatggacgcctgggttacttag

SEQ ID NO: 196095 - DNA, 1494 bp, synthetic construct
  misc_feature 1..1494: note = Description of Artificial Sequence: Synthetic coding sequence
  source 1..1494: mol_type = other DNA
atgggccggaagaagatccagatcacccggatcatggacgagcggaataggcaggtgacgtttactaaacgcaaattcgggctgatgaaaaaggcctacgaactgagcgttttgtgcgattgcgagatcgctctaatcatctttaattcctctaacaagctgttccagtacgccagcacagacatggacaaagtcctgctgaagtacacagaatacaacgaaccccacgaatctcgaaccaacagcgacatcgtcgagaccctgagaaagaagggcttgaatggatgcgagtcccccgacgctgatgactatttcgaacattcgcccctgagcgaggacaggttcagcaagctcaacgaggattcagacttcatattcaaacgtggtccccctggactgccaccacagaacttttcaatgtctgtcacggttcccgtgacaagtcccaacgctttgtcctatacaaacccaggcagctctctagtgagtccttctctggcagcgtcatccaccctcacagattcatcgatgctctcacctcctcaaacaacactgcaccggaacgtttcacctggggctcctcagcgcccaccctctacgggtaatgcgggcggaatgctgagtaccacggatttaacagttccaaacggggccggaagctcacccgtgggaaacgggtttgttaattcacgggcgagccccaacctgattggggccacgggagccaactccttagggaaagtgatgcccacaaagtccccccccccacctggtgggggtaacctcggaatgaactcacgtaagcctgaccttcgggtcgtcatccctccttcctcaaaaggaatgatgccccctttgaatacccagcgcatctccagttctcaagctacccagcctctggccactcccgtagtcagcgtgaccacgccgagcttaccaccccagggactggtttattctgccatgccaaccgcatataacacagattatagtctgaccagcgctgacctctccgcattgcagggatttaactcccctggcatgttaagcctgggccaggtgtccgcctggcaacagcatcatctgggccaggctgccctctcttctctggtcgccggaggccagctgtcccaggggtcaaacctgtcaattaatactaatcagaacatcagcatcaagagtgagcctatcagtccacctcgtgatagaatgacaccttctgggttccagcagcaacagcaacaacagcaacaacagcaacccccccctccaccacagcctcagccccaaccgccgcaaccacagccacggcaagaaatgggaaggagtcccgtcgattctttgtcgagctcatcctccagctacgatggtagcgatcgcgaagaccctcgcggagactttcattctcccatcgtgctgggaagacccccgaacaccgaggaccgtgaaagcccatcagtcaaaaggatgcgaatggatgcttgggtgacctag

SEQ ID NO: 196096 - DNA, 1494 bp, synthetic construct
  misc_feature 1..1494: note = Description of Artificial Sequence: Synthetic coding sequence
  source 1..1494: mol_type = other DNA
atgggccggaagaagatccagatcacccggatcatggacgagcggaatagacaggtcacgtttactaaacgcaagtttggtctgatgaagaaagcatatgaactgagcgtcttgtgcgactgcgaaattgctctcattatcttcaactcctctaacaaactgttccagtacgcgtcaacagacatggataaggtcctgttgaaatacacagaatacaatgagccacatgaaagtcggacaaatagtgacatcgtggagaccctgagaaagaaaggcctcaatggatgcgaatcacctgatgccgatgactacttcgaacactcccccttgagtgaggacagattctccaaactgaatgaagatagcgactttattttcaaacgtggaccgccagggctcccgccccagaactttagcatgtctgttactgtgcccgtgactagccccaacgccctctcgtacaccaaccctggcagctccctggtgagccccagtctggctgcttcgtcaaccctgacggattcctccatgttgtcaccaccccagactactttgcataggaatgtttcccccggtgcaccacagcgtccgcctagcaccggtaatgcagggggaatgttgagcaccaccgatcttacagtgcccaatggggccggaagtagtcctgtgggtaatggcttcgttaacagccgagcttctccgaacctgataggcgctaccggggccaacagccttggcaaggtcatgccaaccaagtccccgccacctcccggaggaggaaacctgggtatgaactctaggaagcctgatttgcgggttgttataccgccgtccagtaagggaatgatgcccccactgaatacacaacggatcagttcctcacaggcgacccagcccctggccactccggttgtgtctgttacaaccccaagccttcccccacagggactggtttattcagctatgccaactgcatacaatactgattattccttgacgagtgctgatctgtcagctttgcaaggcttcaacagtcccggcatgctttcgctgggccaagtgtcagcgtggcagcaacatcacctgggacaagctgccctctccagtttagtggcaggcggccagctgtcccaggggagtaatctctccattaacaccaatcagaacatatcaatcaaaagcgaacccatctcccctccaagagaccgtatgacaccatccggttttcaacagcagcagcaacagcaacagcaacagcagccccccccacctccacagccccagccccagccacctcaacctcagccgagacaggagatgggacggtcccccgtggactccttgtctagtagcagcagtagctacgacggatcggatcgcgaggatcctcgcggggactttcattcccccatcgtgttggggcgcccaccaaacacagaagacagagagtcccctagcgtaaagcgcatgcgcatggatgcttgggtcacttag

SEQ ID NO: 196097 - DNA, 1518 bp, synthetic construct
  misc_feature 1..1518: note = Description of Artificial Sequence: Synthetic coding sequence
  source 1..1518: mol_type = other DNA
atgggccggaagaagatccagatcacccggatcatggacgagcggaacagacaggtcacttttacaaaacggaagtttggtctgatgaaaaaggcatacgaattgtccgtcctgtgtgactgcgaaattgctctgatcattttcaatagctctaacaaactgttccagtatgcatcaacagacatggataaggttctcctaaaatacaccgaatacaacgagccgcacgagagccggactaacagtgatatcgtcgaaactctgcgtaaaaagggccttaatggctgcgagtccccggacgctgacgattactttgagcattccccattatcagaggatcgattttcaaagctcaatgaggacagcgactttatcttcaagcggggccctcctgggctgccaccacaaaatttcagtatgtctgtgaccgtacctgtgacttcccctaatgccctttcctacacgaaccctggaagctcattagtttccccatctcttgccgctagtagcactttgactgattcttcgatgctaagtcctccccagactactctgcatcgcaatgtcagtccaggtgccccccaacgtccgcctagcaccggcaacgccggcggcatgctaagcaccacagaccttactgttccaaacggggccggttcctcccctgttgggaacggcttcgtgaacagccgggcttcacccaaccttataggggccaccggagctaacagcctcgggaaggtgatgccgacaaaatccccgccccctccaggaggcggcaatctgggtatgaactctcgcaagccagacctgcgggtggttattccaccatcaagtaaaggcatgatgccgcccctgtctgaagaagaggagctggaactgaatactcagcggataagtagttcacaggcaacccagccattagccacgcccgtcgtttcggttacaacccccagcttgcctccgcaaggtttggtgtactcagcaatgccaaccgcctacaacactgattacagtctcacctctgcagacctgagcgcactgcaggggttcaactcaccggggatgctgtctctcggccaagtatcagcctggcagcagcaccacctgggccaagccgctctgtccagccttgtggccggcgggcagctgtcgcagggaagtaatcttagcattaatactaatcagaatatttccatcaaatctgaaccaatttctccccccagggacagaatgaccccctcagggtttcagcaacagcagcagcagcaacagcagcagcagcctccgcctccgccccagccccagccgcagcctcctcagccccaaccacgccaggagatgggcaggagccccgtcgattctctgagctcttccagctctagttatgacggctccgaccgtgaggaccctagaggggacttccatagcccaatcgtgctgggccgacccccaaacactgaggatcgagaatctccaagcgtgaagagaatgcgcatggatgcatgggtgacttag

SEQ ID NO: 196098 - DNA, 117 bp, synthetic construct
  misc_feature 1..117: note = Description of Artificial Sequence: Synthetic coding sequence
  source 1..117: mol_type = other DNA
atgggccggaagaagatccagatcacccggatcatggacgagcggaatcgccaggtgaccttcacaaagaggaaattcggattgatgaagaaggcttatgaactcagcgtgttgtag

SEQ ID NO: 196099 - DNA, 1314 bp, synthetic construct
  misc_feature 1..1314: note = Description of Artificial Sequence: Synthetic coding sequence
  source 1..1314: mol_type = other DNA
atgggccggaagaagatccagatcacccggatcatggacgagcggaacaggcaaacgttgcgcaaaaaggggctcaacgggtgcgagtcccccgacgcagatgactatttcgagcactcacctctgtctgaagacaggttctccaaactgaacgaggactccgattttatctttaaacgtggcccaccagggctgccaccccaaaatttttcgatgtctgtgacggttccagttacttcgcccaatgcactgagctatacaaaccctggcagttctctggtgtctccatcgctggccgccagttctactctgacagactctagcatgttatcaccaccgcaaacaaccctccataggaatgtgagccccggcgcgccccagaggccaccttcaacaggtaatgctggtggtatgcttagtacgactgacctcacagtcccaaatggggccggctccagccctgttggcaacggtttcgtgaatagccgagctagccccaacctaataggggctacgggggctaactctctcggtaaggtcatgcccacaaaatcaccacccccacctggcggaggtaacctaggcatgaatagcaggaaaccagatctgagagttgttatcccacctagctctaagggtatgatgccacctctgtcagaagaagaagagcttgaattgaacacacagaggattagcagcagccaggcaacacagcccttagctacccctgtagtatccgtgactaccccatccctgccacctcagggactggtgtattctgctatgcccacagcctataataccgactatagcctgaccagtgccgacctttccgcccttcaaggattcaattctcctggtatgctcagtcttggtcaggtatccgcgtggcagcagcaccatctggggcaagctgcactctccagcttagtggcgggcggccagctctctcagggatcaaacctctccataaacaccaatcagaacatatccatcaagagcgagcccatttcccctccacgtgacaggatgacaccaagtggatttcagcagcagcagcagcagcagcagcagcagcaaccccctccccccccccagccccagccccagcccccacagccacaaccacggcaggagatggggaggtcacccgtcgacagtctgtcctccagcagctcttcctatgacggtagtgaccgtgaagaccccagaggcgacttccatagtcctattgtcttagggcgtcctcctaacactgaagaccgggaatcccctagcgtgaaaaggatgcggatggatgcatgggtgacttag

SEQ ID NO: 196100 - DNA, 234 bp, synthetic construct
  misc_feature 1..234: note = Description of Artificial Sequence: Synthetic coding sequence
  source 1..234: mol_type = other DNA
atgggccggaagaagatccagatcacccggatcatggacgagcggaatcggcaggtaaccttcaccaagaggaagttcggtctcatgaagaaggcgtatgaattgtcggtgctatgcgattgcgagatcgcattaattattttcaatagtagcaacaagttgttccagtacgcctccacagatatggacaaggtgctgctgaagtatacagagtacaatgaaccgcatgagtag

SEQ ID NO: 196101 - DNA, 258 bp, synthetic construct
  misc_feature 1..258: note = Description of Artificial Sequence: Synthetic coding sequence
  source 1..258: mol_type = other DNA
atgggccggaagaagatccagatcacccggatcatggacgagcggaacagacaggtcacttttaccaagcgtaagtttggtcttatgaaaaaggcgtatgagttatctgtgctctgcgattgcgaaattgcactgatcatattcaactcaagtaataaacttttccagtacgctagtacagatatggataaggtcctgctcaagtacacggaatataatgaaccccacgagtcaagaactaactcggatattgtgtag

SEQ ID NO: 196102 - DNA, 1107 bp, synthetic construct
  misc_feature 1..1107: note = Description of Artificial Sequence: Synthetic coding sequence
  source 1..1107: mol_type = other DNA
atgggccggaagaagatccagatcagccggatcctggaccagcggaatcgccaggtgactttcaccaaacgcaagtttggactcatgaagaaagcatatgagctatctgtactgtgtgactgtgagatcgctcttattatatttaattccgccaatcgcctatttcaatacgcctctactgacatggacagggtcctactcaagtatactgagtacagcgagccccacgagtcgcgtaccaatacagacatcctggagacactgaagcggcggggaatcggcctggatggaccagaactggaacctgacgaggggccggaggagcccggggaaaaattcaggcggctggccggggaggggggagaccctgcactgccacgcccccgactatatccggccgccccagcaatgccaagtcctgacgtagtgtacggggcactcccacccccggggtgcgaccctagcggactcggagaagccttgcccgcccagtctcgaccctctccttttcgtcccgctgcaccgaaagctggtccacctggcctcgtgcacccactgttctcccccagtcaccttacctccaagaccccgcctcccctctacctgcccacggagggccgccgcagcgacctccctgggggacttgcgggcccacgagggggtcttaatacgtctcgcagcttgtacagtggcctccaaaacccatgttccacggcaactcctgggcctcctctcggatctttcccattcttaccaggcggccccccagagtatggcctaggcgacccaccccctcctccaggcttgctacagccaccaacactggctccctggcaacccagccgcggagatgggccgcccgcggtgagcagccaaccaagtggtggtaggtcattgggagaggagggacccccaactagaggcgcctctcccccaaccccgcctgtctcaatcaagtccgagaggctaagccccgctccggggggtcctggggattttccgaaaacattcccatacccactcctgctcgctcgaagccttgccgaacccctacgccctgggccagccctgcgccggctgcctttggcagacggctggcccaggtag

SEQ ID NO: 196103 - DNA, 894 bp, synthetic construct
  misc_feature 1..894: note = Description of Artificial Sequence: Synthetic coding sequence
  source 1..894: mol_type = other DNA
atgggccggaagaagatccagatcagccggatcctggaccagcggaatagacaggtcaccttcacaaaacgaaaattcggtctcatgaagaaggcctacgagctgtcagtgctgtgtgattgcgaaatagctctcattatatttaattcagcaaaccggctcttccaatacgccagcacagacatggatcgtgtcctgctcaagtacacagaatatagtgagccacatgagtcccgcacaaataccgacattttagaagtcccacagaccttgaagagaagaggaatcgggttggacgggccagagctggagccagacgaaggacctgaggaacctggtgagaagtttcggcggcttgcaggcgaaggcggcgacccggccttaccccggcctcgtctgtatcccgctgccccagctatgcctagtcccgacgttgtttacggtgccttaccccctcccggatgcgatccaagcggtctaggcgaggccctgcccgctcagtccaggcctagcccatttaggcccgcagctccgaaggccggaccacccggcttggttcatccacttttttcaccaagccatctcacttccaaaactccccccccattgtacctccccacagagggcagacggtccgacctaccgggcggactggcgggccctcgaggcgggctcaatactagtcgatcactgtactctggcctgcagaatccctgcagtaccgccactcccggacctccactcgggagctttccgtttctacccggtggaccaccggagtacggacttggcgatcccccacccccacctggactgctacagccccctacactggccccctggcagccatctagaggggacgggcctcctgcagtctcgtcacaaccccgctag

SEQ ID NO: 196104 - DNA, 1107 bp, synthetic construct
  misc_feature 1..1107: note = Description of Artificial Sequence: Synthetic coding sequence
  source 1..1107: mol_type = other DNA
atgggccggaagaagatccagatcagccggatcctggaccagcggaataggcaggtcaccttcacgaagagaaaattcgggttgatgaaaaaggcgtatgaactctccgttttatgcgactgcgaaatcgcactgataatctttaactccgcaaaccgattatttcagtacgcatcgaccgatatggatcgggtccttctgaaatataccgaatattcggagccgcacgagagccgcactaacacggacattctggaaaccctgaagcgccggggaatcggtctcgacggtcctgagctcgagcccgacgagggcccggaggagccaggagaaaaatttaggaggcttgccggcgaaggcggcgaccctgctctgcccaggccccgcctttatcctgccgcaccagctatgccaagcccagacgtcgtttacggcgctttgcccccacctggatgcgatccttcgggcttgggagaagccctccccgctcaaagccgaccctccccatttcgccccgccgcgccaaaagctggcccgccgggccttgtccatcccttgttctcgccctcccatctgacaagcaagactccacctcctctgtacctcccaactgaagggcgccggtctgacctgcctggaggcttggcaggccctagagggggcctcaacacgtcgcgctccctttattctgggctccagaacccatgctctaccgccactcctggacctcccttaggttctttccccttcctccccggcggaccgcccgaatacggcttgggggatccgccccccccccccgggcttttacaacctccgactcttgccccatggcagcctagcaggggcgatggacctccggctgtgagttctcagccaagcgggggccgttccttaggagaagaagggcctcccacccgcggagcatctccccctaccccacccgtgagtatcaagtcagaaaggctgtcccccgcacctggtggtccaggcgattttcccaaaacgttcccctatccactgcttttggctaggtcactggctgagccgctgcgcccaggtcccgctctgagacgtctcccacttgccgatggctggccacgctag

SEQ ID NO: 196105 - DNA, 1098 bp, synthetic construct
  misc_feature 1..1098: note = Description of Artificial Sequence: Synthetic coding sequence
  source 1..1098: mol_type = other DNA
atgggccggaagaagatccagatcagccggatcctggaccagcggaatcggcaagtgacatttactaaacggaagttcggtctcatgaagaaagcctatgaactgtccgttctctgtgactgcgagattgccttgatcatctttaattccgcaaatcgactgtttcagtacgcctccacggacatggaccgggttctgctcaaatatacagaatattccgagccacatgagtctcggacaaacactgatatcctggaaacactcaaacgaagaggtatcggccttgacggcccagagctcgagccagatgagggccccgaagaaccaggcgaaaaatttagacgactggcaggagagggcggcgacccagccctccctcgcccaaggttgtaccccgccgcgcccgccatgccctcacctgatgtggtctacggcgcattgcctcctcctgggtgcgacccatccggtctgggcgaagcacttccagctcaatccagaccatctccttttagacccgctgcacccaaggctggccccccgggattagtacaccctctgttttcaccttcacatctcacttccaaaacccctccgcctttgtaccttcctacagagggtaggcgcagcgacctacccggtgggctggccggtcctcgcggaggtctgaatacatcacggtccctttacagtggcttgcagaacccttgcagtactgccactcccgggcctccacttggttcctttcccttcctgcccggtggccctccggttggcgccgaagcatgggcccgacgggtaccacagcccgctgcccctccaaggaggccacctcagagcgccagctcactgtctgcctcgctgcggccgccgggggcccctgccaccttcttacgccctagtccaatcccatgctcctctccaggcccctggcagtccctttgtggtctgggcccaccctgtgccggttgtccgtggcccaccgcaggtccaggccgtcgctcacccgggggtacctcaccagagcggtcccccggcacagcacgggcccggggcgaccccacttctttgcaggcttcttctgagaagacccagcagtag

SEQ ID NO: 196106 - DNA, 1392 bp, synthetic construct
  misc_feature 1..1392: note = Description of Artificial Sequence: Synthetic coding sequence
  source 1..1392: mol_type = other DNA
atgggccggaagaagatccagatcacccggatcatggacgagcggaatcggcaggtgacattcactaagagaaaatttggcctaatgaagaaagcctacgaactcagtgtgctttgtgactgtgagatcgctttgatcatctttaattcaacaaataagctgtttcagtacgcaagcacggacatggacaaggttctgttaaagtatactgaatataacgagccccatgaatccagaaccaatagtgatatcgtcgaagctctgaataagaaagaaaataagggctgcgagtctccagatccggactcttcgtacgcactgaccccacgaactgaagagaagtataagaaaattaatgaggaatttgataatatgatcaagagccacaaaatcccggccgtgccaccaccaaatttcgaaatgcccgtgagcatcccagtgagcagccataatagccttgtttactccaaccccgttagcagtctgggcaatccaaacctcctgccacttgcccaccctagcctgcagaggaactccatgtcccccggggtgacgcatcgacctccaagcgccggcaatacgggaggccttatgggaggcgacttgacctccggggccggtacttccgccggtaatggatacggcaacccgaggaattcccctggactactcgtgagcccaggtaacctgaacaaaaatatgcaggcgaagtcacccccgcccatgaacttgggcatgaataatcgaaagcctgacctaagagtgctgataccccccgggtcaaaaaacactatgcccagcgtgaaccagagaattaacaacagccagagcgcccagtctcttgcaacacccgtggtgagtgtggctacccccacgctgcccgggcagggcatgggtggatatccaagcgccatctctaccacttatggaaccgaatattctttgtcatcggccgatctgtcatcactgtctggctttaatacagcgtctgcgcttcacttaggatcagtcacaggatggcagcagcagcacctccacaatatgcctccttctgcactgagccagcttggggcatgcacctcaacccacctgtcacagagttcaaatttgtccttgccgtctacacaaagtctgaacatcaagtccgaacctgttagtcccccgcgcgatcggacgacaaccccctcccggtatccccagcatactcgacacgaagccggtcggagtcccgtggactccttgtccagctgcagttccagttacgacggaagcgatagagaagaccacaggaacgaatttcacagtcccatcggcctgacccgacccagtccagatgaaagggagtcccccagcgtgaaaaggatgaggctgtctgaaggctgggccacttag

SEQ ID NO: 196107 - DNA, 1422 bp, synthetic construct
  misc_feature 1..1422: note = Description of Artificial Sequence: Synthetic coding sequence
  source 1..1422: mol_type = other DNA
atgggccggaagaagatccagatcacccggatcatggacgagcggaatagacaagttaccttcacaaaacgcaagtttggcttaatgaagaaggcctatgagttatcggtgctttgcgactgcgaaatagccctaatcatattcaatagcacaaacaaactctttcagtatgcatctacagatatggacaaagtgctgttgaaatataccgagtacaatgaaccccacgagtccagaaccaattctgacatagtggaaactcttagaaaaaagggtcttaacggctgcgactccccggatccggacgctgatgacagcgtcgggcattcccctgaaagcgaagacaagtacaggaagatcaatgaagacatagacctcatgataagcagacagcgactgtgtgccgtgcccccacccaactttgagatgcccgttagcatcccagtaagctcgcataattcgctggtctattccaatcctgtatcttctctgggaaatccaaatcttctgccgctggcccatccaagcctgcagcgtaattcaatgtccccaggagtgacccaccgccccccatcagccggcaacacgggtggactgatgggtggcgacctaacctctggagcagggacaagcgccggcaacggttatggcaatcctcgaaacagcccaggcctgctcgtctcaccaggcaatttgaataaaaatatgcaagccaaaagtccacccccaatgaatctgggaatgaataaccgaaagcctgacctgcgcgtacttattccccctggttcgaaaaataccatgccttctgtatctgaggatgtagacttgctgcttaaccagcggatcaacaattcacaaagtgcccagagtctggccacacccgtggtttctgtcgcaactcctactctgccaggacagggtatgggcggttacccttccgccatttccaccacatatggaacagagtactccctgtcaagcgcagatctctcttccctgtcaggctttaataccgcctccgccctgcatctagggtcagtcactggttggcaacagcaacaccttcataatatgcctcctagcgctctgtcccagctcggagcttgcacgagtactcacctgtcccagtcaagcaacttatcgctgccatcaacccagtcacttaacataaaaagcgagccggtttctccccctcgggaccgcaccacaacaccaagccggtatccccagcataccaggcacgaagctggtcggagcccagttgactctctgagctcttgctcatcctcctacgatgggtcggatagagaagaccacagaaacgagttccactctcctattggtctcactaggcccagtcccgacgagcgagagtccccgtcagtgaaacgtatgagactgtcagagggatgggccacttag

SEQ ID NO: 196108 - DNA, 297 bp, synthetic construct
  misc_feature 1..297: note = Description of Artificial Sequence: Synthetic coding sequence
  source 1..297: mol_type = other DNA
atgggccggaagaagatccagatcacccggatcatggacgagcggaataggcaggtgacgttcacaaagaggaaatttggattgatgaagaaagcttatgagctgtctgtgctgtgtgactgcgaaattgcgctgatcatcttcaattccacgaataagctctttcagtatgcttctaccgacatggacaaggtcctactgaagtacactgagtataacgagccccatgagtctaggaccaactctgatatagtggaaacactgcggaaaaaggggctgaacggctgtgattcctag

SEQ ID NO: 196109 - DNA, 390 bp, synthetic construct
  misc_feature 1..390: note = Description of Artificial Sequence: Synthetic coding sequence
  source 1..390: mol_type = other DNA
atgggccggaagaagatccagatcacccggatcatggacgagcggaatcggcaagtgacctttacaaagaggaagtttggcctgatgaagaaggcttatgaactgagtgtcctgtgcgattgcgagatagcattgattatctttaattcaacaaataaactttttcagtatgcatctactgatatggacaaggtactactgaaatacactgaatacaacgagccacacgagtccagaacaaactcagatattgtcgagacattaaggaagaagggccttaatggctgcgacagccccgaccccgatgccgatgattctgttggccattcccccgagagtgaagacaaataccggaaaatcaacgaggatatcgatttgatgatttcatag

SEQ ID NO: 196110 - DNA, 264 bp, synthetic construct
  misc_feature 1..264: note = Description of Artificial Sequence: Synthetic coding sequence
  source 1..264: mol_type = other DNA
atgggccggaagaagatccagatcacccggatcatggacgagcggaaccgacaggtgactttcacaaaacggaagtttggattgatgaagaaggcgtacgagttgtctgtgctgtgtgattgcgaaatcgcgctcattatcttcaacagcacaaataagctgttccaatatgcatcaacagatatggacaaggtgcttctaaagtataccgaatataatgagcctcacgagagccggactaattccgatatcgtggagacctag

SEQ ID NO: 196111 - DNA, 1422 bp, synthetic construct
  misc_feature 1..1422: note = Description of Artificial Sequence: Synthetic coding sequence
  source 1..1422: mol_type = other DNA
atgggccggaagaagatccagatcacccggatcatggacgagcggaacaggcaggttacatttactaagcgcaaattcggacttatgaagaaggcctacgaactgtccgtcctctgcgattgtgagatcgccctcattatcttcaattcaactaataagctgtttcaatacgcttccaccgacatggacaaagtgctgctgaagtacaccgagtacaatgagccacacgagagccgcaccaactctgatattgtggaaacacttagaaagaagggcctgaacggatgtgatagccccgaccctgacgcggatgactccgtcggacacagtcctgagtctgaagacaagtatcggaagattaatgaagatatcgacctgatgatcagccggcagaggctgtgcgccgtccctcctccaaactttgaaatgcccgtgtcgatccccgtgtccagtcacaatagcttggtttacagcaatcccgtttctagccttggaaaccctaatctgctccctttggcccatccctccttgcagaggaatagcatgtcccctggcgtaacacatcgcccaccttctgccggaaacacaggaggtctcatgggcggtgatttgacttcgggtgccgggacaagtgcaggcaatgggtacgggaatcctcggaacagtcctgggttactcgtttcaccaggcaacctgaataagaacatgcaagccaaatcacccccccctatgaatctcggcatgaacaataggaaacccgatttgcgcgttcttattcctccagggagtaagaacaccatgccctcggtcgtcatacagaattatatactcaaaaatcagaggatcaacaactcccagtcagcccagtccctagcaacccctgtggtgagcgtagctacccctactttgcctggccagggcatgggggggtatccaagtgccatcagcactacctacggtacggagtactcgctgtcctctgctgatctgagtagtctgagcggttttaatactgcttcagctctgcacctcggctccgtgactgggtggcagcagcagcatctgcacaatatgccaccatcagcactgagccagctgggcgcctgcacctctactcacctgtctcagtcctctaatttgtctctgccctccactcagagcttgaatatcaaatcagagccagtgagccctcctagagaccggaccacaactccctctaggtaccctcagcatacaaggcatgaggctggaaggtccccagtggatagtctctcctcttgttcgtcttcttatgatggaagtgatcgggaggaccatcgtaatgagttccattcccctataggcttgactcggccgtctcctgatgaacgtgagtcaccatctgtcaagcgcatgagactatccgagggctgggccacatag

SEQ ID NO: 196112 - DNA, 684 bp, synthetic construct
  misc_feature 1..684: note = Description of Artificial Sequence: Synthetic coding sequence
  source 1..684: mol_type = other DNA
atgggccggaagaagatccagatcacccggatcatggacgagcggaaccgccaggtaacatttacaaaacgcaagttcggcctgatgaagaaggcatatgagctcagcgtcctgtgcgactgtgaaatcgccttaataatctttaactccacaaacaaattgtttcaatatgcttccaccgacatggacaaagttctgctcaaatacaccgaatacaacgagccccacgaatccagaacaaactccgatatcgttgaggctctaaataaaaaagaaaataagggatgtgagtctcccgatcctgatagttcatatgctctcaccccgcgcactgaagagaaatataagaaaatcaacgaagagttcgataatatgataaagagtcacaaaatcccggctgtcccccctcctaactttgagatgcctgtcagcattcctgtgagctcccacaactctctggtttacagtaaccccgtgagctcattggggaatccaaacctcctgcctctggcacacccctccctccagcgaaattcaatgtctcctggcgtcacccacagacccccatctgcgggcaacactggtgggctcatgggtggcgacctgacctccggcgccgggacatcagcgggaaatggctatggcaaccccaggaattcccccggactcttggtgtccccatag

SEQ ID NO: 196113 - DNA, 363 bp, synthetic construct
  misc_feature 1..363: note = Description of Artificial Sequence: Synthetic coding sequence
  source 1..363: mol_type = other DNA
atgggccggaagaagatccagatcacccggatcatggacgagcggaaccgccaggttacattcaccaagcgcaagttcggacttatgaagaaagcttatgagcttagcgtgctgtgcgattgtgagattgctcttattatctttaattcaacgaacaagcttttccagtacgcatccactgatatggataaggtacttttgaagtatactgaatacaatgaaccccacgagagcaggactaacagcgacatcgtggaagccctgaataaaaaggagaacaagggatgcgagagtccggaccctgattctagctacgctctgacacccagaacagaggagaagtacaagaaaattaatgaatag

SEQ ID NO: 196114 - DNA, 381 bp, synthetic construct
  misc_feature 1..381: note = Description of Artificial Sequence: Synthetic coding sequence
  source 1..381: mol_type = other DNA
atgggccggaagaagatccagatcacccggatcatggacgagcggaatcggcaagtaacctttacaaagcggaagttcggactaatgaagaaagcatacgagttaagcgtgctgtgcgattgtgaaatcgctctcatcatcttcaactccaccaataaactctttcagtatgcctctacagatatggataaggtgctgttaaaatacaccgagtacaacgaaccccacgagagccggaccaattccgacatcgtggaaaccctccggaagaaagggctcaatgggtgtgacagccccgatccagacgctgatgattccgttggccactcaccagaatcagaagacaaatacagaaaaatcaacgaggatatcgatttgtag

SEQ ID NO: 196115 - DNA, 87 bp, synthetic construct
  misc_feature 1..87: note = Description of Artificial Sequence: Synthetic coding sequence
  source 1..87: mol_type = other DNA
atgggccggaagaagatccagatcacccggatcatggacgagcggaatcgtcaggtaacattcactaaaagaaaatttggtctgtag

SEQ ID NO: 196116 - DNA, 1398 bp, synthetic construct
  misc_feature 1..1398: note = Description of Artificial Sequence: Synthetic coding sequence
  source 1..1398: mol_type = other DNA
atgggccggaagaagatccagatcacccggatcatggacgagcggaataggcaagtgacatttacgaagaggaaatttggcctgatgaaaaaggcatacgagttgagtgttctgtgtgactgtgagatcgcgctaatcatcttcaactctactaataagctttttcagtacgcctccaccgatatggacaaagtactcttgaaatatacggagtataacgagccccatgaatcaaggacaaacagtgatatcgttgagactctgagaaagaaaggactgaatggttgtgattccccagatccagacgctgacgattcagtggggcatagccccgagtccgaagataagtataggaagataaacgaggacattgatctgatgatctcaagacagaggctgtgcgctgtgcccccccccaatttcgaaatgcccgtgtctatccccgtatcatctcataattcactggtatatagcaacccagtttcaagcctagggaacccaaacctgctgcccctggcacatccaagcctacagcgcaattccatgagccccggagtcacccaccgccccccttctgccggaaacaccggcggattaatgggaggcgacctgacgtcaggcgctggaactagtgccggcaatgggtacggtaacccacggaattccccaggcctgctggtgagccccggaaacctgaacaagaacatgcaggctaaatctccccctcccatgaatctaggtatgaacaatcgtaagcccgacctgcgcgtgctgattccaccaggttccaagaacaccatgccttcagttaatcaacggattaacaattctcagtctgcccagtcgctagcaacgcccgtcgtctccgtcgccactccaaccttgcccggacaaggaatggggggttacccgagtgcgatctcaaccacctacggaactgagtactccctcagtagcgccgatttgtctagtctgagtggatttaatacggctagtgccttgcacctcggcagtgtaacgggctggcagcagcaacacctgcacaatatgccgccttcagcattgagccaactcggcgcgtgcaccagcacgcatttgagtcagagctccaatttatctcttccgagtacccagtccctgaacatcaagtccgaacccgttagccctcctagagatcgcactactactccctctagatacccccagcatactcgccatgaagctggcagatctcctgttgatagcttgagctcttgcagttcaagttatgatggtagcgatcgcgaggaccaccggaatgaattccacagccctataggcttaacgcgccccagtccagacgagcgagagtccccctcggtgaagcggatgcgcctctccgagggatgggccacatag

SEQ ID NO: 196117 - DNA, 729 bp, synthetic construct
  misc_feature 1..729: note = Description of Artificial Sequence: Synthetic coding sequence
  source 1..729: mol_type = other DNA
atgggccggaagaagatccagatcacccggatcatggacgagcggaatcggcaggtgacctttactaaacggaagtttggtctcatgaaaaaggcctacgaactcagcgtcctgtgcgactgtgagatcgccctgatcatctttaactctacgaataagttattccagtacgcatctactgatatggacaaagtgttactgaaatacacggaatataacgagccacatgagtcgcgcactaattctgacatcgtggaggctctgaataaaaaggagaataaggggtgcgagagcccggatcctgacagttcctatgcgctcacgccgcgcaccgaagaaaaatacaagaagattaacgaggagttcgataatatgatcaaaagccacaaaatcccagcggtaccaccacccaattttgaaatgcccgtgtccatcccagttagttcccacaacagcctggtgtacagcaacccagtgtccagtcttggcaatcccaacctgttgccgcttgcgcatccttccttgcagcggaactctatgtccccaggtgtgacccataggccgccctccgccggaaatacgggcggcctgatggggggtgacctcacatcaggtgcggggacttccgcgggtaacggctatggaaatcccagaaactcacccggtctgctggtgtccccagggaatctgaacaaaaatatgcaagctaagtctcccccacccatgtag

SEQ ID NO: 196118 - DNA, 1326 bp, synthetic construct
  misc_feature 1..1326: note = Description of Artificial Sequence: Synthetic coding sequence
  source 1..1326: mol_type = other DNA
atgggccggaagaagatccagatcacccggatcatggacgagcggaaccggcaggtcaccttcaccaagcgcaagttcggactgatgaagaaggcttatgaactgtccgtcctatgcgattgcgagattgccctgattattttcaactcaactaacaaactgtttcagtacgctagtaccgatatggataaagtcctgctgaagtatactgaatacaatgagcctcacgaaagccgcaccaattctgacatcgtggagacattgcgaaagaaaggccttaatggctgcgatagccccgatcctgatgcagacgactcagttggacatagccctgagtcagaagataagtaccgtaaaatcaacgaggacattgacctgatgatctcacgacagaggttatgcgccgtgccacctcctaacttcgagatgccagtgagcattcccgtgagtagtcataactccctggtgtactccaaccctgtgtcctcactggggaaccctaatctgcttcccctcgcccacccatctctgcagaggaattcaatgtccccgggtgtaactcacaggcctccttccgccggcaacactggtgggctgatgggaggtgaccttacttcgggtgctggcacctccgctgggaacggatatggaaatccccggaacagccccgggctcttggtgtcccctggcaatttgaataaaaatatgcaggccaagtcaccacccccaatgaacctcggcatgaataatcgtaagccagacctgagagtgctgatccctccagggagtaaaaataccatgcccagcgtgagcgaggacgtcgacctgctgttgaaccagcgcataaataactcccagagtgctcagtctctggcgacgcccgttgtcagcgtagccactcccactctgccaggtcagggaatgggggggtatcctagtgccatctcaactacttatggcactgagtatagcttgagtagcgccgacctttcgtcactgtcgggatttaacacggccagtgcccttcaccttgggtctgtgaccggctggcagcagcagcatctgcataatatgccgcctagcgcattgagccagctgggcgatcgcactactaccccttcacgatatccacagcatacacgccatgaggccggccggtcccctgtagattcgctgagttcctgcagctcgtcatatgatggatcggaccgagaagaccacagaaatgaatttcactcaccaatcgggttgacccgcccgtccccagatgaacgagaaagtccgtcagtgaaacgcatgaggttgtcagaagggtgggcaacctag

SEQ ID NO: 196119 - DNA, 1422 bp, synthetic construct
  misc_feature 1..1422: note = Description of Artificial Sequence: Synthetic coding sequence
  source 1..1422: mol_type = other DNA
atgggccggaagaagatccagatcacccggatcatggacgagcggaaccgccaggttacttttacaaaacgaaaatttggattaatgaagaaggcatacgagttgtctgtgctgtgcgactgcgaaatcgcgcttataatttttaattcaaccaataagctgttccagtacgcttcgacagatatggacaaggtactcctcaaatatactgagtacaatgaaccccatgaatctcggacaaattcagacatcgtggaaacattgaggaagaagggactcaatggttgcgattccccagaccccgatgctgatgattcggtcggacactctcccgagagtgaggacaagtacagaaaaatcaacgaagatattgacctcatgataagccgtcaacgcctgtgtgcagtgccccctccaaattttgagatgccagtttctattcccgtcagcagtcataacagtctggtgtactccaatccggtctctagtttgggcaaccccaatctgctgccgctggctcacccatccttacagcgcaattccatgagccctggggtcacccataggcccccttctgcaggtaacaccggcggcttgatgggtggggacctcactagcggagctgggacctcagccggaaatggctacggcaacccacgcaactcccctggcctcttggtgagccctgggaacctgaacaaaaacatgcaggccaagagcccaccccccatgaatttgggaatgaacaatcgaaaaccagacctaagggttctcattccccccggtagtaaaaatacaatgccttccgtctccgaggacgtggacctgctcctcaatcagaggataaacaactcccaatctgcacagtctctggcgacgcccgtcgtgagcgtcgctactccaacactgcccggccaggggatgggagggtaccctagcgcaataagcacaacctacggcaccgagtatagcctatccagcgctgatttgtcatcactgtctggctttaataccgcatctgctttacacctcgggtccgtgactggatggcagcagcagcatctgcataatatgccacctagtgccctgtcccagctgggggcatgcacaagtacacaccttagccagagtagcaatctgagcctcccaagtacccagtcactcaatattaagagcgaaccggttagccccccccgcgacagaacaacgaccccaagccgatacccccagcataccagacatgaggctgggcgttcacctgttgactccctgtctagttgtagctctagctatgatggctcagatcgcgaagatcaccggaacgaattccacagcccaattgggttgactaggcccagccccgacgaacgggagtcaccttcagtcaagcgtatgcgtctctctgaggggtgggcgacgtag

SEQ ID NO: 196120 - DNA, 1254 bp, synthetic construct
  misc_feature 1..1254: note = Description of Artificial Sequence: Synthetic coding sequence
  source 1..1254: mol_type = other DNA
atgggccggaagaagatccagatcacccggatcatggacgagcggaatcgacaagtgacgttcacaaagagaaagttcggcctcatgaagaaagcatacgagctgagtgttctctgcgactgcgagattgccctaatcatctttaattcgactaataagttgtttcagtatgcctccactgatatggacaaggtcctgcttaaatacacggagtacaatgaaccccacgagagccgcacaaattcagatattgttgaagcagtcccgcctcctaattttgaaatgcccgtgtccatcccagtttccagccacaattcactcgtgtattccaaccctgtttcatctctgggcaatcccaaccttcttcccctggcacatccatcactccaaaggaactccatgagccccggtgtgacccatagacctccatccgcaggtaacaccgggggactcatggggggcgatctaacttcaggggccggaacctccgccggaaatggctacgggaacccacggaattcccccggcttgctggtctcgccaggcaatttgaataagaacatgcaagctaaatctcctcctcccatgaacctggggatgaataatcggaagcctgatctgagggtgttaatacctcctgggtcaaagaacactatgccctcggttaaccagcggatcaacaactcccaatccgcccagtcacttgccactccagtcgtgagcgtggccaccccaaccctgccagggcagggaatggggggatatccaagtgcgatctcaacaacttacggaactgaatactcactgagtagcgctgacctgtcatccctgtcagggtttaacacggcctctgccctccatctaggctccgttaccgggtggcagcagcaacacttgcataatatgcccccttctgcattatcccagctgggagcctgcaccagtacgcaccttagccaatcttcgaacctctccctcccctcgactcagtctctcaatatcaagagcgagcccgttagcccaccccgcgatagaaccactacaccatctcggtatcctcagcacacccgacacgaggcaggtcgaagtcccgtggactccttgtcatcttgctcatctagctacgacggatctgatcgagaggaccataggaatgagtttcactctccaatcggcctcactcgcccctcccccgatgagcgcgagtcaccttcagtcaaacggatgagactctcagaaggttgggcaacatag

SEQ ID NO: 196121 - DNA, 1452 bp, synthetic construct
  misc_feature 1..1452: note = Description of Artificial Sequence: Synthetic coding sequence
  source 1..1452: mol_type = other DNA
atgggccggaagaagatccagatcacccggatcatggacgagcggaatcgccaggtgaccttcaccaaacgcaaattcgggttgatgaaaaaggcctatgaactcagcgtactttgtgactgcgagattgctctgatcatctttaattcaacaaacaagttattccagtacgcctctactgatatggacaaagtccttttgaaatacactgaatataatgaaccgcatgagtcccgcaccaatagtgatatcgttgaaaccctgcgcaagaaagggcttaacggttgtgacagtccagacccagacgccgacgattcagctctcaataagaaggagaacaagggctgcgaatcccctgatccagatagttcatacgccctgacaccacggacagaagagaaatacaagaagattaatgaggaatttgacaacatgataaagagtcacaagatacctgctgtacctccgcccaactttgagatgcctgtgtctataccagtgtcatctcacaacagcttggtttacagcaacccagtctcctcactgggaaacccaaatcttctgccactggcccacccatccttgcagagaaactctatgagccctggagtaacccatcggcctccgtccgcaggcaataccggcggtctgatgggcggggaccttacatctggagctgggaccagtgccggtaatggatacggcaatccaaggaactcccccggcctgctcgtttcacctggtaacctgaataagaatatgcaggcaaagagtccaccaccaatgaacctcggcatgaataatcgcaaacccgatctgcgagttttgatacctccaggctctaagaatactatgccgtctgtgaaccaaagaatcaataactctcaatctgcgcagtccctcgctaccccggtggtgtctgtggcgacccctacgcttcctggacagggcatgggaggttatccttccgccatcagcaccacctatggtaccgagtattcactttcctcagccgacctctcttcgctcagcggatttaacactgccagcgcactgcacctcggtagtgtgaccggctggcagcaacagcacttacacaatatgcccccttccgcactcagtcagttgggagcatgtacttccactcatttgtcccaaagctccaacctctcactgcctagcacccagagcctcaatatcaagtccgaaccagtcagcccgccaagagacaggactacaacgccatcacgataccctcagcacacaaggcacgaggcaggtaggagtcctgttgactcactctcatcctgctcttctagctacgacgggagcgaccgggaagaccaccggaacgaattccattcacctatcgggctgaccaggcctagccccgatgaaagagaaagcccttccgtcaagcggatgcggctgtctgaaggatgggctacttag

SEQ ID NO: 196122 - DNA, 1563 bp, synthetic construct
  misc_feature 1..1563: note = Description of Artificial Sequence: Synthetic coding sequence
  source 1..1563: mol_type = other DNA
atgggccggaagaagatccagatccagcggatcaccgacgagcggaaccggcaggttacttttaccaaacggaagtttgggttgatgaaaaaagcttatgagctctcagttctgtgcgactgtgagattgctttgatcatatttaatcactccaataagttgttccaatatgcctctactgatatggataaagttctcttaaaatacacggaatacaacgagccacacgaaagtaggacgaatgcagatatcatagaagccttgcacaagaagcatagagagtgcgaatcacctgaggtcgacgaggtgttcgccttgactccgcagacagaagaaaagtacaagaagatcgacgaggaatttgataaaatgatgcaaagttatcggttagcctctaccgtcccagcaccaaacttcgctatgcccgtcaccgtgcccgtgagcaatcagtcttcccttcagttctcgaatccatcaggttccttagtgaccccgtcacttgtcaccagcagcctgaccgatcctcggttgcttagtcctcaacaacccgcccttcagcggaattccgtctcaccaggtttaccgcaaaggccagcttcagccggggcgatgctaggcggagatctgaactctgcaaatggcgcctgccccagtcccgttggcaacgggtacgtctccgctagggcctcgcctggactgctccctgtcgccaatggcaactcccttaataaggtgatccccgccaaaagcccacctcctcccactcactcgacacagctcggcgcccccagccgaaaaccagaccttcgtgtcattacgtctcaagctgggaagggtctcatgcaccacctgacggaggatcacctagatcttaacaacgcacaacggctgggagtctcgcaaagcactcactcactgactacacccgtagtctcagttgccacaccgtctctactttctcagggactgccgttttcttccatgccaacagcctacaacacagactaccagctaacttctgccgaactgagttccctaccagctttttcttctccaggagggctgtccttagggaatgtgaccgcatggcagcaaccacagcaacctcaacagccccaacagccacagcccccccagcagcaaccacctcagccacagcagccccagccccagcagccccaacagcctcagcagccacctcagcaacagagtcacctagtccctgtctccttgtctaaccttatcccgggaagtccactcccacatgtgggagccgccttgactgtaaccacccatccccatatctcgatcaaatctgaaccggtctcaccctcccgcgagcgctccccagcaccacccccccccgcagtttttcctgcagccagacctgagccaggagatggcttgtcctcacctgccggaggcagctacgaaacaggagacagagatgatggccgcggggacttcgggcctactctggggctgctgcgtcccgctccagaacccgaagctgaggggtctgccgtcaagcgcatgcgactcgatacgtggaccctcaagtag

SEQ ID NO: 196123 - DNA, 1566 bp, synthetic construct
  misc_feature 1..1566: note = Description of Artificial Sequence: Synthetic coding sequence
  source 1..1566: mol_type = other DNA
atgggccggaagaagatccagatccagcggatcaccgacgagcggaaccggcaggtaaccttcaccaagagaaagttcggcttgatgaaaaaggcatacgagctcagcgtcctttgtgattgtgagatagcactgattatattcaaccacagcaataaattattccagtacgcatcaacggacatggacaaggtgctgttgaaatataccgagtacaacgaaccacacgagtctcgtacgaatgcagatatcatcgagacactgcggaaaaagggctttaatggctgcgattccccagaacctgatggagaggattcgctcgaacagtcaccactgctggaggacaaatacagaagggcaagtgaagaactcgacggtctatttaggaggtacggctcaaccgtgccggcaccgaacttcgcaatgcccgtgaccgtgccggtatcaaaccagagttctttgcaattttcaaacccatctgggagcctcgtgaccccttctctggtcaccagttctctcacagacccaagactgctgagccctcagcagccggctctccaacggaactccgtctcccctggtctgcctcagagacccgcctccgccggagcaatgttagggggtgatctgaactctgccaatggtgcatgcccatcccccgtcggcaatgggtatgtgagcgcgagagccagtcccgggttgctcccagtcgccaacggaaatagtctcaacaaggtcatccctgccaagagcccgcctcctcccacacattccacgcagttgggcgcaccctcaaggaaacctgatctacgcgtgatcacctcacaggcggggaaagggctcatgcatcatctcaccgaggatcacctggacctcaacaatgcccagcgcctgggtgtgagccagtcaacccatagtctgaccacacctgtggttagcgtagccacaccctccctattgtcgcaggggctgcctttctcctctatgccaaccgcttataacacagattatcagctgactagcgccgagctgtccagtcttcctgcattttcatcgcccggcggcctgtcactgggtaacgtaactgcttggcagcaaccacaacagccccagcagccccagcagccacagcctcctcagcaacagccgccccagccccaacaaccccagccgcagcagccacagcagcctcagcagccgccccagcaacagtcccatttggttccagtgagcttgagcaatttgattcccgggagcccactgccccacgtgggcgccgctctaaccgtcaccactcacccccatatcagcattaagtctgagcctgtgagcccatctcgcgagagatctcctgcacctccacccccggccgtctttccggctgcccgacctgaaccaggtgatggcctgtcaagccctgctggaggctcttacgagaccggtgatcgcgacgatggcagaggcgacttcgggcctactctcggactgctgagacctgcgcccgaaccggaagccgagggaagcgccgtaaaacgcatgcgcctggacacttggactctgaagtag

SEQ ID NO: 196124 - DNA, 1428 bp, synthetic construct
  misc_feature 1..1428: note = Description of Artificial Sequence: Synthetic coding sequence
  source 1..1428: mol_type = other DNA
atgggccggaagaagatccagatccagcggatcaccgacgagcggaacaggcaggtgacattcactaaacgtaaattcggattgatgaagaaggcctacgaattgtcagtgttatgcgactgtgagatcgccctaattatcttcaaccactccaataaacttttccagtatgcgagcacagacatggataaagtactgcttaagtatacagagtacaacgaaccgcacgaatcaagaaccaacgctgatattattgaaagcacggtccctgcgcccaacttcgccatgcccgtgacagtgccggtgtcaaaccaatcatccctgcagttctctaacccaagtggtagcctggttactcctagccttgtgacatcgtcgctgacagaccctcgcctgctttccccgcagcaacccgccctgcagcgaaattctgtctcacccggcctgccacagcggcctgcttcagcaggggcgatgctgggaggcgatctgaactccgccaatggcgcctgcccttccccagtcgggaacggctatgttagcgccagggcgtccccagggctcttgccagtggctaacggtaacagcctgaataaggtcatcccagccaagagcccacctccacccactcattccacacagctgggagccccatcaagaaagcccgatctccgggtgattacttcccaggccgggaagggcctgatgcatcatttaacggaagaccacttggatctcaacaatgctcaaaggctaggcgtatcgcagagtacacactccttaactaccccggtggtgagtgtagccactccatccctactgtcacagggcctgcctttctctagtatgcctacagcatacaacactgattaccagctaacttccgctgagctgtcgtcacttcccgcgttcagcagccccgggggcctatccttgggaaacgtcacagcctggcagcagccacaacaacctcagcagcctcaacaaccccagcccccccagcaacagcctccccagccacagcagccccagccacagcaaccccaacagcctcagcagccccctcagcaacagtcacaccttgtcccggtcagcctcagcaatttgatccccgggtcgccattaccccatgtgggggctgcccttacggtgactacacaccctcacatctctatcaagagcgagcccgtgagtccctcacgtgagaggagtcctgccccacccccacccgcagtgtttcctgcggcaaggcccgagcccggcgacggactcagttccccagccggtggctcttacgaaacaggcgatcgggacgatgggagaggagactttggtcctacgctcggacttctccggccagcccctgagcccgaagccgaaggtagcgctgttaaaaggatgagacttgacacctggactttaaagtag

SEQ ID NO: 196125 - DNA, 1545 bp, synthetic construct
  misc_feature 1..1545: note = Description of Artificial Sequence: Synthetic coding sequence
  source 1..1545: mol_type = other DNA
atgggccggaagaagatccagatccagcggatcaccgacgagcggaatcgtcaggtcactttcacaaaaaggaaatttggcctcatgaagaaagcctacgaattgtcagtgttatgtgactgtgagattgccctgatcatttttaatcacagcaacaaactgtttcagtatgctagcacagatatggacaaagtgctgctgaagtatactgaatataacgagccacacgaaagtaggacgaacgctgatatcatagaaaccctcagaaaaaagggtttcaacggctgtgactctcctgagccagacggtgaggattcacttgagcaaagccccctccttgaagacaagtataggcgagcatctgaggaactggatggcttgtttagaagatacgggtctaccgtcccagctcctaatttcgcaatgcctgtcaccgttccggtgtctaaccagtcgagtctgcaattttccaatcctagcgggtcccttgtgactcccagcctggtgacctcaagcctgacagatccacggcttctcagtcctcagcagccagcactgcagagaaacagcgtgagtcccggcctgccgcagagacccgcctccgctggagccatgctcggcggagacctgaatagcgctaatggggcctgccctagccctgtgggcaatggatatgtgtccgcacgcgcttcacccggcttactgcccgtggccaacggcaactcattaaacaaagtgatcccagcaaagagcccccctccccccactcactccacacagctgggggcaccttcaagaaagcccgacctgcgggtgattacgtcacaggcggggaaagggctcatgcatcacttaaacaacgcccaacggttgggcgtttcccagagtacacattctttgacaacacctgtcgtgtcagtcgccactccatccttgttgagtcaggggttgcctttttcttctatgcccaccgcgtataacactgattaccagcttacaagcgctgaattgagcagccttcccgccttcagctcccccggtgggctgagtctggggaatgttactgcgtggcagcaaccacagcagccccagcaaccacaacagccacagcccccacagcaacagcctccccagccacagcagccgcagccccaacagcctcagcagccccagcagccgcctcagcagcagtctcatctcgtgcctgttagtctaagtaacctcatcccagggagtcccctcccgcatgtcggtgcagctctcaccgttaccacacaccctcacataagcataaagagcgagcctgtgtccccatcccgtgagagaagtcccgctccaccacctccagccgtctttccagccgccaggcctgagccaggcgatggcctttcctctccggcgggaggatcctacgaaaccggggatcgggatgatggacgaggcgattttggcccaaccctaggactgctacgcccagcccctgagcctgaggctgagggcagcgccgtgaagcgcatgaggttggacacttggacacttaagtag

SEQ ID NO: 196126 - DNA, 1545 bp, synthetic construct
  misc_feature 1..1545: note = Description of Artificial Sequence: Synthetic coding sequence
  source 1..1545: mol_type = other DNA
atgggccggaagaagatccagatccagcggatcaccgacgagcggaaccggcaggtcacgttcacgaagagaaagtttggccttatgaagaaggcctatgagctctctgttctctgcgactgcgagattgctttgataatcttcaatcatagcaataagctgtttcagtatgccagcacagatatggataaggtcctgttgaagtacactgagtacaacgaaccccacgagagccgcactaatgctgatattatcgaaaccctccgcaagaagggctttaatggatgtgattcccccgagcccgatggcgaggacagcctggagcagagccctttactggaggataagtaccgacgcgcgtccgaagaactagatggtctgtttaggaggtacggcagcactgtgcctgccccaaactttgcaatgccggttacagtccctgtcagtaaccagagtagcctccaattctccaacccttccggttctctcgttactccgtccctggtgacctcttccttaacagaccctcgtttactctcccctcaacagccggctttgcagcgtaactccgtgagtcctggactgccccagaggcccgcaagcgccggggcgatgctgggcggtgacctcaactctgctaatggtgcctgccccagccctgtggggaatgggtacgtctccgcgcgcgcttcccccggcctcctgcctgtagccaatggtaattcactgaacaaggtcataccagcaaagtcacctccaccaccaacacacagcacccagcttggggcccctagcaggaagcccgatctgcgagtgattacaagtcaggcaggtaaaggcctcatgcaccacctcaacaatgcccagagactgggggtttcccagtctacccattctctgactactcccgtggtttccgtggcaaccccatcactcctcagccaggggctgccgttcagcagtatgcctacggcatacaacaccgactatcagttgacttctgcagagttgtctagtcttccggcgtttagctcgcctggtggcctgtctctaggaaatgtgactgcttggcagcaacctcagcaacctcagcaacctcaacaacctcagccccctcaacagcagccgccccagccccagcagcctcagccccaacagccgcagcagcctcagcaacccccccagcaacaatcccacctggtcccagtgagcctgagcaatctcattccaggcagtcccctcccccatgtgggcgctgccctcacagtgaccacgcatccccatatttctattaagagcgagcccgtctccccatctagggaacgcagcccagccccaccacccccagccgtcttccccgccgctaggccagagccaggagacggattatcaagtcccgccggaggcagctacgagaccggggaccgggatgacgggagaggcgattttggacctactctcggactcctgagacctgcgcccgaacccgaagccgagggtagcgcggtcaaaaggatgcggctggacacatggacgttgaagtag

SEQ ID NO: 196127 - DNA, 1533 bp, synthetic construct
  misc_feature 1..1533: note = Description of Artificial Sequence: Synthetic coding sequence
  source 1..1533: mol_type = other DNA
atgggccggaagaagatccagatccagcggatcaccgacgagcggaatagacaggtgactttcaccaagagaaagttcggcctgatgaaaaaagcctatgagcttagcgtattgtgcgattgcgaaatcgcactgatcatatttaaccactctaacaaattgtttcagtacgcatccacagacatggacaaagtgctgcttaagtacaccgagtacaacgagccccatgaaagtcgcactaacgccgacatcatcgaagcgttgcacaagaagcatagggaatgcgagagtccagaggtggatgaggtgttcgctctgaccccacaaactgaggaaaagtacaaaaagatagacgaggaattcgataagatgatgcagtcttacagattggcgtcaactgttccagctccgaattttgcaatgccggtgactgttcccgtctcaaatcagtcttctttgcagtttagcaacccatctgggtccttggtgaccccctcgctggtgacctcttcgctaaccgacccgcgcttactgagccctcaacagccagcccttcagcggaactcagtgtccccaggtctcccgcagaggccggctagtgccggagctatgctggggggggatttaaactccgcaaatggtgcatgccctagtcctgttggtaacgggtatgtgagcgcacgcgcgagccccgggctccttccagtcgcgaatgggaactctctgaacaaagtaataccggctaaaagccccccgccaccgacacatagcacacagctgggtgctccgagtagaaagcctgatctcagagtaattaccagccaggcaggaaaaggccttatgcaccatcttaacaatgcccagagactgggagtatctcaatctacacactccctgaccacgccagtggtaagcgtcgccactccttccttactgagtcaaggcctgcccttctcatctatgccgacagcctacaacacagattatcaactgacctccgcggagctcagcagcctgcccgccttctcctcgcctggagggctgtccctgggtaacgtgaccgcctggcagcagccgcaacaacctcaacagccccaacagccgcagccccctcagcaacagcctccacaacctcagcagccacagccccagcagccgcagcaaccccagcagccccctcagcagcaatcccatctggttcccgtctcgctgtctaacttaatcccaggatctcccctgccccacgtgggcgcagctttgacggttactacacaccctcatatatctatcaaaagtgaacctgtgtctcctagtagggagcgctctcccgccccgcctcctcccgccgtgtttccagcagctaggcctgagccaggcgacgggctgtcttcgcctgccggtggctcctacgaaaccggcgatagggacgatgggcggggagacttcggacctactctaggcctgttgagacctgcccccgagccggaagcagagggcagcgccgtgaaaaggatgcggctcgatacttggtag

SEQ ID NO: 196128 - DNA, 420 bp, synthetic construct
  misc_feature 1..420: note = Description of Artificial Sequence: Synthetic coding sequence
  source 1..420: mol_type = other DNA
atgggccggaagaagatccagatccagcggatcaccgacgagcggaatagacaggtgaccttcacaaagcgtaagtttggcctcatgaagaaagcctatgagttgtctgtgctgtgtgattgcgagatcgcactcatcatatttaatcactctaataagctgttccagtatgcttcaaccgacatggacaaagtgttgctcaaatacacggagtacaacgagccccatgaatcccgcacaaacgctgacatcattgagactcttcggaaaaaaggtttcaacggctgtgattctcctgaacccgacggggaggattcactggagcagtcgcctttgctcgaggataaataccggcgggcaagcgaagaactagatggactgttccggagatacggggggccttgttggggagtcacctag

SEQ ID NO: 196129 - DNA, 1410 bp, synthetic construct
  misc_feature 1..1410: note = Description of Artificial Sequence: Synthetic coding sequence
  source 1..1410: mol_type = other DNA
atggccgaggagcgggagcccgagctgtacctgaagtggaagcactgcgagacgcccggcgtaaagaccctgtgcaacctgaaacactgcgaaactcccggtgtgaaaactctatgtaaccttaagaaattgctgaacagactccagaaagatcacagagaggacgtatacctgtacatatccggtcacctgaaccctaacaaattgtaccagcctcctgaaaccatcctacaacactggcccaacgcccataggcccaagggtgagagggccagcgaggtgggagagcctccagcaggcaaagtggcacggatgaaagaggcccttgcccactttactatccacactgcattagtgccctctgaggctcaggacactcccctttttcgatatctaaatccccaggcatcactcagccatacgtccgaggaagacttcctgcccgtcgaagctgttcgggaggggaaggaagaaaagaaaggaggacctcccgggcgtggcccacccggttggaggcggagagaggaactcaggttgccagatctcaaagtattgtgctaccaggaggcaggtagccgagggaccagggatcggcaccactatgtgagttcctacctggctggtgccactagcgccgatcgctacaggatgtttctcagattccaaaaagaggttctcgcgaaacaggacttactcaagaatgatttcacaggttcgaaagcagccgccgggcacgaacgcaaactgcaacaggagttacagaaaatctgcacgtgctccccccagcagtttaatcggcttcacgtgtttggcaaagttttcgaagacatatgcaatagctccctcattttcggggatttgctgaagaaggtaaaagacgagtacgagctgtacatggccactctgctggaatcacagccggccgcccagtatgaagcactgctcgctcagctaaaagcgctgggtcagcggccagtcaaaacagccgatatggatctggcgagggaggaactaagaatgctcgtcaccgcaaccaaagccgccctggaacaaaatgaccgattgaggtcagaattggagatggaggtggcactgctgcagagcgccaaggagcgttctgagtcaagcgagaaacatatcatcgacgaaaatcgtcttacacttaccgagaaggtggagaagaagcgctgtgaaattctgtctaaatgggacgaaattcaggctcttgagaaagaaatcaaaaccacgctggtccatactggtatcagcgatatcaccgagaaccgaattaaatctatagaacatgaagcgatccagctcgagacagaaaacatgatactgaagaagaagatcaaggggccgctcgagatttatcagggtatatgtaagatccgaggcaataggcgttag

SEQ ID NO: 196130 - DNA, 741 bp, synthetic construct
  misc_feature 1..741: note = Description of Artificial Sequence: Synthetic coding sequence
  source 1..741: mol_type = other DNA
atgtaccaggtgagcggccagcggcccagcggctgcgacgccccctatggagccccgtctgctgctcccggtccagcccagacattgtctttgttgcccggtcttgaagtcgtgacgggcagtacgcatccagcagaagctgcccccgaagaggggtcactggaggaggcggcaacaccaatgccacaggggaacggtcccggcatcccccagggcctagattcgacggatctggatgtgccgaccgaagcggtgacctgccagccgcagggcaatccgctgggatgcacgcccttactgcccaacgatagcggccatccctcagagttgggcgggaccaggcgagccgggaacggggcactgggcggcccgaaggcacatcgaaagctgcagacacacccatcattagcatcacaggggtccaagaagtccaaaagttcaagtaaatctaccacttcgcagatccccctgcaagcccaagaagattgctgtgttcactgtattctgtcctgtctcttctgcgaattcctgaccctttgtaatattgtgctggactgtgccacctgcggatcatgttcctccgaagactcgtgcctgtgctgctgttgttgtggttctggcgaatgtgccgattgtgacctgccatgcgacctggattgcggcattttggacgcatgttgtgagagtgctgactgtcttgagatttgtatggaatgctgcgggctgtgtttctcaagctag

SEQ ID NO: 196131 - DNA, 696 bp, synthetic construct
  misc_feature 1..696: note = Description of Artificial Sequence: Synthetic coding sequence
  source 1..696: mol_type = other DNA
atgtaccaggtgagcggccagcggcccagcggctgcgacgccccctacggggcacccagcgccgcccctggccctgcccagacactgtcccttttgccaggactggaagtggtcacagggtctacccacccagccgaagccgcccctgaagaagggtcactcgaggaggcggcaacacctatgccccagggcaatggcccggggatccctcagggcttagacagtacagacctcgacgtccccactgaggccgtgacctgccagccgcaagggaaccctctcgggtgcaccccgcttttacccaacgactctggtcatccttcggagctagggggcacaaggcgggctgggaacggagctctgggcggacccaaggctcaccggaagctgcagacccacccctctctggccagccaggggtccaagaagtctaaatcaagttctaaaagtactacatctcagatcccactacaggctcaggaggattgttgcgtgcattgcatcctgagttgcttgttctgcgagtttttaacactgtgcaacatagtgctcgattgcgccacctgtggtagctgttcctcggaagacagctgcctgtgctgctgctgctgtggctccggcgaatgcgccgactgtgaccttccctgcgaccttgattgcggcattttggacgcctgctgcgaaagtgcagattag

SEQ ID NO: 196132 - DNA, 642 bp, synthetic construct
  misc_feature 1..642: note = Description of Artificial Sequence: Synthetic coding sequence
  source 1..642: mol_type = other DNA
atgtaccaggtgagcggccagcggcccagcggctgcgacgccccctacggtgcccctagcgccgcccctggccccgcccagacactgtccttgctccctggcctggaggtggttaccgggtcaacccatccagctgaggccgctcccgaagaagggagcctggaggaagcggcaacccccatgccccaggggaatggacccggcatccctcaagggcttgatagcacggaccttgatgtacctactgaggctgtcacatgtcagccccagggcaatcccctgggatgtaccccgctgctccctaacgactcagggcacccctctgaactgggggggactcgccgggctggtaacggcgccctgggcggacccaaggctcacagaaagctgcaaacacatcctagtctcgcgtctcaggggtctaaaaagtccaaatccagtagcaagagcactacgtcccagatcccgttacaggcacaggaggattgttgtgtgcactgcattttaagttgcctgttttgcgagtttttgaccctgtgcaatattgtgctggactgtgctacatgcggatcatgctcgtcagaagactcctgcttgtgttgttgctgctgcggatctggcgaatgcgctgactgtgactag

SEQ ID NO: 196133 - DNA, 297 bp, synthetic construct
  misc_feature 1..297: note = Description of Artificial Sequence: Synthetic coding sequence
  source 1..297: mol_type = other DNA
atgtaccaggtgagcggccagcggcccagcggctgcgacgccccctatggtgccccttccgccgctcccggacctgctcaaaccctgtccctgctgccagggctcgaagtggtgactggctccacgcaccccgcagaggccgcacccgaagagggatcacttgaagaggcagcaactcccatgcctcagggcaatggcccgggtatcccacagggtttggacagcacggatctggacgtacccaccgaagccgttacctgtcagccccagggtaatcctctcggctgcacaccatag

SEQ ID NO: 196134 - DNA, 387 bp, synthetic construct
  misc_feature 1..387: note = Description of Artificial Sequence: Synthetic coding sequence
  source 1..387: mol_type = other DNA
atgtaccaggtgagcggccagcggcccagcggctgcgacgccccctatggggccccctccgctgctccgggccctgctcagaccctgtcactcctcccaggactggaagtagtgaccggaagtacacacccagccgaggctgcaccagaggaaggatccctggaggaagctgccacccccatgcctcagggaaacggaccaggtatcccacagggcctggattctaccgaccttgacgtgcctacagaggccgtcacctgccaaccacaaggcaatccacttgggtgcactcccttgctgcctaacgatagcggacacccttctgagcttggtgggactcgccgcgctggaaacggagctctcgggggccctaaggcccacaggtag

SEQ ID NO: 196135 - DNA, 741 bp, synthetic construct
  misc_feature 1..741: note = Description of Artificial Sequence: Synthetic coding sequence
  source 1..741: mol_type = other DNA
atgtaccaggtgagcggccagcggcccagcggctgcgacgccccctacggggcccctagtgcagccccgggaccagcccagaccctttccctgcttccgggtctcgaagtggtcacaggtagcactcacccagccgaggcggcccccgaggaaggatctttggaggaagcggctacacctatgccacaggggaacggccctggcatccctcagggcttggattcaaccgatttggacgtgccgacagaagctgtaacctgtcagccccagggcaacccgctcggatgcacgcccctcctgcccaacgacagcgggcaccctagcgagctgggggggactcgccgagcagggaatggcgcgttgggaggtcctaaagcacacagaaaactgcagacacatccgagtttggcttcacaggggtctaaaaagtccaagtctagctcaaaatcaacgaccagccagattccactccaggcccaggaagactgttgtgtgcactgcatcctgtcttgcctcttctgcgaatttctaacactatgcaacatcgttctcgactgtgccacatgtggttcatgttcatctgaggattcttgtctatgttgctgctgttgcggttccggcgaatgcgcagactgtgacttgccatgcgacctcgactgcggtatcctggacgcatgctgcgagtcagctgattgcctggagatatgcatggagtgttgcggtttgtgctttagcagctag

SEQ ID NO: 196136 - DNA, 729 bp, synthetic construct
  misc_feature 1..729: note = Description of Artificial Sequence: Synthetic coding sequence
  source 1..729: mol_type = other DNA
atgatgatggacctgttcgagaccggcagctacttcttctacctggatggggaaaatgtgacgctgcagcctcttgaagtggcggagggtagccccctctatcccggttccgacggcactcttagcccctgccaggaccagatgccgcccgaagctggttctgattcaagtggcgaggagcatgtgttggctccccctggacttcaacccccgcactgtcctggtcaatgcctgatatgggcatgcaagacgtgtaagaggaaaagcgctcctacggatagaagaaaagcggcaacattacgagaacgaagacggttaaagaagattaatgaggcttttgaggcacttaagaggcgtactgttgccaatccgaaccagcgtctgccaaaggtagagatcctacggagcgcaatctcttatatcgaaaggctgcaggatctcctgcacaggttagatcagcaagagaaaatgcaggaattgggcgtggatccttttagctaccgtcctaaacaggaaaaccttgagggagcggacttcttgagaacttgttcttctcaatggcccagcgtgagtgatcactcgagaggattggtgattaccgctaaagagggcggcgcctcgattgactcaagcgcgagctccagcctccgctgcctgagttctattgtggactccatttcctccgaggaacggaagcttccatgcgtagaggaggtggtggaaaaatag

SEQ ID NO: 196137 - DNA, 1527 bp, synthetic construct
  misc_feature 1..1527: note = Description of Artificial Sequence: Synthetic coding sequence
  source 1..1527: mol_type = other DNA
atgacccagaccctgaagtacgccagccgggtgttccaccgggtgcgatgggctccagaattgggcgcctccctggggtaccgcgagtaccactctgcacgcaggagcctagcggacattcctggtccatcaacaccttctttcctcgctgaactgttttgcaagggcggactgtcgcggctgcacgaactacaggtccagggcgccgcacacttcggaccagtttggcttgcatcattcgggaccgtccggaccgtatatgtagctgcacccgccctggtggaggagttgctcagacaggagggtcctagacctgagaggtgctcattttccccgtggactgagcaccgccgctgtagacagcgtgcctgcgggttgcttacagccgagggggaggagtggcagcggctgcggtctctattggcccccctgctcctgcggccacaagctgctgccaggtacgcaggaactttgaacaatgtcgtatgtgacctggtcaggagacttagacgacagcgggggcggggaacaggaccacccgctttggtgcgggacgtggccggtgagttctataagttcggtttagagggtattgctgccgtgcttctcggcagccggctgggatgcctggaggcacaggtccctccagacacggagacctttattagagctgttggaagtgttttcgtgagcacactgctgacaatggcaatgccacattggttacgccacctcgtgcccggaccttgggggaggctctgtcgagattgggaccaaatgtttgcatttgctcagcgccatgtggaacgtagagaggcggaggcagcgatgcgcaatggaggccagccagaaaaggatctagaatctggggctcacctcacgcactttctgtttagagaggagctgccagcacagtcaatcttgggcaacgtcactgaactgctcctggctggagtggacacagtctctaatacactgtcctgggctctttacgagctgtcgcgacacccagaggtgcaaacagcattgcattctgagatcacagccgctctgtctccagggagctccgcctacccttctgctaccgttttgagccaacttcctctgctcaaggccgtggtcaaagaggtcctgaggctgtaccctgttgtccccggtaattcaagagtccctgacaaggacattcatgtgggcgattatattattcctaaaaataccttagtcacactctgtcactatgcaactagtagagatccagcgcagtttccagagccaaattctttcaggcctgcacggtggcttggtgaaggaccaactccccatccatttgcatcactcccatttgggtttgggaagaggtcatgcatgggacgaaggctggccgaactcgagctccaaatggcgctggcgcagatccttacgcatttcgaggtgcagcctgagcccggagcagcacctgtaagacctaaaaccaggacagtactcgtgccagaaagaagtattaatctgcagtttttggatcgatag

SEQ ID NO: 196138 - DNA, 675 bp, synthetic construct
  misc_feature 1..675: note = Description of Artificial Sequence: Synthetic coding sequence
  source 1..675: mol_type = other DNA
atggagctgtacgagaccagcccctacttctaccaggagccccggttctacgatggagagaattatctccccgtgcaccttcaagggtttgaaccaccaggttatgaacgtacagagttgacgctgagccccgaagctcccgggcctttggaagataagggcctcgggacgcctgagcactgtccgggccaatgcctcccttgggcttgcaaggtgtgcaagagaaaaagtgtgagtgtggacaggcggagggcggccaccctgagagagaagcgacgtctgaagaaggtgaatgaggccttcgaagccctgaagaggtctaccctcttgaaccctaaccagaggcttcctaaagttgaaatcttaaggtcagcaatacagtacattgaacgcctgcaggcccttttgtcaagcctgaaccaggaggagcgcgacttgaggtacagaggtggcggcggtccacaacccggggtgccaagcgagtgcagttctcacagcgcctcatgctctccggaatgggggtcagccctcgagtttagtgccaacccgggggaccaccttttaacagcggacccgacagacgcccacaacttgcactctctaacaagcatcgttgattctattacagtggaggatgtttctgtagcttttccagatgagacgatgccaaactag

SEQ ID NO: 196139 - DNA, 465 bp, synthetic construct
  misc_feature 1..465: note = Description of Artificial Sequence: Synthetic coding sequence
  source 1..465: mol_type = other DNA
atgggcctgagcgacggcgagtggcagctggtgctgaacgtgtggggcaaggtggaagcggatatcccgggacatggccaggaggtgcttatcagactttttaagggtcaccctgagaccctggaaaaatttgataagttcaaacatctcaaatctgaggatgagatgaaagcgtccgaggacctgaaaaaacacggagctaccgtgctaaccgctctcggcggcattttgaagaagaagggccaccacgaggctgaaattaaaccgctggctcagtcacatgctacaaagcataagatccctgtaaagtatctagagttcatctccgagtgtataatccaggtgttgcagtcaaaacatcctggcgactttggtgccgacgctcaaggcgcaatgaataaagcattggagctgtttcggaaagacatggcatccaactacaaggaactaggctttcagggctag

SEQ ID NO: 196140 - DNA, 465 bp, synthetic construct
  misc_feature 1..465: note = Description of Artificial Sequence: Synthetic coding sequence
  source 1..465: mol_type = other DNA
atgggcctgagcgacggcgagtggcagctggtgctgaacgtgtgggggaaagtcgaagccgatatccccggacatggacaggaagtactgattaggctgtttaaaggccacccagagacactcgaaaaatttgacaagtttaagcacttgaagtctgaggacgaaatgaaggccagcgaggatctcaagaaacacggagctaccgtgctaacagcattgggggggattctcaaaaaaaaaggacatcatgaagctgagattaagcccctggcacagtctcacgccaccaagcataaaatacctgtcaagtacctggaatttatcagcgaatgtataatccaggtgctgcagtcaaagcaccctggagactttggcgccgatgcacagggcgccatgaacaaggctctcgagctctttcgaaaggacatggccagcaactataaagagctggggtttcagggttag

SEQ ID NO: 196141 - DNA, 465 bp, synthetic construct
  misc_feature 1..465: note = Description of Artificial Sequence: Synthetic coding sequence
  source 1..465: mol_type = other DNA
atgggcctgagcgacggcgagtggcagctggtgctgaacgtgtggggcaaagtcgaagccgatattccgggtcatggtcaggaggtgctgatcagactctttaagggacacccggaaaccctggaaaagtttgataaatttaaacatttgaagagtgaggatgagatgaaggctagtgaagacctcaagaaacatggtgcgacggtgctcactgccctgggggggattctcaagaagaaggggcatcacgaggctgaaattaaaccactagctcaaagtcacgcaacaaagcataagatccctgtgaagtatctggagttcatttctgagtgcatcatacaggtgctccagtccaagcatccaggagatttcggcgccgatgcgcaaggcgcaatgaataaggcgctagaactgttcagaaaagatatggcctcaaattataaagaattagggtttcagggctag

SEQ ID NO: 196142 - DNA, 465 bp, synthetic construct
  misc_feature 1..465: note = Description of Artificial Sequence: Synthetic coding sequence
  source 1..465: mol_type = other DNA
atgggcctgagcgacggcgagtggcagctggtgctgaacgtgtggggcaaagtggaggcagacattcccggccatggtcaagaggtactgattcgactgtttaaggggcaccctgagacactcgaaaagttcgataagtttaagcacctgaagtcagaggatgagatgaaggcttccgaggatctcaagaagcacggggctaccgtgctgaccgctcttggagggatcctgaagaaaaagggccaccatgaagccgaaatcaaaccactcgctcagtcccacgccaccaagcataagatcccagtcaagtacctcgagtttatttccgaatgtattattcaagttctccaaagcaaacatcccggtgattttggcgcagatgcccagggagcaatgaacaaggcgctggaactgtttcggaaagatatggcaagcaactataaggagcttggctttcaggggtag

SEQ ID NO: 196143 - DNA, 234 bp, synthetic construct
  misc_feature 1..234: note = Description of Artificial Sequence: Synthetic coding sequence
  source 1..234: mol_type = other DNA
atgggcctgagcgacggcgagtggcagctggtgctgaacgtgtggggcaaggtagaagccgatattcctggtcacggacaggaggttctaattcgcctttttaagggtcaccccgaaaccctcgagaaatttgataagtttaagcacctgaagtcagaagacgaaatgaaggctagcgaggacctaaagaagcacggcgccactgtactcaccgccctggggggcatactctag

SEQ ID NO: 196144 - DNA, 432 bp, synthetic construct
  misc_feature 1..432: note = Description of Artificial Sequence: Synthetic coding sequence
  source 1..432: mol_type = other DNA
atgggcctgagcgacggcgagtggcagctggtgctgaacgtgtggggcaaagtggaagctgacatcccaggtcacggacaggaagtgctcatacgactgttcaagggccatccagagaccttagaaaagtttgacaagtttaagcacctaaagtctgaggacgaaatgaaggcttcagaggacctcaaaaagcacggtgccacagtgctaaccgctctcggtggaatattgaaaaagaaggggcatcacgaggccgaaattaagcccctggctcaatcccatgcgacaaaacacaagatcccggtcaagtatctggaattcatttcagagtgtattattcaagtgctgcagtccaaacatcctggggattttggggcagacgcccagggggccatgaacaaagctctcgagttgtttcgaaaggatatgtag

SEQ ID NO: 196145 - DNA, 321 bp, synthetic construct
  misc_feature 1..321: note = Description of Artificial Sequence: Synthetic coding sequence
  source 1..321: mol_type = other DNA
atgggcctgagcgacggcgagtggcagctggtgctgaacgtgtgggggaaagtcgaggccgacatccccggccacggccaggaagtgttgataaggctcttcaagggacatcctgaaacgctagaaaagtttgataagttcaagcacctgaagtcagaggacgagatgaaggcctccgaggatctcaagaagcacggggccacagtgctcaccgctctcggaggaattctcaagaagaagggtcaccatgaggccgaaatcaagcccctggcccaatctcacgcaacaaaacacaagattcctgtgaagtatcttgaatag

SEQ ID NO: 196146 - DNA, 321 bp, synthetic construct
  misc_feature 1..321: note = Description of Artificial Sequence: Synthetic coding sequence
  source 1..321: mol_type = other DNA
atgggcctgagcgacggcgagtggcagctggtgctgaacgtgtggggcaaagtggaggccgacatccctggccacgggcaggaagtgctgatccggctcttcaagggccacccagaaacactggaaaagttcgacaagtttaagcaccttaagagtgaggacgaaatgaaggccagcgaggatctgaaaaaacatggcgcaaccgttctaacagccctgggggggattctgaaaaagaaagggcatcacgaagcagagatcaagccactcgcgcagtcacatgccaccaaacataaaatcccggttaagtatcttgaatag

SEQ ID NO: 196147 - DNA, 411 bp, synthetic construct
  misc_feature 1..411: note = Description of Artificial Sequence: Synthetic coding sequence
  source 1..411: mol_type = other DNA
atggccgtgggcgccgagcggctgggcgaggtgctgatccggctgttcaaaggtcaccctgagactttggagaagttcgacaagttcaagcatctcaagtccgaggacgagatgaaggcaagtgaggacctgaagaaacacggagccactgttctcactgcgcttggggggattctgaagaagaaaggacaccacgaagccgaaatcaaacctttagcacaatctcatgctaccaaacacaagattcctgtcaaatacctcgagttcatctccgaatgcataatccaggttctgcagagcaagcatcccggggatttcggagctgacgcccaaggcgccatgaataaagctctggaactctttagaaaggatatggcgtccaactacaaagaactcggtttccaggggtag

SEQ ID NO: 196148 - DNA, 4398 bp, synthetic construct
  misc_feature 1..4398: note = Description of Artificial Sequence: Synthetic coding sequence
  source 1..4398: mol_type = other DNA
atgagcctggtgaccgtgcccttctaccagaagcggcaccggcactttgatcaatcttaccggaatatacagactagatatcttttggacgagtacgcttcaaagaagcgggcctctacgcaggcttcctcacaaaagagtctgtcccagcgtagctctagccagagagcttcctctcagacgtcgttgggtgggactatatgcagagtttgtgccaaacgtgtcagcactcaagaggatgaggaacaggaaaacagatccagatatcagagtctggtggctgcatacggcgaggccaaaagacaaagattcctgtctgagttagcgcacctagaagaagatgtacacctcgcacgatcgcaggccagggacaagttggacaagtacgctatacagcagatgatggaagacaaactggcctgggaacgccacacattcgaagaacgcatcagcagggccccggagattcttgtccgcttgagatcacacaccgtgtgggaaagaatgagcgtgaagctgtgcttcactgtgcagggctttccgactcccgttgtgcagtggtataaggatggttcactaatctgtcaggccgcggaaccaggcaaataccggattgagtctaattatggcgtccacacgctagaaattaatagagctgatttcgatgacacagcaacctactcggccgtcgccaccaatgcccacggccaggtgagtaccaatgctgccgtcgtggttcgtaggttccggggcgacgaagagccgttcaggagcgtcggtctgcccataggcctccctctcagctctatgatcccatatacccatttcgatgtgcagtttctggagaagtttggcgtgacatttcggcgagagggggagacggtcacattgaagtgtaccatgctggtgacgcctgacttaaagagggtgcagccgagggccgagtggtacagagatgatgtgctcttgaaagaatcaaaatggaccaaaatgtttttcggagagggacaagcttcactctccttcagtcatctccacaaggacgacgaggggttgtatactctgcggatagttagtaggggtggtgtctctgaccactctgcttttctctttgtccgggatgccgatccgttggttactggagcaccaggcgctcctatggatctccagtgccatgatgctaatcgggattacgtaatcgtgacctggaagccgcccaacaccaccaccgagagccccgttatgggctatttcgtcgacaggtgtgaagtagggaccaataattgggtgcagtgtaatgatgctcccgtgaaaatctgtaaataccctgtcacaggtctgttcgagggtagatcctatatctttagggttcgcgccgttaattctgctggaatatcccgcccttctcgagtctcagacgccgtggccgcccttgacccactggatctcagaaggttgcaagcggtgcacctcgaaggcgagaaagaaattgcgatctaccaagacgacctggaaggtgacgctcaggtgcctggaccacccacaggagtgcatgcttctgagatttccaggaattatgtcgtactgagttgggaaccaccgacaccacgtggtaaggaccccctgatgtacttcattgagaagagtgtagttggatctggcagttggcagcgtgtgaatgcccagactgccgtgaggtcacccaggtacgccgtctttgatctgatggaaggtaaatcctatgtgtttcgggtcctgtccgcgaatagacatggtctgtccgagccttctgagataacttcacccatacaagcacaggacgtgactgttgttccatcagctcccggacgagttctagcctcaaggaataccaagacatccgtcgtggtgcagtgggaccgacctaagcacgaggaggatctcctgggctattatgttgactgctgtgttgcaggaaccaatctgtgggaaccgtgtaatcataaaccaatcggttacaataggtttgtggtgcacggcctgactacaggtgaacagtacatcttccgcgtaaaagccgtgaacgcagtggggatgagtgaaaatagccaggaatccgatgtgatcaaagtgcaagcggcgcttactgttcctagccacccttatggaataactctccttaattgtgatgggcactccatgaccctgggttggaaggtccctaaattctccgggggatctcccattctcggatattacctggacaagcgggaagttcatcataagaattggcacgaggttaactcctcacccagtaaacccaccatattgactgtcgacggcctaacggagggatccttatacgagttcaagatcgctgctgtgaatttggccggaattggcgagccaagcgatccgtccgagcactttaaatgcgaagcctggaccatgcccgaaccgggaccggcctacgacctaactttttgcgaagtgcgtgatacttccctcgtgatgttatggaaagccccggtgtacagtgggtcatcacccgtctcaggctattttgtggactttcgtgaagaggacgccggagagtggattacagtgaatcagaccacaaccgccaatcgttacctgaaggtgtcagacctgcagcagggaaaaacatatgttttccgtgtccgcgcagtcaatgccaatggtgtaggaaaaccttctgacaccagtgagcctgttctggtcgaggcacgacctgggacaaaggagataagtgccggggtggacgaacaggggaatatatacctgggattcgactgtcaggaaatgaccgacgcttcccaattcacgtggtgtaagtcttacgaagagatctccgatgatgagaggtttaagatcgagaccgtgggcgaccacagtaaactttatctgaagaacccagataaggaggacctgggcacctatagcgtgtctgtgagtgacactgatggagtgtcttcctcatttgtgctggaccctgaagagctcgaacgtttaatggccctttctaatgagattaagaacccaacaattcctctcaagtccgagctcgcatatgaaatttttgataaagggcgggtccggttttggctgcaagcagaacatttaagccccgacgcctcttatcggttcatcataaacgaccgggaggtgtctgactcagaaattcaccgcatcaagtgtgacaaagcgaccggaattatcgagatggtgatggatcgcttcagtatagagaatgagggcacttataccgttcaaatccacgacggaaaggctaagagccagtccagcctggtgctgatcggtgatgccttcaagaccgtccttgaagaagccgaattccagagaaaggaatttctcaggaagcaggggccccatttcgcagaatacctgcactgggatgtcacagaagagtgcgaggtacgtttagtttgcaaggtcgccaatactaaaaaggaaactgtgtttaaatggctgaaggatgatgtgctgtatgagactgagacactgccgaacctggagcgcggcatttgtgagctcctgattcccaaactgtcgaagaaagaccacggagagtataaggccacgttgaaggatgaccggggtcaggacgtatctattctcgaaattgcggggaaagtctacgatgacatgatcttggcgatgtccagagtgtgtggtaaatctgcttccccgctgaaagttctgtgtaccccggaggggattcggctgcagtgctttatgaaatactttaccgacgaaatgaaagttaactggtgccataaagatgcaaaaatctcaagcagtgagcacatgaggattggcgggtcagaggaaatggcgtggctccagatctgtgagccaactgagaaagataaagggaagtatactttcgaaatctttgacggcaaagacaatcatcagcgcagcctagatttgagcggccaagcctttgatgaagccttcgctgaatttcaacaattcaaggccgcagcatttgccgaaaaaaatagaggccggcttattggcggcttgcccgatgtggttaccatcatggagggtaagacgttgaaccttacttgtactgttttcggaaatcctgaccctgaggtaatttggttcaagaatgatcaagatatccagctgagcgagcacttctcagtgaaggtagagcaggcaaagtatgtttcaatgaccattaagggggtgacaagcgaagactccggaaagtacagcatcaacatcaaaaataaatatggaggcgagaagatcgacgttactgtatcagtctataaacacggcgagaaaataccagatatggcacctccacagcaggccaaacctaagctgatccccgcaagcgcgtcagcagctgggcagtag

SEQ ID NO: 196149 - DNA, 3420 bp, synthetic construct
  misc_feature 1..3420: note = Description of Artificial Sequence: Synthetic coding sequence
  source 1..3420: mol_type = other DNA
atgcccgagcccaccaagaaggaggacgaggaggaggtgagcccccccagcgctctgccccctgactggaccctagtggaaacacccccgggggaagaacaggccaaacaaaacgctaattcccagctgtccatcctgttcatcgaaaaaccccaggggggcacagtgaaagttggggaggatattacctttattgcaaaggtaaaagctgaggaccttctgagaaaaccaacaatcaagtggtttaaaggaaaatggatggacttagcctccaaggccggcaagcacctgcagttgaaggagacatttgaaagacattccagagtttatacctttgagatgcaaattattaaagccaaagacaactttgcaggcaactacaggtgcgaagtgacctacaaggataagtttgactcatgttcttttgatctggaggtccacgaatctaccgggacaacacccaatattgatatcaggagcgccttcaagaggtccggcgagggacaggaggacgcaggggagcttgatttttcgggactactgaagcgtagagaggtcaagcagcaggaagaggagccccaggtcgacgtgtgggagctgttgaagaacgccaagccgtcagagtacgaaaaaattgccttccaatacgggatcaccgaccttcgaggtatgctgaagcggcttaaaaggatgcgtagggaagaaaagaagtccgccgcattcgctaagatccttgatccggcatatcaggtggacaagggcggacgggtgaggtttgtggtggaattggctgatcccaaattggaggttaagtggtacaagaacggtcaggaaatcaggccctccaccaaatatatctttgagcataaggggtgccaaaggatcttattcatcaacaactgtcagatgaccgacgattccgagtactacgttacagcaggagatgagaagtgttctacggaactttttgtaagggagccccccatcatggtcaccaagcagctcgaagacaccaccgcctactgcggtgaacgggtggaactggagtgcgaggttagtgaggatgacgctaacgtgaaatggttcaaaaacggcgaggaaattatcccggggccaaaatctcgttataggatacgagtggagggcaagaagcacattctgattatcgaaggagctacaaaggcagacgccgctgaatattccgtcatgaccaccggagggcagtcctcagccaaactgagcgtggacctgaaaccattgaaaatcctgacacctctgacagaccagacagtgaacctgggtaaagaaatctgtcttaagtgcgagatatcggaaaacatcccagggaaatggaccaagaacggcctacccgtccaggaaagcgacaggctaaaagttgtccacaaaggaaggattcacaaactggtcatcgccaacgccctcaccgaggatgagggcgactacgtttttgcacccgatgcttacaatgtgaccctcccagcaaaggtacacgtgatcgaccctccaaaaatcattctggacggtttggacgctgataacacagtcacagttatcgcggggaacaagctgcggctggaaatccctataagtggagagcccccacctaaggcgatgtggtcaaggggagacaaggctattatggaaggcagcggacgcattcgcaccgaatcttacccagacagcagtaccctggtcatagatatcgctgagcgggacgacagcggagtctaccacattaatctcaagaatgaggctggagaagcccacgccagtatcaaggttaaggtcgtagacttcccagacccccccgtagcccctacagtgacagaggtgggcgacgattggtgcattatgaactgggagccacccgcatacgatggcggtagcccaattctgggttatttcatcgagaggaaaaagaagcagtccagtaggtggatgagattgaattttgacctttgtaaagaaacaacgttcgagccaaagaagatgatcgagggggtcgcttacgaggtacgtatcttcgcagtgaatgccatcggcatctctaaaccttccatgccctctcggcctttcgtgcccctggcagtgacgtcccctccgactttactgaccgtagactccgtgaccgacaccacggtgaccatgcggtggaggccgccggatcatatcggcgcagctggcttggatgggtatgtcctggagtactgtttcgaggggacggaagattggattgtggccaataaggatctgattgataaaaccaaattcacaattacaggcctgccaacggacgcaaaaatctttgtgagagtgaaggctgtgaacgccgccggagcctccgagcctaaatactacagtcaacctatcctggtaaaagaaataattgaaccacccaagattcggatacccaggcatctcaagcagacctacatccgaagggtaggggaggcagtcaatctcgtcatccccttccaggggaagccccgaccagagctgacatggaaaaaggacggtgccgagattgataagaaccagatcaacattcgtaattcagaaacagacaccattattttcattcgaaaagctgagcgttcccactctggaaagtacgaccttcaggtgaaggtggacaagttcgtggaaaccgctagcatagacattcagatcatcgacaggcctggcccaccacagattgttaaaatcgaagatgtatggggggaaaacgtcgctctcacttggacgccccctaaggacgacgggaacgcagcaattaccgggtacacaattcagaaagcagacaagaaatcgatggagtggtttaccgttatcgaacactaccatcgtacctctgccaccattacggaactcgtcatcggcaatgagtactattttcgagtattttcagagaatatgtgcggcctgtccgaggatgctacgatgacaaaggaatccgccgtgatagcaagggacggaaaaatctataaaaaccccgtctatgaggacttcgacttcagtgaggctcctatgtttacccagcctctagtcaatacttatgctatcgctggctataatgctactctgaattgttccgtgaggggaaacccaaaacccaagattacatggatgaagaacaaggtggcaattgtggatgatccacgttatcgcatgttttctaatcagggggtctgcaccctcgagatccggaagcccagcccttatgacgggggtacttactgttgcaaagctgttaacgacctgggtactgtggagattgaatgtaaactggaggtaaagggcggcctttcattctgcaggctattactgcaaggagtgccccccaacattatagactcctacctcagagacctgcacagcagtaaccctgaggagtactag

SEQ ID NO: 196150 - DNA, 3522 bp, synthetic construct
  misc_feature 1..3522: note = Description of Artificial Sequence: Synthetic coding sequence
  source 1..3522: mol_type = other DNA
atgcccgagcccaccaagaaggaggagaacgaggtgcccgcccccgcccccccacccgaggagccaagcaaggagaaggaggctggaaccacccccgccaaagactggacacttgtggagactcctccaggcgaggaacaggccaagcaaaatgctaatagccagctgtccatcctttttattgagaagccccagggcggtaccgtcaaggtcggggaagatattacctttattgctaaagtgaaggccgaggacttgctgcgcaaacctaccatcaaatggttcaagggcaagtggatggacctggcctcaaaggccggcaagcacctgcagttgaaggaaacctttgaacgtcatagcagagtctacacgtttgagatgcagatcatcaaagctaaagataacttcgccggaaactaccggtgtgaagtgacctacaaggataagttcgacagctgcagttttgatctggaggtccatgagtccacagggaccactcccaatattgacattaggagcgcctttaagcgttcaggtgaaggccaggaagatgccggcgagctggatttctccggcctcctcaagcgcagggaggtgaaacagcaggaagaggaacctcaagtggacgtgtgggagctgctgaagaacgccaagcccagcgaatatgagaagatcgccttccagtatggtattaccgacctcagggggatgctgaaacggctcaagcgcatgcgccgtgaggagaaaaaatctgccgcatttgctaaaattctcgatcctgcgtaccaggtcgataaggggggcagagttagattcgttgtggaactagccgatcctaagctggaagtcaagtggtacaagaacggtcaagaaatcagaccatcaacgaaatacattttcgagcacaagggttgccaaaggatcctgtttatcaataattgccagatgaccgatgatagcgagtattacgtcacagccggagatgaaaaatgctccactgagctgttcgtgagggagccaccaataatggtaaccaaacaactggaggacacaactgcatactgcggcgagagagttgagttggagtgcgaggtaagtgaagacgatgctaatgttaagtggttcaagaatggcgaggagatcatcccaggacccaagagcagatacagaattagagtggagggtaaaaaacatatcctgatcatcgaaggagcgacaaaagccgatgccgccgagtacagcgttatgactaccggagggcagtcgtcagcaaagctgagcgtggaccttaagcccctgaaaattcttacccctctgacagaccagaccgtaaatctggggaaagagatttgtcttaagtgcgaaatcagcgagaacattcctggcaaatggacgaagaacggcctgcctgtgcaggagtctgaccgattgaaggttgttcataaggggcggattcataagcttgtgatagcaaacgccttaaccgaagacgagggcgactacgtatttgcacctgatgcctacaatgtcacattgccggcaaaagtgcacgtaattgatccccccaagattatacttgatggcctggatgctgacaacaccgttacggtaatcgccgggaacaagctacgcttggagattcccatttccggagaaccgcctccaaaggccatgtggagcaggggagataaggctatcatggagggatccggccgtatcaggaccgagtcgtatccagattcctctactctggtgatagacattgccgaacgagacgactcgggggtctatcacattaatctaaagaacgaggctggggaagcccatgcctccattaaagttaaagtcgtagacttcccggacccaccggtggcccctaccgtaactgaagtaggtgacgactggtgtataatgaactgggaacctcccgcctacgatgggggatccccgattctgggctactttatcgagcgaaagaaaaaacaatcctctcggtggatgagacttaactttgacctgtgtaaagaaacaacctttgagcccaaaaagatgattgaaggagttgcttacgaagtccgcatcttcgcggtgaatgctatcgggatcagcaagccatcaatgccaagcaggcccttcgttcctctggccgtgaccagcccccccaccctgctaaccgtagatagcgtcacagatacgactgtgacaatgcgatggcgccctcccgatcacattggagccgctggtctcgacggctacgttctagaatattgttttgaaggcagtactagcgcgaaacagtcagacgaaaacggcgaggctgcctacgatctccctgcagaagattggatcgtagctaacaaagacctgatcgataaaactaagtttacgatcactggactgcccacagatgctaagatcttcgtgcgtgtcaaagcagttaacgccgcaggcgccagcgaacctaaatactactcgcagcctatcctcgtcaaggagattatagagccaccaaaaattagaatccctcgtcatctcaaacagacttacataagacgggtgggggaggctgtgaacctggtgatcccctttcagggtaaacctcgaccagagttaacgtggaaaaaagacggtgcagaaatcgataagaatcagatcaatatcaggaattccgagacagatactattatctttattagaaaagcagaacgatctcactcaggaaagtacgacttgcaagttaaggtggacaaatttgtcgagaccgcttcaattgacatccagatcattgacagacctggtcccccccagatcgtcaagatagaagatgtctggggtgagaacgtagctctgacatggactcctcccaaagacgatggcaatgctgctattacaggatataccatccagaaggctgacaagaagtctatggagtggtttacagtgatagaacactaccaccggacatcggcaaccattaccgagctggtcatcgggaatgagtattatttccgcgtctttagcgaaaacatgtgcggactgtccgaggacgctacaatgacaaaagagtccgccgtgatcgcccgagacgggaaaatatacaagaatccggtgtatgaagacttcgactttagtgaagcacctatgtttactcagccgctagtaaatacatacgccatagcaggctacaacgccacactaaattgtagcgtgcgcgggaacccaaagcctaagattacctggatgaaaaataaagtggctatcgtcgacgaccctagatatcgaatgtttagcaatcagggtgtgtgtacgctggaaattcgaaaaccatcaccttatgacgggggcacttactgttgtaaggcagttaatgacctcgggacagtggagatagagtgcaagctggaagtaaaggtgatctatcagggggtgaatacaccaggacaaccagtatttctggagggtcaacagcaggttgggagccccagcgccgactcctcttgcaaggcctacctccagacctag

SEQ ID NO: 196151 - DNA, 3384 bp, synthetic construct
  misc_feature 1..3384: note = Description of Artificial Sequence: Synthetic coding sequence
  source 1..3384: mol_type = other DNA
atgcccgagcccaccaagaaggaggagaacgaggtgcccgcccccgcgccccctcccgaagagccgagcaaggaaaaggaagccgggacaacacccgccaaggattggaccctagtggaaactccaccaggagaggaacaagcgaagcagaacgccaacagtcaactgtctatcctattcatagagaagccacaggggggtactgtgaaggtgggcgaggacattactttcatcgctaaagtaaaagcagaagatctgttaagaaaaccaacaatcaaatggtttaaaggcaagtggatggatttagcgtccaaggccgggaaacacctgcagttaaaagagaccttcgaaagacactcacgtgtctatacattcgaaatgcagattataaaagccaaggacaattttgccggcaattacagatgcgaggttacttacaaagataagtttgattcatgctccttcgaccttgaggtgcacgaatccacaggcaccacccctaacatcgatatccggtcagcctttaaaaggagagaagtcaaacagcaggaagaagaaccccaggttgatgtctgggagctgctaaaaaacgccaaaccctccgaatatgagaaaatcgcatttcagtacgggataactgatctgcgagggatgctcaagcgtttgaagcgcatgcggagggaagagaagaagagcgccgcttttgccaagatcttggatcctgcctatcaggtggataagggcggaagagttagattcgtggtggagctggccgatcctaaattggaagtgaaatggtacaaaaacggtcaggagatccggcctagcaccaaatacatcttcgaacacaaaggatgccagagaatcctgtttatcaacaactgtcagatgacagatgactccgaatattacgtgaccgccggggatgagaagtgctcaaccgagctcttcgttcgcgagcctccaatcatggtgacgaagcagctcgaggataccaccgcctactgtggtgagagagtagagttggaatgtgaggtgagcgaagatgatgcaaacgtgaaatggttcaaaaacggggaggagatcatccctggccccaaatctcgctacaggatccgcgtggagggaaaaaagcacatcctgataatagaaggggccaccaaggccgacgccgcggagtattctgtcatgacgaccggcggacaatcttctgccaagctttctgtagatctcaagcccctgaagattctcaccccgttgactgaccaaactgtgaatctggggaaagagatatgcctcaaatgcgagatttcggagaacataccaggtaagtggaccaaaaacgggctgccagtccaggagagtgatcgcctgaaggtagtgcacaaaggtcggattcataagctcgtgatcgccaacgcactgactgaggacgaaggcgactatgtttttgccccagacgcatataacgtcacactgccagctaaagtgcacgtgatagacccccccaagatcatcttggatggactagatgccgacaatacagtgaccgtgattgccggcaacaaattaaggctggaaatacctatttctggcgagcccccaccaaaagccatgtggtctcgcggcgataaagccatcatggaagggtctggccggattagaacggagtcttacccggactcgtctactctggttattgatatcgctgaacgcgatgatagtggagtttaccatatcaatctgaagaatgaggcaggcgaggcccacgcttcgattaaggttaaagtggtggactttccagacccacccgtggcgcccaccgtgactgaagtgggtgatgactggtgcatcatgaactgggagccacctgcctacgacggtggatccccaatcctcgggtattttatagagcggaagaaaaagcaaagtagcagatggatgagactgaatttcgatctgtgcaaggagacaacctttgaaccaaaaaaaatgattgaaggcgtagcctatgaagtgcgtatcttcgctgtgaacgctatcggcatctcaaaacctagcatgcccagccgaccatttgtcccactggctgtaacctccccccctacgctgctaacagtggacagtgtgacggatacaacggtgactatgcggtggcggccacctgaccatatcggtgctgctggacttgacggatacgtcctggagtattgctttgaaggtaccgaggattggatcgtggcgaacaaggatctcatcgacaaaacaaaattcacaattaccgggctcccaactgacgcaaaaatcttcgtcagagttaaagccgtgaacgccgccggcgccagcgagccgaagtactactcacagcccatattggtgaaggagatcatcgagccaccaaaaatccgcatcccaaggcacttgaaacagacatatatcagaagggtgggagaggctgtgaaccttgtgatccccttccaaggcaagccccgaccagagctgacctggaaaaaggacggagcagaaattgataagaaccaaattaacattcggaattctgagaccgacaccattatttttatcaggaaagccgaacgttcacatagtggaaagtatgaccttcaagtaaaggtggacaagttcgtggagaccgcctcaatagatatccaaataattgacagacctgggccaccgcaaatagtcaagattgaggatgtgtggggagagaacgtggcattgacctggactccccctaaggatgatgggaacgccgctatcacagggtacaccatacagaaggcagacaaaaaatctatggaatggttcactgtgattgagcactaccaccgaacctcagccacaataacagaactagtcatcggaaacgaatactactttagagttttcagtgaaaacatgtgcggcctaagcgaggatgcaaccatgaccaaggaaagcgcagtcattgccagagacgggaagatatataagaacccagtctatgaagacttcgacttctcagaggctcccatgttcacgcagccactggttaacacttacgccatcgcaggctacaacgccaccctgaattgcagtgtaagggggaaccctaaacccaaaattacttggatgaaaaataaggtggccatcgtcgatgatccaagatatcgtatgttcagcaatcagggcgtgtgtacgctcgagattagaaagccctccccatatgacgggggtacatactgctgtaaggctgtgaacgatctggggactgttgaaatcgagtgcaagctggaggttaaggtcatctatcagggggttaatacacccggccagcctgttttcctggaaggacagcagcagagcttacataacaaggacttttag
